United States Patent Application Publication US 2018/0126003 A1 - sequence listing, part 86

SEQ ID NO: 155882 - DNA, 2538 bp, Artificial Sequence
  derived and/or modified sequence
atggagctttggaggcagtgcacccattggctcatacagtgtagagtgcttccaccatctcaccgtgtgacatgggacggggcacaggtatgtgagctcgcgcaagcactgcgggacggggtcctcctgtgtcaattactgaacaatctcctgccacatgcgatcaacttgcgagaggtgaatttgaggcctcagatgtcgcagtttctttgcctgaaaaacataagaacttttctttcaacttgctgcgagaagttcggactcaaaagatctgagctcttcgaagccttcgatctgttcgatgttcaagactttggaaaagtgatctacactctgagcgcactatcctggacccctattgcccagaacagagggatcatgcctttcccgaccgaagaagagagtgttggggacgaggatatttactccggtcttagtgaccagattgatgacaccgtggaggaggacgaagatctgtatgattgtgttgaaaacgaagaagcagagggagatgagatttatgaagatttgatgaggtcagagccagtttccatgcccccaaaaatgacagagtacgacaaacgctgctgctgcctgagggaaatccagcaaacggaagaaaagtataccgatactttgggttccattcaacagcacttccttaagccactgcagcggttcctcaagcctcaggacattgagattattttcattaacatcgaggatttgttgagagtccacacccattttctgaaagaaatgaaggaagcgctcgggacccccggagctgccaatctgtatcaggttttcattaagtacaaggagcggtttctcgtctacggaagatattgttctcaggtggagtctgcctccaagcacctagacagggtggccgcagccagggaggatgtacaaatgaaactggaggaatgttcccagcgcgctaacaatgggagattcaccttacgggatctattgatggttccaatgcagagggtgctaaaatatcacctgttgctccaagaactcgtcaaacacacgcaggaagctatggagaaagagaatcttcgcctcgccctggatgcgatgagagacctggcacagtgtgtgaacgaagtgaagcgtgacaacgaaacgctcaggcagatcaccaacttccagttgtccattgaaaatttagatcagtctctcgctcattatggccgtcctaaaatcgacggcgagctgaagattacaagcgttgagaggaggtctaagatggacaggtacgcgttcttactagacaaggccttgttgatctgcaagaggcggggagactcttatgatctgaaggattttgtgaatctgcattcgtttcaggtccgcgatgactccagtggggacagagacaataaaaaatggtcccacatgtttctgttgatcgaggatcagggcgcacaagggtatgaattatttttcaagactcgcgagcttaaaaaaaagtggatggagcagttcgaaatggcaatcagcaacatctatcccgagaacgccaccgcaaatgggcatgacttccaaatgttctcgtttgaggaaacaacgagttgcaaagcctgtcagatgttgctccgcggaacgttctaccagggctaccggtgtcatcgttgccgagcctccgcacacaaagaatgccttggaagggttccaccgtgcggccgacatggccaggactttccaggcaccatgaaaaaggataagctccaccggagagcacaggacaagaaacggaatgaactggggttgcctaagatggaggtgttccaggagtactacgggttgcccccaccaccaggggcaatcggaccatttctgagactaaatccaggcgacatcgtggaattaaccaaagccgaagctgaacagaactggtgggaaggccgaaacacttccactaacgagatcggttggtttccctgcaatcgggttaagccatacgtgcatggcccaccccaggatttatctgtacacctctggtacgccggtccaatggagcgcgctggtgccgaaagcatccttgccaatcgcagcgacgggacttttctagtaaggcagcgcgtgaaggatgccgcagaatttgccattagcattaagtacaatgtggaggtgaagcacattaaaattatgacagccgagggcttgtacaggattactgagaagaaagcgtttcggggattaacagaactcgtcgagttctaccagcaaaactcactcaaggattgtttcaagtctctggacacaaccttgcagttcccatttaaggagcctgaaaaaagaactatctcccgcccagccgtcggctcaacgaagtattttggaacagctaaggctaggtatgatttttgtgctagagatcgctcagagctgagcctcaaagagggcgatatcataaagattcttaacaagaaagggcagcagggttggtggcgaggtgagatttacggcagggtgggatggttcccagctaactatgtcgaagaagattattccgaatattgctag

SEQ ID NO: 155883 - DNA, 2888 bp, Artificial Sequence
  derived and/or modified sequence
actagctgtcgctccacaggcgagcagggcaggcgtgcgggcgggtgggtggtggaggctgcgagggtgcacggccggccctgggcaggcggtagccatggagctgtggcgccaatgcacccactggctcatccagtgccgggtgctgccgcccagccaccgcgtgacctgggatggggctcaggtgtgtgaactggcccaggccctccgggatggtgtccttctgtgtcagctgcttaacaacctgctaccccatgccatcaacctgcgtgaggtcaacctgcgcccccagatgtcccagttcctgtgccttaagaacattagaaccttcctgtccacctgctgtgagaagttcggcctcaagcggagcgagctcttcgaagcctttgacctcttcgatgtgcaggattttggcaaggtcatctacaccctgtctgctctgtcctggaccccgatcgcccagaacagggggatcatgcccttccccaccgaggaggagagtgtaggtgatgaagacatctacagtggcctgtccgaccagatcgacgacacggtggaggaggatgaggacctgtatgactgcgtggagaatgaggaggcggaaggcgacgagatctatgaggacctcatgcgctcggagcccgtgtccatgccgcccaagatgacagagtatgacaagcgctgctgctgcctgcgggagatccagcagacggaggagaagtacactgacacgctgggctccatccagcagcatttcttgaagcccctgcaacggttcctgaaacctcaagacattgagatcatctttatcaacattgaggacctgcttcgtgttcatactcacttcctaaaggagatgaaggaagccctgggcacccctggcgcagccaatctctaccaggtcttcatcaaatacaaggagaggttcctcgtctatggccgctactgcagccaggtggagtcagccagcaaacacctggaccgtgtggccgcagcccgggaggacgtgcagatgaagctggaggaatgttctcagagagccaacaacgggaggttcaccctgcgggacctgctgatggtgcctatgcagcgagttctcaaatatcacctccttctccaggagctggtgaaacacacgcaggaggcgatggagaaggagaacctgcggctggccctggatgccatgagggacctggctcagtgcgtgaacgaggtcaagcgagacaacgagacactgcgacagatcaccaatttccagctgtccattgagaacctggaccagtctctggctcactatggccggcccaagatcgacggggaactcaagatcacctcggtggaacggcgctccaagatggacaggtatgccttcctgctcgacaaagctctactcatctgtaagcgcaggggagactcctatgacctcaaggactttgtaaacctgcacagcttccaggttcgggatgactcttcaggagaccgagacaacaagaagtggagccacatgttcctcctgatcgaggaccaaggtgcccagggctatgagctgttcttcaagacaagagaattgaagaagaagtggatggagcagtttgagatggccatctccaacatctatccggagaatgccaccgccaacgggcatgacttccagatgttctcctttgaggagaccacatcctgcaaggcctgtcagatgctgcttagaggtaccttctatcagggctaccgctgccatcggtgccgggcatctgcacacaaggagtgtctggggagggtccctccatgtggccgacatgggcaagatttcccaggaactatgaagaaggacaaactacatcgcagggctcaggacaaaaagaggaatgagctgggtctgcccaagatggaggtgtttcaggaatactacgggcttcctccaccccctggagccattggaccctttctacggctcaaccctggagacattgtggagctcacgaaggctgaggctgaacagaactggtgggagggcagaaatacatctactaatgaaattggctggtttccttgtaacagggtgaagccctatgtccatggccctcctcaggacctgtctgttcatctctggtacgcaggccccatggagcgggcaggggcagagagcatcctggccaaccgctcggacgggactttcttggtgcggcagagggtgaaggatgcagcagaatttgccatcagcattaaatataacgtcgaggtcaagcacattaaaatcatgacagcagaaggactgtaccggatcacagagaaaaaggctttccgggggcttacggagctggtggagttttaccagcagaactctctaaaggattgcttcaagtctctggacaccaccttgcagttccccttcaaggagcctgaaaagagaaccatcagcaggccagcagtgggaagcacaaagtattttggcacagccaaagcccgctatgacttctgcgcccgagaccgatcagagctgtcgctcaaggagggtgacatcatcaagatccttaacaagaagggacagcaaggctggtggcgaggggagatctatggccgggttggctggttccctgccaactacgtggaggaagattattctgaatactgctgagccctggtgccttggcagagagacgagaaactccaggctctgagcccggcgtgggcaggcagcggagccaggggctgtgacagctcccggcgggtggagactttgggatggactggaggaggccagcgtccagctggcggtgctcccgggatgtgccctgacatggttaatttataacaccccgatttcctcttgggtcccctcaagcagacggggctcaagggggttacatttaataaaaggatgaagatgg

SEQ ID NO: 155884 - DNA, 2620 bp, Artificial Sequence
  derived and/or modified sequence
acaggcgagcagggcaggcgtgcgggcgggtgggtggtggaggctgcgagggtgcacggccggccctgggcaggcggtagccatggagctgtggcgccaatgcacccactggctcatccagtgccgggtgctgccgcccagccaccgcgtgacctgggatggggctcaggtgtgtgaactggcccaggccctccgggatggtgtccttctgtgtcagctgcttaacaacctgctaccccatgccatcaacctgcgtgaggtcaacctgcgcccccagatgtcccagttcctgtgccttaagaacattagaaccttcctgtccacctgctgtgagaagttcggcctcaagcggagcgagctcttcgaagcctttgacctcttcgatgtgcaggattttggcaaggtcatctacaccctgtctgctctgtcctggaccccgatcgcccagaacagggggatcatgcccttccccaccgaggaggagagtgtaggtgatgaagacatctacagtggcctgtccgaccagatcgacgacacggtggaggaggatgaggacctgtatgactgcgtggagaatgaggaggcggaaggcgacgagatctatgaggacctcatgcgctcggagcccgtgtccatgccgcccaagatgacagagtatgacaagcgctgctgctgcctgcgggagatccagcagacggaggagaagtacactgacacgctgggctccatccagcagcatttcttgaagcccctgcaacggttcctgaaacctcaagacattgagatcatctttatcaacattgaggacctgcttcgtgttcatactcacttcctaaaggagatgaaggaagccctgggcacccctggcgcagccaatctctaccaggtcttcatcaaatacaaggagaggttcctcgtctatggccgctactgcagccaggtggagtcagccagcaaacacctggaccgtgtggccgcagcccgggaggacgtgcagatgaagctggaggaatgttctcagagagccaacaacgggaggttcaccctgcgggacctgctgatggtgcctatgcagcgagttctcaaatatcacctccttctccaggagctggtgaaacacacgcaggaggcgatggagaaggagaacctgcggctggccctggatgccatgagggacctggctcagtgcgtgaacgaggtcaagcgagacaacgagacactgcgacagatcaccaatttccagctgtccattgagaacctggaccagtctctggctcactatggccggcccaagatcgacggggaactcaagatcacctcggtggaacggcgctccaagatggacaggtatgccttcctgctcgacaaagctctactcatctgtaagcgcaggggagactcctatgacctcaaggactttgtaaacctgcacagcttccaggttcgggatgactcttcaggagaccgagacaacaagaagtggagccacatgttcctcctgatcgaggaccaaggtgcccagggctatgagctgttcttcaagacaagagaattgaagaagaagtggatggagcagtttgagatggccatctccaacatctatccggagaatgccaccgccaacgggcatgacttccagatgttctcctttgaggagaccacatcctgcaaggcctgtcagatgctgcttagaggtaccttctatcagggctaccgctgccatcggtgccgggcatctgcacacaaggagtgtctggggagggtccctccatgtggccgacatgggcaagatttcccaggaactatgaagaaggacaaactacatcgcagggctcaggacaaaaagaggaatgagctgggtctgcccaagatggaggtgtttcaggaatactacgggcttcctccaccccctggagccattggaccctttctacggctcaaccctggagacattgtggagctcacgaaggctgaggctgaacagaactggtgggagggcagaaatacatctactaatgaaattggctggtttccttgtaacagggtgaagccctatgtccatggccctcctcaggacctgtctgttcatctctggtacgcaggccccatggagcgggcaggggcagagagcatcctggccaaccgctcggacgggactttcttggtgcggcagagggtgaaggatgcagcagaatttgccatcagcattaaatataacgtcgaggtcaagcacattaaaatcatgacagcagaaggactgtaccggatcacagagaaaaaggctttccgggggcttacggagctggtggagttttaccagcagaactctctaaaggattgcttcaagtctctggacaccaccttgcagttccccttcaaggagcctgaaaagagaaccatcagcaggccagcagtgggaagcacaaagtattttggcacagccaaagcccgctatgacttctgcgcccgagaccgatcagagctgtcgctcaaggagggtgacatcatcaagatccttaacaagaagggacagcaaggctggtggcgaggggagatctatggccgggttggctggttccctgccaactacgtggaggaagattattctgaatactgctga

SEQ ID NO: 155885 - protein, 420 aa, Artificial Sequence
  derived and/or modified sequence
MHLLGFFSVACSLLAAALLPGPREAPAAAAAFESGLDLSDAEPDAGEATAYASKDLEEQLRSVSSVDELMTVLYPEYWKMYKCQLRKGGWQHNREQANLNSRTEETIKFAAAHYNTEILKSIDNEWRKTQCMPREVCIDVGKEFGVATNTFFKPPCVSVYRCGGCCNSEGLQCMNTSTSYLSKTLFEITVPLSQGPKPVTISFANHTSCRCMSKLDVYRQVHSIIRRSLPATLPQCQAANKTCPTNYMWNNHICRCLAQEDFMFSSDAGDDSTDGFHDICGPNKELDEETCQCVCRAGLRPASCGPHKELDRNSCQCVCKNKLFPSQCGANREFDENTCQCVCKRTCPRNQPLNPGKCACECTESPQKCLLKGKKFHHQTCSCYRRPCTNRQKACEPGFSYSEEVCRCVPSYWKRPQMMS

SEQ ID NO: 155886 - protein, 419 aa, Artificial Sequence
  derived and/or modified sequence
MHLLGFFSVACSLLAAALLPGPREAPAAAAAFESGLDLSDAEPDAGEATAYASKDLEEQLRSVSSVDELMTVLYPEYWKMYKCQLRKGGWQHNREQANLNSRTEETIKFAAAHYNTEILKSIDNEWRKTQCMPREVCIDVGKEFGVATNTFFKPPCVSVYRCGGCCNSEGLQCMNTSTSYLSKTLFEITVPLSQGPKPVTISFANHTSCRCMSKLDVYRQVHSIIRRSLPATLPQCQAANKTCPTNYMWNNHICRCLAQEDFMFSSDAGDDSTDGFHDICGPNKELDEETCQCVCRAGLRPASCGPHKELDRNSCQCVCKNKLFPSQCGANREFDENTCQCVCKRTCPRNQPLNPGKCACECTESPQKCLLKGKKFHHQTCSCYRRPCTNRQKACEPGFSYSEEVCRCVPSYWKRPQMS

SEQ ID NO: 155887 - DNA, 1260 bp, Artificial Sequence
  derived and/or modified sequence
atgcacctgctgggcttcttcagcgtggcctgcagcctgctggccgccgccctgctgcccggcccccgcgaggcccccgccgccgccgccgccttcgagagcggcctggacctgagcgacgccgagcccgacgccggcgaggccaccgcctacgccagcaaggacctggaggagcagctgcgcagcgtgagcagcgtggacgagctgatgaccgtgctgtaccccgagtactggaagatgtacaagtgccagctgcgcaagggcggctggcagcacaaccgcgagcaggccaacctgaacagccgcaccgaggagaccatcaagttcgccgccgcccactacaacaccgagatcctgaagagcatcgacaacgagtggcgcaagacccagtgcatgccccgcgaggtgtgcatcgacgtgggcaaggagttcggcgtggccaccaacaccttcttcaagcccccctgcgtgagcgtgtaccgctgcggcggctgctgcaacagcgagggcctgcagtgcatgaacaccagcaccagctacctgagcaagaccctgttcgagatcaccgtgcccctgagccagggccccaagcccgtgaccatcagcttcgccaaccacaccagctgccgctgcatgagcaagctggacgtgtaccgccaggtgcacagcatcatccgccgcagcctgcccgccaccctgccccagtgccaggccgccaacaagacctgccccaccaactacatgtggaacaaccacatctgccgctgcctggcccaggaggacttcatgttcagcagcgacgccggcgacgacagcaccgacggcttccacgacatctgcggccccaacaaggagctggacgaggagacctgccagtgcgtgtgccgcgccggcctgcgccccgccagctgcggcccccacaaggagctggaccgcaacagctgccagtgcgtgtgcaagaacaagctgttccccagccagtgcggcgccaaccgcgagttcgacgagaacacctgccagtgcgtgtgcaagcgcacctgcccccgcaaccagcccctgaaccccggcaagtgcgcctgcgagtgcaccgagagcccccagaagtgcctgctgaagggcaagaagttccaccaccagacctgcagctgctaccgccgcccctgcaccaaccgccagaaggcctgcgagcccggcttcagctacagcgaggaggtgtgccgctgcgtgcccagctactggaagcgcccccagatgatgagc

SEQ ID NO: 155888 - DNA, 1260 bp, Artificial Sequence
  derived and/or modified sequence
atgcacctgcttggatttttctccgtggcctgctcgctcttggcggcagcacttcttccaggaccaagggaagcgccagcagcagccgctgcttttgaatccggactcgatcttagcgacgcagaacctgatgcaggtgaagccactgcatacgcctctaaagacctggaagaacaactgcgctccgtctcgagcgtcgatgaactgatgaccgtgctgtaccctgaatattggaagatgtacaagtgtcaactgcgcaaggggggttggcagcataatagagaacaggccaatctgaactcacgcactgaagaaaccatcaagtttgctgccgcacattacaacactgagatactgaaaagcatcgacaacgaatggagaaagacccaatgcatgcctagggaagtgtgcattgatgtcggcaaagagttcggtgtggcaaccaacacgttctttaagccgccctgtgtgtccgtgtatcggtgtgggggctgttgtaactccgaaggacttcaatgtatgaacaccagcacctcgtacctgagcaagaccctttttgaaatcaccgtgcctctgtcccaagggccgaagccggtcacgatttcatttgccaaccacacttcgtgtagatgtatgtccaagctcgatgtgtacaggcaggtgcattctattatccgtaggtcgcttcctgccactttgccccagtgccaagcggccaacaagacctgtccgaccaattacatgtggaacaaccatatctgtagatgtctggcgcaggaggacttcatgttttcgtcagatgcgggagatgattccactgacggctttcacgatatttgtggcccaaacaaagaattggacgaggaaacctgccaatgcgtctgccgcgcaggacttcgacctgcaagctgcgggcctcataaggagctggatcgaaattcctgtcaatgtgtgtgcaagaacaagctctttccttcgcaatgtggagcaaatcgggagtttgacgaaaacacttgccaatgtgtgtgtaaaagaacttgtccgcgtaatcagccacttaatccgggtaagtgtgcctgtgaatgcactgaaagcccacaaaaatgccttctgaaggggaagaagttccaccatcaaacgtgttcctgttaccgtaggccttgtacgaaccgacagaaggcatgcgaaccaggattctcgtacagcgaagaggtgtgtcgctgtgtgccttcctattggaagcgtccacagatgatgagc

SEQ ID NO: 155889 - DNA, 1260 bp, Artificial Sequence
  derived and/or modified sequence
atgcatctccttggctttttcagtgtggcgtgttctttgcttgcagcagccctgctgcccggccctagagaagcaccagctgcagcagcagcgtttgaatccggcctggacctgtcggatgcggagccagatgcaggagaggcgaccgcctacgcttcaaaggatctggaagagcagctgaggagcgtgagctcggtcgatgaactgatgaccgtgctttaccctgaatactggaaaatgtacaagtgtcagcttaggaagggaggttggcagcataacagagagcaagctaaccttaacagcagaaccgaagaaacgataaagtttgcagcggcgcattacaataccgaaattctgaagtcgatcgataacgagtggcgtaagacccagtgtatgccccgcgaagtgtgcattgatgttgggaaggagtttggggtcgcaactaataccttcttcaagccaccttgcgtgtcagtctaccgctgcggaggatgctgtaactccgaaggacttcagtgtatgaacaccagcaccagctacttgagcaagaccctgtttgaaatcaccgtccctctttcacagggtcctaaaccagtcactattagcttcgcaaaccatactagctgcagatgtatgtccaagctggatgtgtaccgccaagtgcactcgattatcaggaggtcgctgccggcaaccctgcctcagtgtcaggcagcaaataagacctgtcccactaactatatgtggaataatcatatctgtagatgtctggcgcaggaggactttatgttctcaagcgacgctggggatgatagcactgacggttttcatgacatttgtggacccaataaggagcttgacgaggaaacttgtcaatgtgtgtgtcgcgctggtcttagacccgccagctgcggacctcataaggaattggatagaaattcctgccaatgcgtgtgcaagaataaacttttcccatcacaatgtggagcgaatagggagttcgatgagaacacctgtcaatgtgtttgtaaaagaacttgtccacgcaaccagccactgaaccctgggaagtgtgcctgtgagtgtaccgaatcgccacaaaagtgtctcctgaaaggaaagaagttccatcaccagacttgttcctgttacaggcggccatgtactaacagacaaaaagcatgtgaaccaggtttttcctactctgaagaagtgtgtcggtgcgtgccatcatattggaaaagaccccagatgatgtcc

SEQ ID NO: 155890 - DNA, 1260 bp, Artificial Sequence
  derived and/or modified sequence
atgcatctgctcggattcttttctgtggcttgctcacttctcgcagctgcactgctgcccggaccaagagaagccccagccgccgccgcggccttcgaaagtgggctcgatctctccgatgcagagcccgatgctggagaagccacagcctatgcctccaaagatctcgaagaacagctccggagtgtgtcttctgtggatgaacttatgacagttctatatccagaatattggaaaatgtataaatgccagcttagaaagggggggtggcagcataaccgggaacaggcaaatttaaactctcgaacagaagaaacaataaaatttgctgcagcccactataatactgaaattcttaagagtattgataatgaatggagaaaaactcaatgtatgccacgggaagtttgcatagatgttgggaaagaatttggggtggccactaacacatttttcaaacccccttgtgtatcagtgtatagatgcggaggatgctgcaattccgaagggctgcaatgtatgaatacatcaacttcttacctatcaaagacactgtttgaaataactgttcctctgagtcaggggccaaaacccgtgacaatctcttttgccaatcacactagttgtagatgtatgtccaaattagatgtttatcggcaggttcactcgataattcgacgctccttacccgccactctccctcagtgtcaagccgccaataagacatgtcccacaaactatatgtggaataaccatatatgtcggtgcctagcccaggaggatttcatgttcagtagtgatgctggagatgatagtacagacgggtttcacgatatctgcggaccaaataaggaacttgatgaagaaacttgtcagtgtgtctgcagggctgggctccggcccgcgtcatgtgggccccataaagaactcgacagaaattcatgccagtgtgtttgtaagaataaactgtttccttcccagtgcggagctaaccgcgaattcgatgagaacacttgccaatgtgtctgtaagcgcacttgtcctcgcaatcagcccttaaatcctggaaaatgtgcttgtgaatgtacagagtcaccccagaagtgtcttctcaaaggaaaaaaattccaccatcaaacttgctcttgttaccggaggccttgtacaaatagacagaaggcctgcgaacctggattctcttattcagaagaagtctgtaggtgcgtgccttcttattggaaaagacctcagatgatgagt

SEQ ID NO: 155891 - DNA, 1260 bp, Artificial Sequence
  derived and/or modified sequence
atgcatctgctgggattcttctctgtcgcctgttcgctgctagcagctgccctgttacccggtcccagagaggctcctgctgccgctgccgcatttgagtcggggttggacttgtctgacgccgaaccagatgcaggcgaggccaccgcatacgctagcaaggatctcgaagaacagctgaggagtgtatctagcgtcgatgagttaatgaccgtactgtacccggagtattggaaaatgtataaatgccaactgcgaaagggagggtggcagcacaatcgggagcaggcaaatctgaatagccgcacagaggagactataaaatttgccgccgcacattataacacagaaatcctaaaaagcatcgacaatgaatggaggaagacccaatgcatgcctcgagaggtttgcattgacgtaggcaaagagttcggggtcgctaccaatacctttttcaagcctccgtgcgtctctgtgtaccgctgtggtggatgctgtaattctgaggggcttcagtgcatgaacacaagcacgagctacctgtctaagaccctatttgaaattaccgtcccattaagccagggacccaagcccgtcactatctccttcgcaaaccacacatcctgccgttgcatgtctaagttggatgtctacaggcaagtgcacagcatcatcagacgttccctgcctgctacgttaccacagtgtcaggctgctaacaaaacctgtccaaccaactacatgtggaacaaccatatctgcagatgcctggctcaagaagattttatgtttagttctgacgctggggatgactccactgatggatttcacgatatttgcggcccgaacaaagaactggatgaggagacttgccagtgcgtatgtcgggcgggtctgaggcccgcctcttgcgggcctcataaggagctagacagaaacagttgtcaatgtgtatgcaaaaacaaactgtttcctagccagtgcggcgctaacagagagttcgacgagaacacttgccaatgcgtttgtaagaggacctgtccccgtaatcagcctctaaaccccgggaaatgcgcatgcgagtgcaccgagtctccacagaaatgcctgctgaagggaaaaaagttccaccaccaaacatgctcctgttataggcgcccttgcaccaataggcagaaggcatgtgaacccgggtttagttacagcgaggaggtgtgtcggtgcgtgcccagttattggaagagaccgcaaatgatgtct

SEQ ID NO: 155892 - DNA, 1260 bp, Artificial Sequence
  derived and/or modified sequence
atgcatctcctgggcttctttagcgtggcatgctcactccttgcagcagcccttctgccaggacccagagaagctcccgcggccgcagccgcatttgaatcgggattggatctctctgatgcagagccagatgcgggcgaagcaactgcctacgcgtccaaggacttggaagagcaacttaggagcgtctcttcagtcgatgaactgatgactgtgttgtatcctgaatactggaagatgtataagtgccaactccgtaagggcgggtggcagcacaaccgggaacaggcgaatctcaattcccgcaccgaagaaactattaagtttgcagcagcacactataacaccgagatacttaagtcgattgacaacgaatggcgaaagactcaatgtatgccaagagaggtgtgcattgacgtgggaaaggaatttggagtggcaaccaacactttctttaagccgccctgtgtgtccgtgtaccgctgtggtggatgttgtaattccgagggactgcagtgtatgaacaccagcacctcctacctgagcaagaccctttttgagattactgtgccactttcgcagggtccaaagcccgtgaccatctcgttcgcaaatcacacctcgtgtaggtgtatgagcaagttggatgtgtaccgccaggtgcactcgatcattaggcggtccctgcctgcgactctgcctcagtgccaggcagcaaacaagacttgtccgaccaattacatgtggaacaaccatatctgtcgctgtcttgctcaagaagatttcatgttttcatccgacgcaggagatgattccaccgatggttttcacgacatttgcggccctaacaaagaacttgacgaagaaacttgccaatgcgtgtgtagagcaggcctccgcccagcctcgtgcggtccacataaagaactggatcgtaactcctgtcaatgtgtgtgcaaaaacaagttgtttccttcgcaatgtggtgctaaccgcgagttcgatgaaaacacgtgtcagtgtgtgtgtaagcggacctgtccccgcaatcaacctctgaatccaggtaaatgtgcatgtgaatgcaccgaaagccctcaaaagtgtctcctgaagggaaagaaattccaccatcaaacttgttcgtgttaccgtcgaccctgcactaaccggcaaaaggcgtgtgaacctggctttagctactccgaggaggtgtgccgctgtgtgccgagctactggaagcgaccacaaatgatgtct

SEQ ID NO: 155893 - DNA, 1260 bp, Artificial Sequence
  derived and/or modified sequence
atgcacctgctcggcttttttagcgtggcttgttcacttctggccgctgcattgttgcctggcccaagagaagctcccgccgcagcagccgcatttgagtccggcctggacctgagtgacgccgaacctgatgctggagaggctaccgcctacgcaagtaaagatctcgaggagcagctcagatcagtctcctccgtcgacgaactgatgacagtgctctaccccgagtattggaagatgtacaagtgccagctgaggaaaggcggatggcagcacaatcgcgagcaggccaatctgaactcaaggacagaagagactatcaagttcgccgccgctcactacaataccgagatcttgaagtcaatcgataacgagtggcgcaagactcagtgcatgcctcgtgaggtatgcatcgacgttggtaaagagtttggtgtcgccaccaacacattcttcaagcccccctgtgtaagcgtgtatcgttgtggcggttgctgtaattccgaaggactgcaatgcatgaacactagtacttcatacctttctaaaactctgttcgaaatcaccgttcccctctcccagggcccaaaacccgtgaccatttcctttgctaatcataccagctgcaggtgtatgtctaagttggacgtctaccgtcaggtgcactcaatcataaggaggtcacttccagctactctgcctcaatgccaggctgccaataagacttgccctaccaactacatgtggaacaatcatatttgcagatgccttgcacaggaggactttatgttctcttccgatgccggtgatgactccaccgatggtttccatgatatctgtggccccaacaaagaattggacgaagagacttgtcagtgcgtctgtcgcgccggcctgcgccccgcttcatgcggcccacataaggagctggaccgtaactcatgccagtgtgtatgcaagaacaaactttttccttcacagtgcggagctaatagagagttcgatgagaatacctgccaatgtgtatgcaagcgcacctgcccaaggaatcagccactcaaccccggaaagtgtgcttgcgaatgcaccgagagtcctcaaaagtgtttgttgaaaggcaagaagttccaccatcaaacttgctcctgctaccgtcgtccctgtaccaatagacagaaggcatgcgaacctggcttttcctattccgaggaggtctgtcgctgcgtaccctcatactggaaacgccctcagatgatgtct

SEQ ID NO: 155894 - DNA, 1260 bp, Artificial Sequence
  derived and/or modified sequence
atgcatctgcttggattcttttcggtcgcctgttccctcctcgccgcagcactcctccctggtcctagagaagcacctgccgcagcagccgcgtttgaatcgggtcttgatttgtccgatgcggaaccagacgcaggtgaggctacggcgtatgcctcaaaggatttggaagaacaacttaggtcggtgtcatccgtggacgagcttatgactgtgctttaccccgagtactggaagatgtacaagtgccaactgcgaaagggaggctggcaacataacagggaacaggcaaacctgaattcgagaaccgaggagactattaagtttgcagcagctcattacaataccgagattctgaagtctatcgacaacgagtggagaaaaactcagtgtatgccacgcgaggtgtgcattgatgtcggtaaagaatttggcgtggccactaacacctttttcaagcccccatgcgtgagcgtgtacagatgtggtggttgttgcaactcggaaggccttcaatgtatgaacaccagcactagctacctctcaaagactttgttcgaaatcaccgtccccctctcgcaaggacccaagcctgtgactatctcattcgctaatcatacctcgtgtagatgtatgtcgaaactggatgtgtatcgacaagtgcactccatcataaggcgaagcctgcctgccactctcccacagtgccaagctgcaaacaagacgtgtcctaccaactacatgtggaacaatcatatatgtcgctgtctcgcccaagaagatttcatgttttcctcagatgcaggagatgacagcaccgacgggtttcacgacatctgtggacctaacaaagaacttgatgaagaaacctgccaatgcgtctgtagggcaggtttgcggcccgcgagctgcggacctcacaaggagctcgatcgcaatagctgtcagtgtgtgtgtaagaataagctgtttccttcacaatgcggtgcaaatcgtgaattcgatgaaaatacttgtcaatgtgtctgtaaacggacctgtcctaggaatcagcccctgaatcccggcaagtgtgcgtgcgagtgcacggagtcgccgcagaaatgtttgcttaagggtaaaaagtttcaccatcagacctgttcatgctaccgtcggccatgcaccaaccgacagaaggcatgtgaaccgggattttcgtactcagaagaagtgtgtaggtgtgtgccttcgtactggaagcgcccacagatgatgtca

SEQ ID NO: 155895 - DNA, 1260 bp, Artificial Sequence
  derived and/or modified sequence
atgcacctcctggggttcttttccgtggcttgctccttactcgccgcggccctgttgccggggcctagagaagcgcccgccgctgcggcagcattcgaatccgggctggatcttagcgatgcggagccagacgccggcgaggctactgcatatgcctcaaaggacctggaagagcagctccggagtgtgtctagcgtggatgagctgatgacagtactgtatccagaatactggaagatgtacaaatgccagttgcgaaaaggcggttggcaacacaacagagaacaggccaatctcaacagtagaaccgaagagactattaagtttgctgcagcccactataatacggaaatcctgaagtcgatagacaacgagtggagaaagacccagtgcatgccacgcgaagtttgtatcgacgtcgggaaagagtttggggtggcgaccaacacctttttcaagcctccctgtgtatcagtttaccgatgcgggggatgttgtaactcagagggtctgcagtgtatgaatactagtacatcttatttgagcaagacactgtttgagataacagtgcctctgtcccagggccccaagcccgtgactataagcttcgccaaccatacatcttgtcgctgcatgagcaagctggacgtgtaccgacaggtgcactcaatcatccgtcggagtctacctgccacgctgcctcagtgccaggctgccaacaaaacttgtccaacgaactacatgtggaacaaccatatctgcagatgtttggcccaggaggatttcatgttttcgtctgacgccggggatgattcgacagatggattccatgatatatgtggccctaataaggagctggatgaagagacctgtcagtgcgtgtgtagggctgggctcaggcctgcctcttgtgggcctcataaggagcttgaccgcaatagctgtcaatgtgtgtgtaagaataaattgtttccatcccagtgcggggccaaccgcgagttcgacgagaacacttgtcaatgtgtttgcaagaggacctgtccaaggaaccagccactaaacccaggaaaatgtgcgtgcgagtgcaccgaaagccctcagaaatgcctcctgaaaggcaagaagtttcaccatcagacgtgtagctgttaccggagaccgtgcacgaatcggcagaaagcctgcgaacccggcttctcctactcagaggaggtatgcagatgtgtgccttcttattggaagcgacctcagatgatgtca

SEQ ID NO: 155896 - DNA, 1260 bp, Artificial Sequence
  derived and/or modified sequence
atgcatctcctcggctttttctcagtcgcatgttcgctgctcgctgccgccctcctgcccggcccgcgtgaagcccccgcagccgctgctgcattcgagtcggggttggatctgagcgatgcagaaccagacgcgggagaggctactgcctacgccagcaaagacctggaggaacaactccggtcggtgtcatcggtggacgagttgatgaccgtgctttacccggaatattggaagatgtacaaatgccagctgcgcaagggagggtggcaacataaccgggagcaagcgaacctcaattcgcgcactgaagagactatcaagttcgccgctgcgcattacaacacggaaatccttaaatcgatcgacaatgaatggagaaagacccaatgtatgcctagggaagtgtgcatcgacgttggcaaggagttcggcgtggctaccaacacgttctttaagccgccgtgcgtgtcggtgtatcggtgcggcgggtgttgtaacagcgaaggcctgcagtgcatgaatacgtccacttcgtatctctccaagacgctttttgaaatcaccgtgcccctgtcccagggtcctaaacctgtcacgattagctttgcaaaccacacttcatgccggtgcatgtccaagctggacgtgtacagacaggtccactccattatcaggaggagtctgccagcgactctgccgcagtgtcaagctgcgaacaaaacttgcccgactaactacatgtggaataaccatatctgccgctgcctggcgcaggaggatttcatgttcagctcggacgccggagacgattcaactgacgggttccacgatatctgcggaccgaacaaagagctcgatgaggaaacctgccaatgtgtgtgccgggccggcctccggcctgccagttgcggaccccacaaagaactggaccgcaattcgtgccaatgcgtgtgtaagaacaaactttttccgagccagtgtggtgcaaatcgcgagttcgacgaaaacacgtgccagtgtgtctgtaagcgcacgtgcccaagaaaccagccgctgaatccaggcaagtgcgcatgcgagtgcactgaatccccgcagaagtgcctccttaagggcaagaagtttcaccaccagacttgttcctgttaccggaggccgtgcactaacagacagaaggcttgcgagccgggtttcagctacagcgaggaagtgtgccggtgcgtgccaagctactggaagcggccacaaatgatgtcc

SEQ ID NO: 155897 - DNA, 1260 bp, Artificial Sequence
  derived and/or modified sequence
atgcacctgctaggcttctttagcgtggcctgtagcctcctcgcagctgcgcttttgccaggaccaagagaggctcctgccgccgcggccgccttcgagagcggattggacctgtccgatgctgaaccagatgccggcgaagccacggcttacgcctcaaaagatttggaagagcagctgcgatctgtcagttccgttgatgaactgatgaccgtcctgtaccccgagtactggaaaatgtacaagtgccagctaagaaaaggcgggtggcagcacaatcgagagcaggccaacctcaactcacggaccgaggagactatcaaatttgcagccgcccattataatacagagatactcaaaagtattgacaatgaatggaggaagacccagtgtatgccaagagaggtgtgtatcgacgtgggaaaggaattcggtgtggcaaccaataccttttttaaacccccttgcgtctctgtgtatagatgtgggggatgttgtaacagtgagggtctacagtgtatgaataccagcaccagctacctttcaaagacgctgttcgaaatcaccgtaccgctgagtcagggccctaagcccgtaacgatcagtttcgcgaaccatacctcttgtcgatgtatgtctaagctggacgtttatcggcaagtacattctattatccgacggtcattgccagccacgctgcctcagtgccaggccgcaaataagacctgccctaccaactacatgtggaacaatcatatctgtagatgtctagcacaggaggactttatgttttctagtgatgcaggcgatgattcaactgacggttttcatgatatctgtggccccaacaaagaactcgacgaggagacatgccagtgtgtttgtcgtgccgggctgagacctgcttcttgcgggccgcataaagaattggatcgaaactcttgtcagtgtgtttgcaagaataaactattcccatctcagtgcggagcaaatagagagtttgatgagaatacctgccagtgtgtctgcaagcgaacctgcccccgaaaccaaccattgaaccctgggaagtgtgcctgcgagtgtactgagagtccacagaaatgtttattgaagggaaagaaatttcaccatcaaacgtgttcttgttacaggaggccttgcactaaccgacaaaaggcttgcgagcccggcttctcttattcggaggaggtctgtagatgcgttccaagctattggaagcgaccccagatgatgtca

SEQ ID NO: 155898 - DNA, 1260 bp, Artificial Sequence
  derived and/or modified sequence
atgcatttactcggctttttttctgttgcctgttcacttttggcagccgctttgttgccgggcccacgtgaagcccccgccgctgccgccgcatttgaatctggcctggacctttccgatgcagaaccagatgccggggaggcaacagcctacgcgtcaaaggaccttgaggagcagcttcgaagtgtgagctctgtggacgagctcatgacggtgttgtacccagagtactggaagatgtacaagtgccagctgaggaagggcggctggcagcacaatcgcgagcaggccaacctgaattctcgaacagaggagacaatcaagttcgccgcagctcactataacactgagattctgaaatcaatagataatgagtggcggaagacacagtgtatgccccgggaagtctgtattgatgttgggaaggaatttggggttgcaaccaacaccttcttcaagcccccttgtgtatcagtgtatcgctgcggggggtgctgtaattctgagggcctgcaatgcatgaacacaagcaccagttatctaagtaagacactgtttgagattacagttccgctgtcccaaggtcctaagccagtcacgatctctttcgcaaatcacaccagctgtcgttgcatgtctaagcttgatgtttatcggcaggtgcattctatcattagacggtcacttccggcgacactcccacagtgccaggcagccaataaaacttgccctacaaactacatgtggaacaaccacatttgtcgctgtctcgctcaggaagatttcatgtttagcagcgatgccggggatgattccacagatggctttcacgacatctgcgggcccaataaggagttagacgaagagacttgccagtgtgtatgcagggccggtcttcggccagcatcctgcggcccccacaaggaactagaccggaattcatgtcagtgcgtgtgtaagaacaaactgttcccttctcagtgcggggcaaacagggaattcgacgaaaacacatgccagtgtgtctgtaagcggacctgcccccggaaccagcctctaaatccgggaaagtgcgcctgtgagtgtaccgaatctcctcagaagtgtctactaaaaggaaaaaagtttcatcaccagacttgcagttgctataggagaccctgcacaaacagacagaaggcctgtgaacctgggttctcttactccgaggaagtgtgtcgttgcgtccccagttactggaaacgaccacaaatgatgtcc

SEQ ID NO: 155899 - DNA, 1260 bp, Artificial Sequence
  derived and/or modified sequence
atgcatctcttgggtttcttcagcgtcgcctgtagtctcctggcggccgcgttactcccaggtccccgggaggcgccagctgctgccgccgcattcgaatcagggctagacttaagcgacgccgagcccgatgcaggtgaagcgaccgcctatgctagcaaggacctggaagaacaactacggagcgtctcaagcgtcgacgagctcatgaccgtgctgtacccagagtattggaagatgtataaatgtcagctccggaaaggagggtggcagcacaaccgggagcaggctaatctgaatagcaggacagaagagactattaagtttgctgctgcccattacaacacggagattttaaagagtatcgacaacgaatggaggaagacccagtgtatgccgcgcgaagtgtgcatagacgtgggtaaagaatttggggtggcaacgaatacgttctttaagccaccctgcgtgtcagtgtatagatgtggaggctgctgcaatagtgaagggctgcagtgtatgaacacctcaacgagctatctctctaaaacactgttcgagataaccgtgcccctgagccagggcccaaagccagtaaccattagcttcgctaatcatacatcctgcagatgtatgtccaaactggacgtgtatcgtcaggttcactctatcattcgccgaagcctcccggccactttacctcaatgccaggccgctaataagacctgcccaacaaactatatgtggaataaccatatttgccgctgccttgcccaggaggacttcatgttttccagcgacgccggagatgacagcacagacggttttcacgacatctgtggaccaaacaaagagctggatgaagaaacctgtcagtgcgtatgtcgggctggcttgagaccggccagttgcgggccccataaggaactggataggaactcgtgccagtgtgtgtgtaagaacaagctgtttcctagccagtgcggggctaatagagaatttgacgagaacacttgccaatgcgtgtgcaaacggacatgtcctcgcaatcagcctctgaatccaggaaaatgcgcgtgtgagtgcactgaatcaccacagaaatgcctgcttaagggtaagaaattccaccatcagacatgctcctgctatagacgtccatgtacaaatcgacagaaagcatgtgagccaggattctcctactctgaggaggtgtgcagatgcgtccccagttactggaagagaccacagatgatgtca

SEQ ID NO: 155900 - DNA, 1260 bp, Artificial Sequence
  derived and/or modified sequence
atgcacttgcttggattcttttctgtggcgtgttccttgctggcagcagccctgctgcccggaccccgagaggccccagcggccgccgccgcatttgaatccgggctggacctctctgatgcagagcctgacgctggggaggccactgcatatgcctccaaagacctggaggaacagcttcgatctgtgagttcagtcgacgaactgatgacagttctgtacccagagtactggaagatgtacaagtgccagctcagaaaggggggctggcaacataaccgagagcaggctaacttgaacagtaggactgaggagacaatcaagttcgctgccgcccattacaatactgaaatactgaaatcaatcgacaatgaatggcgcaaaacccagtgcatgccccgtgaggtgtgtatcgacgtaggtaaggagttcggagtagctacgaatacattttttaagcccccttgtgtaagcgtgtaccggtgcgggggttgctgtaactccgagggcctgcagtgtatgaacacctccacttcctatctgtcaaaaaccctcttcgagatcactgtgccgctctcccagggcccgaagccggtgaccatcagttttgctaaccacacgtcctgccgctgcatgtcaaagctggatgtgtatcggcaggtccactctattatacgtcgatccttaccagcgacactgcctcaatgtcaggcggccaacaaaacatgccccacgaactacatgtggaataatcatatctgtaggtgtctagctcaggaggactttatgttctccagcgatgctggggatgattccaccgacgggttccacgatatctgtgggccaaacaaggaactggacgaggagacgtgccaatgtgtctgtcgtgctggactccgcccagccagttgcggaccacacaaagaactggatcgaaattcatgccagtgtgtgtgcaagaacaagctatttccctcccagtgcggcgccaacagagagttcgatgaaaatacttgtcaatgtgtgtgtaaaaggacatgcccccgcaaccagccactgaaccctgggaagtgcgcttgcgaatgcaccgaatccccccagaagtgtttgctgaaagggaagaaatttcaccaccagacatgttcatgctaccggaggccatgcactaatcgccaaaaggcttgtgagccaggctttagttattccgaggaagtatgtaggtgtgtacctagctactggaaaaggcctcagatgatgagt

SEQ ID NO: 155901 - DNA, 1260 bp, Artificial Sequence
  derived and/or modified sequence
atgcacctgctaggttttttcagcgtcgcctgcagccttctcgccgctgccctcctgcccgggcctcgagaggccccagccgctgccgccgcgttcgagagcggactggacttatcagacgccgaaccagacgctggcgaagccacagcatacgccagcaaggacctggaggaacagctgagaagtgtgtcatccgtcgacgaattgatgaccgttctgtatcccgagtactggaaaatgtacaagtgccagcttcggaagggcgggtggcagcacaaccgggaacaggctaatctgaatagccgaaccgaagagacaattaaattcgctgcggcccactacaataccgagattctcaaatcaattgataatgagtggaggaaaactcagtgtatgccacgagaggtgtgtatcgacgtgggaaaggagttcggcgtggctactaatacattttttaagcctccgtgtgtatcagtgtaccgctgcgggggatgctgcaattccgaaggcctgcaatgcatgaatacttcaaccagttatctttcaaagacgctgttcgaaatcacagtgcctcttagtcagggaccgaagccagtcactatcagtttcgctaatcacacgagctgtcgctgcatgtccaaactggatgtttataggcaagtgcattctatcataaggagaagtctgccagcgacactcccgcagtgccaggccgcaaacaaaacttgccctaccaattacatgtggaacaaccatatctgtcgctgcctcgcccaggaagatttcatgttcagttcagatgccggtgacgactccaccgacggcttccatgacatttgtggccccaataaggagctcgatgaggagacatgccagtgtgtgtgtcgggcaggcctcagacccgcgagctgcgggccccacaaagaactcgaccgtaatagctgccagtgtgtgtgcaagaataaattgttcccatcccaatgcggcgccaatagagagtttgacgagaatacatgccaatgcgtctgcaagaggacttgcccccggaatcagcctctgaatccaggcaagtgcgcctgtgagtgtaccgagtctccacaaaagtgtctactgaaaggcaagaagttccatcatcagacctgctcctgctatcggagaccctgtacaaacaggcagaaagcatgtgaacccggcttctcttatagcgaagaagtgtgtagatgtgtgccctcttattggaaacggccgcagatgatgagt

SEQ ID NO: 155902 - DNA, 1260 bp, Artificial Sequence
  derived and/or modified sequence
atgcacctgctgggcttcttttcggttgcttgctccctgcttgccgccgccttgctccccgggccacgggaagcccctgcggcggccgctgccttcgaatcgggactcgatctctcggacgctgaaccagacgcaggagaagcgactgcctacgcttcgaaagatctcgaagagcagctccgctccgtctcctccgtcgatgaactgatgactgtcctttacccggaatactggaaaatgtataagtgtcaactgagaaagggcgggtggcagcataaccgcgagcaagccaatcttaattcgagaaccgaagagactatcaagttcgcagccgcccattacaataccgaaatcctgaagtctattgacaacgaatggcgcaaaacccaatgcatgcctcgcgaggtgtgcatcgacgtcggaaaggaatttggggtggccaccaacaccttctttaagcccccatgtgtgtcagtctaccgttgcggaggatgctgcaattcggagggactgcagtgcatgaatacctctacctcttacctgtccaagaccctgtttgagatcaccgtgcccctgagtcagggaccgaagccggtcacgatctcgttcgcaaaccatacttcgtgccgctgcatgtcgaaactcgatgtgtatcgccaggtccattcaatcatccgccgctcgctgccggcgaccctgccacaatgccaagcagcgaacaaaacttgccctaccaattacatgtggaacaaccatatctgcagatgcctggcacaagaagatttcatgttctccagcgatgcgggtgatgactccacggatggattccacgacatctgcggccctaacaaagagttggacgaggaaacctgtcaatgcgtgtgtcgggctggcttgcgaccagcgtcatgcggaccgcacaaggaactggatcgcaactcgtgccaatgtgtgtgtaagaacaagctgtttccgtcccaatgcggagccaatagagaattcgatgagaacacttgccagtgcgtgtgtaagaggacctgtccgcggaaccaacctctgaatccaggaaagtgcgcctgcgagtgcactgagtcaccgcagaagtgccttttgaaaggaaaaaagttccaccatcagacctgctcctgctaccgccgcccatgtactaacaggcaaaaggcttgtgagcctggattcagctacagcgaggaggtgtgcagatgcgtcccttcctactggaaacgccctcaaatgatgtcg

SEQ ID NO: 155903 - DNA, 1260 bp, Artificial Sequence
  derived and/or modified sequence
atgcacttattaggatttttttcagtcgcctgttcactcttggccgctgcactgctgcccggaccgagagaagccccagccgctgctgctgcctttgagtccggactagacctgtctgatgcagagcctgatgccggggaagcgactgcttacgctagcaaagatcttgaggagcagctccggtccgtaagttctgtcgacgaattaatgacggtgctgtacccagagtattggaaaatgtacaaatgccagctgcgaaagggtggttggcagcacaaccgggaacaagctaaccttaatagccgtaccgaggaaacgatcaagtttgcagctgcccactacaatacagagattctcaagtccatagacaatgaatggagaaaaacccagtgcatgccacgtgaggtgtgcattgacgttggcaaggagtttggagtcgctaccaacacctttttcaaacccccctgcgttagcgtctacaggtgcggcggatgttgcaacagcgagggcttacaatgcatgaacacgtccacttcctacctgtctaagactttattcgagatcacagtgcctttgtcgcaaggaccgaagccagtaacaatcagtttcgccaaccatactagctgcaggtgtatgagcaagctggacgtctataggcaggtgcactctatcatccgtaggtcactacccgcgacattgcctcagtgccaggcggcgaacaaaacgtgtccaaccaattacatgtggaataaccacatttgccggtgcctggctcaggaagactttatgttctcgagcgatgccggcgacgattctacagatggatttcacgacatctgtggcccaaacaaagaattggacgaagaaacctgccagtgtgtttgtcgagccggtctacgcccagcctcgtgcgggccccacaaggagttggatagaaactcatgccagtgtgtctgcaagaataagctattcccctcccagtgcggggcgaacagggagtttgacgagaacacctgtcagtgtgtctgcaaaaggacttgcccccggaaccagccactgaaccccggcaaatgtgcctgtgaatgtacggagtctccacaaaaatgtctgcttaaaggtaagaaatttcatcaccagacctgttcctgttatcgtcgaccttgcaccaataggcagaaggcttgtgaaccgggtttttcttattctgaggaagtttgcagatgcgtgcccagttattggaaacgtcctcagatgatgagt

SEQ ID NO: 155904 - DNA, 1260 bp, Artificial Sequence
  derived and/or modified sequence
atgcatctgctcggctttttctcggttgcatgttcgctgttggcggctgcactcctgcctgggcctagggaagccccagcagcggcagcagctttcgaatccggattggatctgtctgacgccgaaccagacgcaggagaagctaccgcctacgcatccaaagatcttgaagaacaacttcgttcagtgtccagcgtcgatgaacttatgaccgtgctttaccctgaatactggaagatgtacaagtgccagcttcggaaaggcggctggcaacataaccgcgaacaggccaatctcaattcgcggaccgaagaaaccattaagtttgccgctgctcactacaatacggagatcctcaagtccatagacaatgaatggagaaagactcaatgcatgcctcgcgaagtgtgcattgatgtcggaaaggaatttggtgtggccactaatacctttttcaagcccccttgtgtctcggtctaccggtgtggaggatgttgtaactcggagggtctgcaatgcatgaatacctcgacttcctacctttccaagacgctgtttgaaattactgtgccactttcacaagggcccaagcctgtgaccatttcgtttgcgaaccacacttcgtgcaggtgtatgtccaaacttgatgtgtacagacaggtgcactcaatcatcagacggagccttcctgccaccctgccccaatgtcaggcggcgaacaagacttgcccaactaattacatgtggaacaaccacatttgtcgttgtctcgcacaggaagatttcatgttttccagcgacgcaggcgacgatagcactgatggattccacgacatatgtggacctaacaaggaactcgacgaagaaacttgccaatgtgtgtgtcgcgccggcctccgacctgcatcctgtggaccacataaagaattggatagaaatagctgtcaatgtgtatgtaagaacaagttgttcccgtcgcaatgtggtgccaatcgtgagttcgatgaaaatacttgccagtgtgtgtgtaagcgcacctgcccacgaaaccaaccgctgaacccaggcaagtgcgcctgtgagtgtaccgaatcacctcagaaatgccttcttaaaggaaaaaagtttcatcatcaaacctgttcctgttacagacggccatgtactaatcgccaaaaagcatgtgaacccggattcagttacagcgaagaagtctgtcgttgtgtgccttcctactggaaaagaccacaaatgatgtcc

SEQ ID NO: 155905 - DNA, 1260 bp, Artificial Sequence
  derived and/or modified sequence
atgcaccttctgggatttttctctgtcgcctgctccctgctggcggctgcgctattgcctggacctagggaggcccccgcagctgccgcagctttcgagtccgggttagacctctccgacgctgagcctgatgccggggaggctaccgcatacgccagcaaggacctcgaggagcaactgcgttctgtgtcaagtgttgacgaacttatgaccgtgttataccccgaatattggaaaatgtacaagtgccagctacgcaaggggggatggcagcacaatagggagcaggccaacctcaactctcgcaccgaagaaacaatcaagttcgccgcggcgcattacaacactgagatacttaagtctatcgacaatgaatggcgaaagactcaatgcatgcctcgcgaggtgtgtatcgacgtcggtaaagaatttggagtagccaccaataccttcttcaaaccgccgtgcgtgagtgtataccgctgcggcgggtgctgcaactctgaagggctgcagtgcatgaatacatctacctcatacctctccaagaccttattcgagatcaccgtgccgctgtcccaaggacccaaacccgtcacaattagtttcgccaaccatacaagctgccgctgtatgtctaagctggatgtatacaggcaggtgcacagtatcattcgaaggtcattacccgcgacgctaccacagtgccaggctgctaataaaacatgtccaactaactacatgtggaacaaccatatatgccggtgcttggctcaggaagacttcatgttcagcagcgatgctggggatgactccacagacggttttcacgatatttgcggacctaataaagaattggatgaagaaacctgtcagtgtgtatgtcgcgccggcctgaggcccgcgtcttgcggtcctcacaaagagcttgacagaaatagctgtcagtgcgtgtgcaagaacaagttgttccctagccagtgtggtgctaaccgggagttcgatgaaaatacctgccagtgtgtctgtaagaggacctgcccgaggaatcaaccacttaacccggggaagtgcgcatgtgagtgcacagagtccccccagaaatgtcttctcaaaggcaaaaagtttcaccaccagacttgtagttgctatcgccgaccctgcacaaacagacaaaaagcctgcgaaccagggtttagttactccgaagaagtgtgtaggtgtgtgccttcctattggaaaagacctcaaatgatgtcc

SEQ ID NO: 155906 - DNA, 1260 bp, Artificial Sequence
  derived and/or modified sequence
atgcatttgctggggttcttctctgtggcctgcagcctgctggcggccgcgctcctcccgggaccgcgcgaggccccggcagccgccgctgcttttgaatcgggtcttgacctctccgatgccgagccggatgcaggcgaggccactgcgtacgctagcaaagacttggaagagcagctgcgctccgtgagctcagtcgacgaactgatgaccgtgctgtaccctgagtactggaaaatgtacaaatgccagctccgtaaggggggatggcaacacaacagagaacaggccaacctcaactcgcgcaccgaggaaactattaaattcgccgcagcccactacaacaccgagatcctgaagagcatcgataacgaatggagaaagacgcagtgcatgccgcgcgaagtctgcattgacgtgggaaaggagttcggagtagcgactaataccttcttcaagccgccttgcgtgtcggtgtaccggtgcggaggatgttgcaactccgaaggactccaatgcatgaatacctccacgagctacctctcaaagaccctgtttgagatcaccgtgccactgtcgcaggggccgaagccggtgaccatctcctttgctaaccatacttcgtgccgctgcatgtccaaactcgatgtctacagacaggtgcacagcatcatccgccggagcctgccagcaactctgccccagtgccaggccgcaaataagacctgcccaactaactatatgtggaataatcacatctgtcggtgtctggctcaagaggatttcatgttctcgtcagatgcgggtgacgactctactgacggctttcacgacatctgcggcccgaacaaagaacttgatgaagagacttgccaatgtgtgtgccgggcgggtctgaggcctgcatcgtgtggaccacataaggaattggacagaaactcgtgtcaatgtgtctgtaagaacaagctgttccctagtcagtgtggagcgaatagggaattcgacgagaatacctgccaatgcgtctgcaagcgaacctgccccaggaatcagccgcttaacccaggcaagtgcgcctgcgaatgcactgaatcgccacagaaatgcctgctgaagggcaaaaagttccaccatcaaacgtgctcatgttaccggcgcccatgtactaacagacagaaggcttgcgaacctggattttcctactcagaggaagtttgccggtgcgtgccgtcatactggaagcgcccccagatgatgtcc

SEQ ID NO: 155907 - DNA, 1260 bp, Artificial Sequence
  derived and/or modified sequence
atgcaccttctcggatttttctcagtggcctgctcgttgttggccgctgcactgctcccgggcccgagagaggccccagccgccgccgccgcgtttgaatccggactggacctgagcgacgccgaaccggatgccggagaggccactgcgtacgcgtcgaaggacttggaagaacagctgcggtccgtgtcctccgtggacgagctgatgactgtcctgtatccggaatactggaagatgtacaagtgccagctgcggaaagggggctggcagcataaccgcgaacaggccaatctgaattcccggactgaggaaaccataaagttcgcagccgcccattacaacacggaaattctgaagagcatcgataatgagtggagaaagacccaatgcatgccgcgggaggtgtgtatcgacgtgggcaaagagtttggagtggctaccaacactttcttcaaaccgccgtgcgtgtcggtgtaccggtgcggcggatgctgtaacagcgaaggactccaatgcatgaacactagcaccagctacctctcaaagaccttgtttgaaatcaccgtgcctctgagccaaggcccaaagccggtcaccatctcgttcgccaatcatacctcatgccgctgtatgtcgaagctggacgtgtaccgccaagtgcactccatcatccgccggagcctgccggccaccctcccgcagtgccaagcagccaataagacttgccctaccaactacatgtggaacaatcatatctgccggtgcctcgcccaagaagatttcatgttcagctccgatgcgggcgacgactcgactgatggattccacgacatttgtgggccaaacaaggaactcgatgaagaaacctgccaatgcgtgtgtagggcgggactgaggcctgcctcgtgcggaccacacaaggagctggatcggaattcttgccagtgcgtgtgtaaaaacaaactgttccctagccagtgcggagcaaaccgagaattcgacgaaaatacttgtcagtgcgtgtgcaagcgaacttgtccgcgcaatcagccgctgaatccaggaaaatgcgcttgcgagtgtaccgagtcgccgcagaaatgcctgctcaagggcaagaagttccaccaccaaacttgctcatgctacagacgcccgtgcactaacaggcaaaaggcatgtgagccggggttttcgtactcggaggaggtgtgccgctgcgtgccgtcgtactggaagcgcccgcaaatgatgtcg

SEQ ID NO: 155908 - DNA, 1260 bp, Artificial Sequence
  derived and/or modified sequence
atgcacttgttaggttttttttctgtggcctgctcgctcttggcagctgctcttttgcccggaccgcgtgaagctccggcggcggcggccgctttcgagtccggactggatctcagcgacgcggaaccggacgctggtgaagccactgcttacgcgtcaaaggatcttgaagagcaactaagatcggtctcctccgtcgacgagttgatgaccgttttgtatcccgagtactggaaaatgtataagtgtcagctccgcaaaggcggatggcaacacaaccgagagcaagctaacctaaactcgagaactgaggagacaattaagttcgctgcggctcactacaatacggaaatcttgaaatctattgacaacgaatggcgcaagacacagtgtatgcctcgcgaggtatgtatagacgtggggaaggaattcggtgtggcgacgaatactttctttaagcctccctgcgtctcagtctatagatgcggtgggtgttgcaactctgagggtctacagtgcatgaacacgtccacatcttatctgtctaagactttgtttgaaataacagtgcccctgtcgcagggcccgaagcccgtcaccatcagtttcgctaatcatacctcttgcaggtgtatgagcaaactcgacgtctacaggcaggtccacagcatcatcagacggtcactaccggccacccttccgcaatgccaagcggcgaataaaacttgcccgaccaattacatgtggaacaaccacatttgccggtgcctggcccaggaggactttatgtttagttccgatgctggagacgactctacggatggcttccatgatatttgtggtcctaataaggaactggatgaggaaacctgtcaatgtgtttgcagggctggactccgccctgcaagctgcggcccacataaagaacttgacaggaactcgtgccaatgcgtctgcaaaaataagctgttcccgtcccagtgcggagcgaaccgagaattcgatgagaatacatgtcagtgtgtctgcaagcgcacttgccctagaaaccagccactcaatccaggcaagtgcgcgtgcgagtgtactgagtccccccagaagtgcctactaaaagggaaaaagtttcatcatcagacctgctcctgttatagacggccatgcaccaaccgccagaaggcctgtgaaccaggcttcagctattcagaagaagtctgccggtgcgttcctagctactggaagcgacctcagatgatgtca

SEQ ID NO: 155909 - DNA, 1260 bp, Artificial Sequence
  derived and/or modified sequence
atgcatctgcttggattcttttcagtggcttgcagcctgttggccgcggccctcctgccgggtccacgggaagcaccggcagcggcagctgctttcgagtccggcctggatctgagcgacgccgaaccggacgccggagaggcgaccgcatacgcaagcaaggatctcgaggagcagctgcggagcgtctccagcgtggatgagctgatgacggtgctgtacccggagtactggaagatgtacaaatgccaacttaggaaaggcggctggcagcataatagagagcaagccaacctgaattcccgtaccgaagagactattaagttcgcggcggcacactacaataccgagatccttaagagcatcgataatgaatggcgcaagactcagtgcatgcctcgggaagtgtgcatcgacgtgggaaaggaattcggtgtggccaccaacaccttctttaagccgccgtgcgtgagcgtgtaccggtgcggagggtgctgcaactcagaagggctgcaatgcatgaacaccagcacttcctacctgtccaagactctgttcgagatcactgtgccactctcgcagggacctaagccagtcactatctccttcgcgaaccatacttcgtgccgttgtatgtctaagttggatgtctaccggcaagtccactccatcatccggcgctcgctgccggccactctcccacaatgccaggccgcgaataagacctgtcccacgaattacatgtggaataatcacatctgccgctgccttgcgcaagaagatttcatgttcagctcggatgctggagacgactcaactgacggatttcacgacatttgcggaccgaataaagagctcgacgaggagacgtgccagtgcgtgtgcagagcaggcctccgcccagcctcgtgcggaccacacaaggaactggatagaaattcctgccagtgcgtttgcaagaacaaacttttcccatcgcagtgtggcgcaaatcgggaattcgacgaaaacacttgccagtgcgtctgtaagcgcacctgcccacgcaaccaaccccttaacccgggaaagtgtgcctgcgaatgtactgaatccccccaaaagtgtctcctgaagggaaagaagtttcatcatcagacttgctcctgttaccggcggccttgcaccaatcgccaaaaagcatgcgaaccaggcttctcctactcggaagaagtctgccgatgcgtgccgtcgtactggaagaggccgcaaatgatgtca

SEQ ID NO: 155910 - DNA, 1260 bp, Artificial Sequence
  derived and/or modified sequence
atgcatcttcttggcttcttttccgtcgcgtgttcacttttggcagccgcgctgctgcctggtccacgcgaagcaccagcagcggctgccgcattcgaatcgggacttgatctcagcgatgcggaacctgatgccggtgaagcaaccgcctacgcgagcaaggacttggaggaacagctgcggagcgtgtccagcgtggatgagctgatgaccgtgctttaccctgaatattggaagatgtacaagtgtcaattgagaaagggtggttggcaacataacagagagcaggcaaatttgaatagccgaactgaagagactattaagtttgcagcagcacactataacactgaaattctcaagtcgatcgataacgagtggagaaagacccaatgtatgccacgtgaagtgtgtatcgacgtgggaaaggagttcggagtcgcgactaacacctttttcaagcctccgtgcgtgtcagtgtacagatgtggaggatgctgtaacagcgaaggcctgcagtgtatgaacacgtcgactagctacctgtccaagactctttttgaaattaccgtcccactgtcccaaggtccaaagccagtgaccatatccttcgccaaccatacgagctgtagatgtatgagcaagctcgacgtgtacaggcaagtgcactcaatcatccgaagatcccttccagcaactctgcctcagtgccaggcagccaataagacctgtcctaccaactacatgtggaataaccatatttgtcgttgtcttgcccaggaagatttcatgttctcgtctgacgcaggcgatgattccactgacggatttcatgatatctgcgggccaaacaaagaattggatgaagagacttgtcagtgtgtctgtcgggcagggctcagacctgcatcttgtggaccccataaggaactcgataggaattcgtgccaatgtgtctgtaagaataaactgtttccatcacagtgtggtgcgaaccgagaatttgacgaaaacacctgtcagtgtgtatgtaaaagaacttgtccgcggaatcaaccactcaaccctgggaagtgtgcatgcgaatgcactgagagcccccaaaagtgccttctgaaagggaagaagttccaccatcaaacttgttcgtgttaccggcgaccatgtactaaccgccagaaggcttgcgaaccgggattctcatactcagaagaagtctgtagatgtgtgccttcctattggaaaagaccacagatgatgtcc

SEQ ID NO: 155911 - DNA, 1260 bp, Artificial Sequence
  derived and/or modified sequence
atgcatcttcttggtttcttttcagtggcctgttcactgttggccgcggcacttctgcccggacctagagaagctcccgcagcagcggcagcatttgaaagcgggcttgatctttccgacgccgaacctgacgcaggtgaggcaactgcatacgcatcgaaggatcttgaggaacagttgcgatcggtgtcctccgtcgatgaactgatgacggtcctgtaccctgagtactggaagatgtacaagtgtcaacttaggaagggcggatggcagcacaacagggaacaagccaacctgaattcacgcaccgaagaaaccataaagtttgcagcagcacattacaacaccgagatcctcaaatcaattgacaacgagtggcggaaaactcaatgtatgccgcgagaagtgtgtatcgatgtcggcaaggagtttggtgtggccacgaacacgttctttaaacctccttgcgtcagcgtttaccgatgtggaggctgttgtaacagtgagggactgcagtgtatgaacacctccacttcctacctcagcaagactctctttgagatcacggtcccactgtcccaaggccctaaacctgtgactatatcgtttgcaaatcacacttcatgccggtgtatgagcaagttggacgtgtaccgccaggtccactccatcataagacgcagcctgcctgccactttgccccaatgtcaagcagcaaacaaaacgtgccctaccaactacatgtggaacaaccacatttgtagatgtctggcacaagaggatttcatgttctcatcagatgcaggtgatgatagcaccgatggatttcacgatatttgcggaccaaacaaggagcttgatgaagagacttgtcagtgtgtgtgcagagccggacttaggccggcttcctgtggaccgcataaggaacttgacagaaatagctgtcaatgcgtctgtaagaacaaactgtttccttctcagtgcggagcaaatcgggagttcgacgagaatacttgtcaatgtgtctgcaagcgcacctgcccacgaaatcagccccttaatcctggcaagtgtgcatgtgagtgtaccgaatctccccagaagtgtctgcttaagggaaagaaatttcaccatcaaacttgctcgtgctacagacgtccttgtaccaatagacaaaaggcgtgcgagccaggattctcctacagcgaggaagtgtgtagatgtgtcccatcctattggaaacgacctcaaatgatgagc

SEQ ID NO: 155912 - DNA, 1260 bp, Artificial Sequence
  derived and/or modified sequence
atgcatctgctcggtttcttctccgtggcatgttcgctgttggccgcagccctcctgcccgggcctagagaagctccggccgctgccgccgcgtttgaatcaggcctggatctttccgacgcggaacctgatgcgggagaggcgaccgcatacgcctcgaaggatcttgaggagcagctgcgctccgtctcatccgtcgatgagcttatgacggtgctgtacccagagtattggaagatgtacaagtgccaactgaggaagggaggatggcaacacaaccgcgagcaagcgaatctcaattcgcggaccgaagagacgattaagttcgccgcggcgcattacaacactgaaatcctcaagtccatcgataacgaatggaggaaaacccaatgcatgccgcgagaagtgtgcatcgatgtcggaaaagagttcggagtggccacgaatacctttttcaaaccgccttgcgtctcggtgtaccggtgcggcggatgttgcaacagcgagggcctccagtgcatgaacacctcgacttcctacctgagtaagaccctctttgaaatcactgtgccgctgagccagggcccaaagccagtgactattagcttcgccaaccatacttcatgccggtgcatgtcaaagctggacgtctacagacaggtgcattctatcatccggcgctcactccctgctaccctgcctcagtgccaagccgccaataagacttgcccaacgaactacatgtggaacaatcacatttgtagatgccttgcccaggaagatttcatgttctcgtcagacgcaggagatgattccactgacggcttccatgatatctgcggaccaaataaggaactcgacgaagaaacctgccaatgtgtctgccgggctggactccgccctgcatcatgcggaccgcataaggagctggaccggaattcctgtcagtgtgtgtgcaagaacaagctctttcctagccaatgcggagctaatcgggaatttgacgagaacacttgtcagtgcgtctgcaagaggacctgtccacgaaatcaaccgctgaatccaggtaaatgcgcttgtgaatgcaccgaatccccccaaaagtgcctgttgaagggaaaaaagttccatcaccagacttgctcgtgctaccgtagaccctgtactaaccggcagaaagcgtgcgaaccgggattttcgtactcggaagaggtgtgtagatgcgtcccctcgtactggaaacggccgcaaatgatgtcg

SEQ ID NO: 155913 - DNA, 1260 bp, Artificial Sequence
  derived and/or modified sequence
atgcacctgctcggcttcttttcggtcgcctgctccctccttgcagcagctctcctgcccggaccccgggaagcgccagcagcggccgcggcatttgaatcgggactcgacctgtctgatgcggaacccgacgccggagaggccactgcatacgcgtcgaaggatctggaagagcagctgcggtccgtcagctccgtcgacgaactgatgaccgtgctgtacccggaatactggaagatgtacaaatgtcagctgaggaagggcggttggcaacataacagagaacaggctaacttgaactctcgcactgaagaaaccattaagttcgcggcagcgcattacaatactgagatcttgaaatccattgataacgaatggagaaagacccagtgtatgccgcgcgaggtctgcatcgacgtgggaaaggaattcggagtggcgaccaataccttctttaagccaccgtgtgtgtccgtctaccgatgcggcggatgctgcaattcagaaggattgcaatgtatgaacacttcgacctcctaccttagcaagacgctgttcgaaataactgtgcccctttcgcaaggaccgaaacctgtcaccatctcattcgcaaaccacacttcctgccgctgcatgagcaagctggatgtttaccgccaggtgcactccatcattcggagatccctgccagcgaccctcccgcagtgccaggccgctaacaaaacttgcccgaccaactacatgtggaacaatcacatctgccggtgcctggcccaggaggactttatgttctcctctgacgctggagatgattccactgacggatttcacgacatctgcgggccgaataaggagctcgatgaggaaacctgccaatgcgtgtgtcgcgcaggacttcggccagcgtcttgcggaccacacaaagagctggacagaaattcatgccagtgtgtctgcaagaacaagctgtttccgagccaatgcggagcaaacagagaattcgacgagaatacctgtcagtgcgtctgcaaaaggacctgtccaagaaatcagccactcaatcctggtaagtgcgcctgcgaatgcactgagtcgccacagaagtgcctgctgaagggtaagaaattccatcaccagacgtgctcatgctaccgcaggccgtgtaccaatcgccagaaggcgtgtgaacctggattcagctactccgaagaagtgtgtcgctgcgtcccttcatactggaaaagaccgcagatgatgagc

SEQ ID NO: 155914 - DNA, 1260 bp, Artificial Sequence
  derived and/or modified sequence
atgcatctgcttggcttcttcagcgtggcttgctcactgctcgccgcggcgctgctgcccggacctagagaagcgccggcagccgccgcggcattcgagtccggcctggacctgtccgatgcagagccggacgccggagaagcgactgcctacgcctcaaaggacctggaggagcagctgcggtccgtctccagcgttgatgagctgatgactgtgctctaccccgaatactggaagatgtacaaatgccaactccggaaggggggatggcagcacaatagagaacaggctaatcttaattccagaactgaggaaacgatcaagttcgctgctgcccattacaacactgagatcctgaagagcatcgataacgaatggagaaaaacccagtgcatgccgagggaagtctgtatagacgtcgggaaagaatttggtgtggccactaacacgttctttaagccgccatgcgtgtcggtgtacagatgcggaggatgctgcaattcggaaggactccagtgtatgaacacttccacctcttacctgtcgaaaaccttgtttgagattactgttccgctgtcccagggtccgaagccggtgactatctcgttcgcgaaccacacctcatgtcgatgcatgtccaagctggacgtctatagacaggtccactcaatcatccggcggtcactcccggcaactctccctcaatgccaggctgctaataagacttgccctacgaactacatgtggaataaccatatctgtagatgcctcgcccaggaggatttcatgttttcctcggatgcaggcgacgatagcaccgatggatttcacgatatctgtggaccaaacaaggaactggacgaggaaacctgtcaatgtgtttgtcgggcgggactgcggcctgcaagctgcggaccccacaaggagttggacagaaactcgtgccagtgtgtctgcaagaacaaactgtttccatctcagtgcggggccaacagggaattcgatgaaaacacttgtcaatgcgtttgcaagagaacttgtccacggaatcaaccgctgaatccaggcaagtgtgcgtgcgaatgcaccgaatcgccacaaaaatgcctgctgaagggaaaaaagttccaccaccaaacctgctcctgctaccggcgcccatgcaccaatcgccagaaagcctgcgagccgggattctcgtactccgaggaggtgtgcaggtgcgtgccctcgtactggaagaggccacaaatgatgtca

SEQ ID NO: 155915 - DNA, 1260 bp, Artificial Sequence
  derived and/or modified sequence
atgcatctgctcggattcttctcagtggcatgctcactgctggcagccgccctgctgcccgggccgcgggaggcgcctgctgctgcggctgcatttgagtctggccttgacctgagcgacgcggaaccggatgcaggcgaggccactgcctacgctagcaaggacctcgaagagcagctgcgctcggtgtcgtccgtcgacgagctgatgacggtgctgtacccagagtactggaagatgtacaagtgccaattgcgcaagggaggatggcagcacaatagggagcaggcaaatctcaacagcaggacggaagaaacgatcaagttcgcagctgcacactacaacactgaaatcctgaagtcgattgataacgaatggcgcaagactcaatgtatgccgagagaagtttgtattgatgtcggaaaggaattcggagtggccacgaacacctttttcaagccgccttgcgtgtcagtgtaccgctgcggagggtgttgcaattcagaggggctgcagtgtatgaacacgtccacctcatacctgtccaaaaccctgttcgagattaccgtgcctctgagccagggaccgaaaccggtgaccatcagctttgcaaatcacaccagctgccgctgtatgtctaaactggacgtgtaccgccaggtgcactccatcatccggaggtccctccctgccacccttccgcaatgccaggcagcaaacaagacgtgtccgaccaactacatgtggaataaccacatctgtcgttgtctggcacaggaggactttatgttctcatcggatgccggcgacgattccactgacggatttcatgacatctgcggccctaacaaggaactggacgaagaaacttgtcagtgcgtgtgccgagccggcctgcgccccgcctcgtgtggaccacataaagaactggatcgcaattcatgccaatgcgtatgcaagaataagctcttcccgtcccagtgcggggctaacagagagtttgacgaaaatacttgtcaatgcgtttgcaagcgcacttgcccgcgaaaccaacctctgaatcccggaaaatgcgcgtgtgagtgtactgaatccccacagaagtgcttgttgaagggcaagaaattccatcaccaaacttgctcctgctaccggcggccgtgcaccaaccggcagaaagcctgtgagccgggtttctcctactcggaggaggtctgcagatgcgtcccatcctactggaagcgccctcagatgatgtcc

SEQ ID NO: 155916 - DNA, 1260 bp, Artificial Sequence
  derived and/or modified sequence
atgcacctgcttgggttcttctccgtcgcatgctccctcttagccgcggctctgctgccaggcccgcgggaagccccagctgcggccgctgccttcgaatcgggtctggatctgtccgatgcagaacccgacgctggggaggcaacagcatacgcctcgaaagacctggaagagcagttgcgatccgttagtagtgtggatgagctgatgacagtgctgtatcctgagtactggaagatgtataaatgccagctgcggaagggcggatggcaacataaccgggagcaggccaatcttaacagcagaactgaggaaacaattaaattcgcagctgcccattacaacaccgagatcctgaaaagcatcgacaatgagtggcggaagacccagtgtatgccacgcgaggtctgcatcgacgtgggcaaagagtttggcgtggcaacaaacactttcttcaagccaccctgcgtgtctgtgtatcgttgtggcggttgctgcaattcagagggactgcaatgcatgaacacttcaacatcatacttgtcaaagaccctctttgagatcaccgtccccctgtcccaggggcccaagccagtgactatatcctttgccaatcacacctcctgtcggtgcatgtccaaactggatgtttacagacaggtccactccatcattcgccgttctttgcctgccacactgccacagtgccaagcagcgaataagacatgccctacgaattatatgtggaacaaccacatctgccgatgcctggcacaggaggactttatgttctcatcagatgccggtgacgattccaccgatggctttcacgatatctgcggacctaacaaggagctggatgaagaaacctgccaatgtgtgtgccgggctggcctgaggcccgcctcgtgcggtccccacaaggaactggatcgcaacagttgtcaatgcgtctgcaaaaataaactgttcccttcccagtgtggggcaaatcgagagtttgatgaaaacacatgccagtgcgtatgcaagcgtacttgcccgcgcaaccagccactaaaccctggaaagtgtgcctgcgagtgcactgaatctccacagaagtgtcttcttaaaggtaaaaagtttcaccaccagacctgcagctgttacaggcgcccctgtactaacagacagaaggcatgtgagcctgggttttcatacagcgaagaagtgtgccgctgcgtcccttcgtattggaaaaggcctcaaatgatgagt

SEQ ID NO: 155917 - DNA, 1260 bp, Artificial Sequence
  derived and/or modified sequence
atgcacctgctgggatttttctcggtcgcctgctccctcctggctgcagctctgctgccaggaccgcgggaagctccagcggccgcagccgccttcgagtcaggactcgacctgagtgacgctgagcctgacgcaggagaagccactgcatacgcgtcaaaggatctcgaggagcaactgcgctcagtgtcctccgtggatgagctcatgaccgtgctgtacccagagtactggaagatgtacaagtgccagctgcggaaaggaggctggcaacataacagggaacaggcgaacctcaactcacgcactgaagaaaccatcaaattcgccgcagctcattacaacactgagatcctgaagtcaatcgataacgagtggcgcaagacccaatgcatgccgcgggaagtctgcattgatgtgggaaaagaatttggagtggcaactaacactttctttaaaccgccttgcgtctccgtgtacagatgtggcggctgttgtaactccgaaggtttgcagtgtatgaacaccagcacctcgtatttgtcgaagactctcttcgagatcactgttcctctcagccaggggccgaagccggtgaccatctcattcgctaatcatacctcctgccgctgtatgtcaaagctcgacgtgtaccggcaggtgcatagcatcatccgccgatccctcccggccacgcttcctcaatgccaagccgcgaacaagacctgcccaactaactacatgtggaacaatcacatctgccgctgtctggcgcaggaagatttcatgttcagctccgatgctggagacgattcgaccgacggtttccatgacatctgtggcccaaacaaagagctggatgaggaaacgtgccagtgcgtctgtcgggccggcttgcgcccggcgtcatgcgggccgcataaggagctggatcggaactcctgccagtgcgtgtgcaagaacaagctcttcccatcacagtgcggcgccaacagagagttcgacgagaacacttgtcagtgtgtgtgcaaacgcacctgtccgcggaaccagccgctcaaccctggaaagtgcgcatgcgaatgcactgagtcgccacagaaatgcctgctcaaaggcaagaagttccaccaccagacctgctcctgctaccgccggccctgcactaaccgccagaaagcgtgcgaaccgggtttttcatactctgaggaagtgtgccggtgcgtgccgtcatactggaaaaggcctcagatgatgtcg

SEQ ID NO: 155918 - DNA, 1260 bp, Artificial Sequence
  derived and/or modified sequence
atgcacctgctgggctttttctctgttgcttgttcccttctcgctgccgccctcttgccagggcctcgcgaagccccagccgccgccgcagcatttgagagcggtctggacctgtcagatgccgagcctgacgcaggcgaggcaaccgcatacgcgagcaaggatctcgaggaacaattgcgctccgtttccagcgttgacgaactgatgaccgtgttgtaccctgaatactggaagatgtacaagtgccaattgaggaaaggagggtggcagcacaacagagagcaggctaacctgaacagtcggaccgaggagaccatcaagtttgcggcagctcattataatactgaaatcctcaaaagcatcgacaacgagtggcgtaagacccagtgtatgccacgtgaagtttgcatcgacgtcggcaaagaattcggggtggcaaccaacacattctttaaacccccttgcgttagcgtgtatcgctgcggtgggtgttgtaacagcgagggtcttcagtgtatgaacacatccacctcctatctgtcgaagacgctcttcgagatcaccgtcccattgtctcagggacccaagcctgtcactatctccttcgccaaccacacctcttgccgctgcatgagcaagcttgatgtgtatcgccaggtccattccatcattcgccgcagcctgcctgccacccttccccagtgccaagccgccaataagacatgccccaccaattatatgtggaacaatcatatctgcaggtgcctggctcaggaggacttcatgttctcttcagatgctggcgacgattccaccgacggcttccatgacatctgtgggcctaacaaggaactggacgaagagacctgtcaatgcgtgtgccgtgcagggctgcgacccgcatcttgcggccctcataaggagcttgacaggaactcatgccagtgtgtgtgcaaaaacaaactctttccttcccaatgcggcgccaacagagaattcgatgagaacacatgtcagtgcgtctgtaagcgcacctgtcctcgcaatcaaccactgaacccaggcaaatgtgcctgcgaatgtactgaatcaccccagaagtgcctcctgaaagggaagaaatttcaccatcagacatgtagttgctatcggagaccatgtacgaaccgtcaaaaggcatgcgagcctggattctcctattctgaggaggtttgcaggtgtgttccaagctactggaaacggccccagatgatgagt

SEQ ID NO: 155919 - DNA, 1260 bp, Artificial Sequence
  derived and/or modified sequence
atgcacctccttgggttcttttcggttgcctgctccctgctggctgcagccctcctgccgggaccgcgggaggccccagcggcggcagcggccttcgaatcaggactggacctcagcgatgccgagcctgacgctggcgaagcgactgcgtacgcgagcaaggacctggaagagcagctgcggtccgtgtcatcggtcgacgaactcatgaccgtgctgtacccggagtactggaagatgtacaagtgccagctgaggaagggcgggtggcagcacaaccgcgaacaggcaaacctcaacagccgcaccgaagaaacgatcaagttcgcagccgcccactacaacacggaaatcctcaagagcatcgacaatgaatggagaaaaacgcaatgcatgccgcgggaagtgtgcatcgacgtcggaaaggaattcggtgtggctaccaacactttcttcaagccaccatgcgtctcagtgtatcggtgcggaggatgttgcaactccgaagggctgcagtgcatgaacacttccaccagctacctgagcaaaaccctgttcgagatcactgtcccgttgtcacaaggaccgaaaccggtgaccatctcgttcgccaaccataccagctgtcgctgtatgtcgaagctggatgtgtacagacaggtgcattcaatcatcaggcgctcattgcctgctacgctgccgcagtgccaggctgcgaacaagacttgtccaactaactacatgtggaacaaccacatctgccgctgcctggcccaggaggactttatgtttagctccgatgctggtgatgactccactgacggtttccacgacatctgcggaccgaataaggagctcgatgaggaaacctgtcaatgtgtgtgtcgcgccggactccggccagcttcgtgtggaccacacaaggagctggataggaactcatgtcaatgcgtgtgtaaaaacaagctgttcccctcgcagtgcggagctaacagagaattcgacgaaaatacttgtcagtgtgtgtgcaagcggacctgcccacggaaccagccgcttaatcctgggaagtgcgcatgtgaatgcaccgaatcaccacagaaatgccttctgaagggaaaaaagttccaccatcagacctgctcctgctaccgccgcccttgtacgaataggcaaaaggcctgcgaaccgggtttctcgtactctgaagaagtttgccggtgtgtgccaagctactggaaaagaccacagatgatgagc

SEQ ID NO: 155920 - DNA, 1260 bp, Artificial Sequence
  derived and/or modified sequence
atgcatctgctcggatttttttcagtggcttgctctttgctcgcggcggccttgttacctgggcctagggaagctccagccgccgcggctgcgtttgagagcggtttggatttatccgacgcagagcctgatgcgggtgaagctacagcatacgcctccaaggatttggaggaacagctgcgaagtgtctcctccgtggatgaactgatgacagtgctttacccggagtactggaaaatgtataagtgccaactgaggaaagggggatggcaacataatagggaacaggccaatctcaacagtcgcacggaggaaaccataaagtttgctgcggcacattataacacagaaatactcaaatcaatcgacaacgaatggcggaagacacagtgcatgcctcgggaggtgtgtattgacgtgggaaaggaattcggtgtggcaaccaacacatttttcaaaccaccttgtgtgtcggtgtatcggtgcggaggatgttgcaattctgaagggttgcagtgtatgaatacatctacctcttatctgtctaagaccctgttcgaaataaccgtccctctgagccaggggcctaagcccgtgactatctctttcgccaaccatacaagttgcagatgtatgtcaaagctagacgtctacagacaggtccatagcatcattaggcgctctctgcccgccaccctcccacaatgtcaagctgctaataagacctgtcctacgaattatatgtggaacaaccacatttgccgttgtttagcacaggaagactttatgtttagttcggacgctggagatgactccacagatggctttcacgatatttgtggaccaaataaggagttggacgaggaaacatgtcagtgtgtctgtcgggcaggcctccggccagccagctgcggacctcataaggagctggaccgcaatagctgccaatgcgtatgcaaaaataagctgttcccttcacagtgtggcgctaatagggagtttgacgagaacacctgccagtgtgtttgcaaaaggacttgcccccgcaaccagcccctgaacccgggaaagtgtgcttgcgagtgtactgagtcaccccaaaaatgcttgctgaaaggaaaaaagtttcaccaccaaacttgctcctgctatcgccgcccctgcacgaatcggcaaaaggcatgtgaacccggattttcctactcggaggaagtctgccgctgtgtgccctcttattggaagaggccacagatgatgagc

SEQ ID NO: 155921 - DNA, 1260 bp, Artificial Sequence
  derived and/or modified sequence
atgcatctgttgggctttttctccgtcgcttgtagccttcttgcagccgctcttctgccaggacccagggaggctcctgccgccgccgcggcgtttgagtcagggctcgatctgtcagatgccgagcctgacgcaggtgaagcaaccgcgtacgcctcaaaggatttggaagaacaactcaggtccgtgtccagcgtggatgaactcatgactgtgctttacccagaatactggaaaatgtacaagtgtcagcttcggaaagggggctggcaacataaccgcgagcaggcaaacctgaactcgcgcactgaagagacgatcaaatttgcagcagcccactacaacaccgaaattctcaaatccatcgataacgagtggaggaaaacccaatgtatgccacgggaagtgtgtatcgatgtcggtaaagagttcggagtcgctactaacaccttctttaagcccccgtgtgtgtccgtctaccgttgcggcggatgttgcaatagcgagggacttcaatgtatgaacacctcgacctcctatctgtccaagaccctttttgaaattaccgtgcctctctcgcagggtcctaagccggtgaccatctcattcgcaaatcacacctcgtgccgctgtatgagcaaactcgatgtttaccggcaagtgcactccatcattcggagatcactccctgccactctgcctcaatgtcaagcagcgaacaaaacttgtcctacgaattacatgtggaacaatcacatttgccggtgtctggcacaggaggactttatgttttcgtcggatgcaggagatgatagcaccgacgggtttcacgacatctgcggacccaacaaagaacttgatgaagagacttgtcaatgcgtctgtcgcgcggggcttcgcccagcgtcatgtgggcctcataaggaactggacagaaactcgtgccagtgtgtgtgcaagaacaagctctttccaagccagtgcggagcgaatagagaatttgacgagaatacgtgtcaatgcgtgtgtaagcgcacctgtccacgaaaccagcctcttaaccccgggaaatgtgcgtgcgaatgtaccgagagcccacagaagtgtctccttaaggggaaaaagtttcatcaccagacttgctcatgttacagacggccctgtactaatagacaaaaggcctgtgaacctggcttttcatactccgaggaagtgtgtagatgcgtccctagctattggaagcggccccaaatgatgtcc

SEQ ID NO: 155922 - DNA, 1260 bp, Artificial Sequence
  derived and/or modified sequence
atgcaccttttggggtttttcagcgtcgcctgcagcctccttgcagcagcgcttctgccaggtcctagggaggctccagctgcagcagccgcatttgaatcgggcttggatttgtccgacgcggaacctgacgcaggagaggcgaccgcatatgcatcaaaggaccttgaagagcaactcaggtccgtgagctccgtcgatgaactgatgactgttctctaccccgaatattggaagatgtacaagtgccagcttcgcaaaggagggtggcagcataatagagaacaagcaaacctgaatagcagaaccgaagaaacgatcaaattcgccgctgctcactacaacactgagattctgaaatcgattgataacgagtggcgtaaaacccaatgcatgcctcgcgaagtgtgtattgatgtcggaaaggaattcggagtggcgaccaataccttctttaagcctccatgcgtgtccgtctataggtgtggtggttgttgtaactccgagggactgcagtgtatgaatacttcgacctcctacctgtcgaaaaccttgttcgaaattacggtgcctctgtcacagggccctaaaccagtgactatatcttttgcgaaccacacctcgtgtcggtgcatgtccaagctcgatgtctaccgccaggtgcacagcataatccgacgatctctgcctgccaccctgcctcaatgtcaagccgcaaataagacttgccccaccaattacatgtggaataaccatatttgtagatgtcttgcacaagaggactttatgttttcgtccgatgcaggggacgactcaactgacggatttcatgacatttgcggccctaacaaggaattggatgaagaaacgtgtcaatgcgtctgtcgtgcagggctgcgccctgccagctgcgggccacataaggagcttgatcgtaactcgtgtcagtgtgtgtgtaagaacaagctgttcccatcccagtgtggagcgaatcgggaattcgacgaaaacacctgccaatgcgtgtgtaagagaacctgcccccgcaatcaaccccttaatccgggaaagtgtgcatgtgagtgtaccgaatctcctcaaaagtgtttgcttaaagggaaaaagtttcaccaccagacttgtagctgttaccgccgcccctgtactaatcggcaaaaagcgtgcgagcctgggttttcctactccgaagaagtctgtagatgcgtgcccagctactggaagaggccccaaatgatgtcg

SEQ ID NO: 155923 - DNA, 1260 bp, Artificial Sequence
  derived and/or modified sequence
atgcacctgctgggcttcttcagtgtagcttgtagtctgctcgctgcggcactgttacccggccctagagaagcacctgctgccgcggcggccttcgagagcggcctggacctgagtgacgccgaaccggatgccggcgaagctaccgcttacgcctcaaaggatctagaggaacagcttcgctctgtgtcgtcggtggacgagcttatgaccgtgttgtatcctgaatactggaaaatgtataaatgtcagctacgaaagggaggctggcagcataatcgtgagcaggccaacctgaattctcgaacggaggagacgataaagttcgccgctgcgcactacaacacggaaatattgaagagtatcgataatgaatggaggaaaacccaatgtatgccccgcgaggtgtgcatagatgttggaaaggaatttggcgtcgctaccaatacatttttcaaaccgccctgtgtcagcgtttatcggtgcggcggatgctgtaactcagagggactgcagtgtatgaacacttctacaagctatctcagcaaaacactctttgaaattaccgtgcctttgtcacaagggcctaagcccgttacaatctccttcgcaaatcatacctcttgcagatgtatgagcaaactcgacgtgtacagacaggtgcactctatcattcggcggagccttcccgccacattaccacagtgtcaggccgctaataaaacttgccctaccaattatatgtggaacaatcatatttgtcgatgtttggcccaggaggatttcatgttctcctcagacgccggagacgattctacagatggcttccacgacatatgcggtccgaacaaggaactggatgaggagacgtgccagtgtgtgtgccgtgcgggtcttagacccgcttcttgcggaccccataaggaactggatcgaaacagctgccaatgtgtatgtaaaaacaagcttttcccgtcccaatgcggagccaaccgggaatttgacgaaaacacatgtcagtgtgtttgcaagagaacatgccctagaaaccagcccctgaatcccggaaagtgcgcatgtgaatgcaccgagtctccacagaaatgcctgctgaaggggaaaaagtttcaccaccagacttgctcatgttaccgaagaccctgtaccaaccggcagaaagcttgtgagcccggcttttcttactccgaggaggtgtgtagatgcgtccctagctactggaaacgacctcagatgatgtct

SEQ ID NO: 155924 - DNA, 1260 bp, Artificial Sequence
  derived and/or modified sequence
atgcatcttctgggctttttctccgttgcatgcagccttttggcagcggcactgctgccaggtcctcgtgaggcgccagctgcggctgccgcgttcgagtctggtttggacttgagtgacgcggagccggacgccggcgaagctacagcatatgcgtctaaggacttggaagagcagttgcgcagcgtctcctccgtggacgagctgatgacagttctgtatccggagtattggaagatgtacaagtgccaactgcgcaagggcggctggcagcataaccgcgaacaagccaacctgaactcacgcaccgaggaaactattaaattcgccgcagcacactataataccgagatcttgaagtccattgataatgagtggcgaaagacccagtgcatgccgcgtgaggtatgcatcgacgtgggtaaagaatttggcgttgcaaccaatacttttttcaaaccaccttgcgtgagcgtgtaccgttgcggcggttgttgtaattctgagggtctgcagtgcatgaatacctcaacgtcttacctgagcaaaaccctattcgagatcaccgttcctttgagccagggcccgaagccagttacgatctcctttgcgaatcatacctcctgccgttgcatgagcaagctcgatgtttatcgccaggttcactcgattatacggcgcagtctgccagccacattacctcagtgccaggctgcgaacaaaacctgccctacaaattacatgtggaataatcacatttgccgctgtctggcgcaggaggactttatgttttcgagcgacgccggtgacgattccaccgacggttttcacgatatttgtggccctaataaggagctggacgaagagacatgtcagtgtgtatgccgcgccggactgcgccctgcctcctgcggacctcacaaggagttagatcgtaattcttgtcagtgcgtttgtaaaaacaagttgttcccaagccagtgcggggcgaaccgcgagtttgatgagaacacctgccaatgtgtttgtaagcggacctgcccgcgcaaccaaccactgaaccctgggaaatgcgcttgcgagtgtaccgaaagccctcagaaatgcctgctgaagggcaagaaatttcatcaccaaacgtgtagctgttaccgccgaccatgcaccaaccggcagaaagcctgtgagcctggcttcagctacagcgaagaagtttgcaggtgcgttccaagctattggaagcggccacagatgatgagc

SEQ ID NO: 155925 - DNA, 1260 bp, Artificial Sequence
  derived and/or modified sequence
atgcatctcctgggatttttctcagtggcttgttcgctgctggctgcagcgctgctgcctggtccacgagaggcccctgcagcagccgccgcatttgagtcaggcctcgacctgtccgatgcggaaccggatgctggtgaggcaaccgcgtacgcttccaaagatctggaggagcaactgcggtcggtgtccagcgtggatgaacttatgaccgtgctctaccctgaatactggaagatgtacaagtgccagctgcggaagggaggatggcaacataaccgggaacaggcaaatctgaattcgagaactgaagagactattaagttcgcagctgcacattacaacactgagattctgaaaagcattgacaatgagtggcggaaaacccagtgtatgcccagagaggtgtgtatcgatgtggggaaggagtttggagtggcgacgaacacctttttcaagcccccctgtgtgtcggtgtacaggtgtgggggctgctgtaactcagaaggtctgcaatgtatgaataccagcacgtcctacctttcaaaaacgctctttgaaatcactgtgccactttctcagggaccaaagcctgtcaccatttcgttcgcaaaccacacttcgtgcagatgcatgtcaaagttggatgtgtaccggcaagtgcactccatcattaggagaagcctgcccgccaccctgccccaatgtcaagccgctaacaaaacctgtcctacgaactacatgtggaacaaccatatttgcagatgtcttgcccaagaggatttcatgttctcgagcgacgcaggagatgattcgactgatggatttcacgacatttgcggtcccaacaaagagctcgatgaggagacgtgtcaatgcgtgtgtagggcaggcctcaggcctgcatcctgtggaccacataaggagctggacagaaactcctgtcaatgcgtttgcaaaaacaagttgtttccttctcaatgcggggccaaccgcgaatttgacgaaaatacctgccagtgtgtgtgcaagagaacctgtccgagaaatcagcctctcaaccccggtaagtgtgcatgtgaatgtactgaaagccctcaaaagtgcctgcttaagggcaagaaattccatcaccaaacctgttcgtgttaccgtagaccttgtacgaatagacaaaaggcctgtgaacctggatttagctactcggaggaagtctgcaggtgtgtcccctcctactggaagcggcctcagatgatgtcc

SEQ ID NO: 155926 - DNA, 1260 bp, Artificial Sequence
  derived and/or modified sequence
atgcacctgctcggcttcttttctgtggcctgctccctgctagctgcagctctgcttcctggaccccgggaggctcccgccgcggcagcggcctttgaatccggccttgacctgagcgacgctgaacccgacgccggcgaagccacagcctacgcgagcaaagatctggaagagcagctgaggtccgtttctagcgtggacgagctgatgacagtgctctatccagagtactggaaaatgtacaaatgtcagcttcggaaaggggggtggcagcataacagggaacaggcaaatctgaattccagaacggaggaaactataaaattcgccgccgctcactacaacaccgagatcctcaagtctatagataacgagtggcgcaaaacccagtgtatgccacgcgaggtctgcatagatgtgggaaaagagtttggagtggctaccaataccttctttaaaccaccatgcgtcagcgtttaccggtgtgggggctgctgcaatagtgagggtctacaatgcatgaataccagtactagctacctctccaagaccttattcgagattactgtccctctcagtcagggtccaaagcccgtgacgatctccttcgccaatcatacatcttgcagatgtatgtctaagctggatgtgtataggcaagtgcactccattatcaggcgatcccttcccgccaccctgccacagtgccaggcagctaacaaaacgtgcccaaccaactatatgtggaacaatcacatctgtcggtgtctggctcaggaagatttcatgttttcctccgacgcaggtgatgacagtactgatggcttccacgacatctgcggtcctaataaggaattggatgaggaaacatgtcaatgcgtgtgccgggccggcttgcggcctgcttcctgtggcccacataaagaactcgaccggaatagctgtcagtgcgtctgtaagaataaactgttcccctcacaatgcggggccaatcgcgagttcgatgagaacacgtgtcagtgcgtctgcaagcggacttgtccccgtaatcagccacttaatccgggaaagtgcgcttgcgaatgtaccgagtcccctcagaagtgcctactgaagggaaaaaagttccatcaccagacttgcagctgctatagacggccatgtaccaacaggcagaaggcttgtgagcccgggttcagttactccgaagaggtgtgcaggtgcgtgccgagttattggaaacgaccccagatgatgtca

SEQ ID NO: 155927 - DNA, 1260 bp, Artificial Sequence
  derived and/or modified sequence
atgcacctgttgggcttcttttcagtggcgtgttctctgctggccgccgccttgctgccgggtccgagagaagcaccggctgcagcagccgcgtttgaatcgggacttgacctctcggatgccgagcccgatgcaggcgaggccactgcgtacgcctccaaggacctggaagagcagctgcggtcagtgtcatcggtggacgaactgatgaccgtcctgtaccctgaatactggaagatgtacaaatgccagctcaggaaggggggctggcagcataaccgggagcaggccaacctgaattcaagaactgaagaaaccatcaagttcgccgccgcccactacaatactgaaatcctcaaaagcattgataacgagtggcgtaagactcagtgcatgccgagagaagtgtgcattgacgtgggaaaagaattcggagtggcgaccaatacgtttttcaagccgccttgcgtgagcgtgtaccggtgcggaggttgctgcaattcggaaggactgcagtgcatgaacacgtccacttcatacctgtccaaaactctcttcgagatcaccgtgccactgtcccaaggcccaaagccggtgaccatctccttcgcgaaccatacttcgtgcaggtgtatgtcgaagctcgacgtctaccgccaagtgcacagcatcatccggagaagcctcccggccaccctgccgcaatgccaagcggccaacaagacttgcccaactaattacatgtggaataaccatatctgcagatgtctggctcaggaagatttcatgttttccagcgacgccggagatgactccactgacgggtttcacgatatctgcggcccgaacaaagagttggatgaggagacttgccagtgcgtgtgcagggcaggactcagaccggccagctgtggcccacataaggagctggaccgcaattcatgccaatgtgtctgcaagaataagctcttcccgtcacagtgcggggcaaacagggaatttgatgaaaacacctgccagtgtgtgtgtaagcgcacttgccccaggaatcaaccgctcaacccgggtaagtgcgcgtgcgagtgcaccgaatcaccgcagaagtgcttgctgaagggaaagaagtttcaccaccaaacctgctcgtgttacaggcggccctgcaccaatagacagaaagcgtgtgaacctggattctcatactccgaggaggtgtgccgctgtgtcccaagctactggaagcggcctcagatgatgtcc

SEQ ID NO: 155928 - DNA, 1260 bp, Artificial Sequence
  derived and/or modified sequence
atgcacctgcttgggtttttctctgtggcatgtagccttcttgctgcagctctgctgccagggcccagggaggccccagcagccgccgccgcctttgagagcggactggatctgagtgacgctgagcccgacgcaggtgaggctacagcctatgcttctaaggacttggaggagcaactcaggtctgtgagcagtgtcgatgaactgatgactgtattgtacccggagtactggaagatgtacaagtgccagctgcggaagggcggatggcagcataatcgggaacaggccaaccttaactcaaggaccgaagaaaccatcaaatttgccgccgctcactataacactgaaattctcaaaagcatcgacaacgaatggaggaagactcaatgcatgccgagagaagtgtgtatcgatgttgggaaggaattcggtgtagccacgaatacattctttaagcccccctgcgtcagcgtataccgatgcgggggttgctgtaactccgaagggctgcagtgcatgaacaccagcactagctacctgagtaagacacttttcgagataacagttcctctgtctcagggcccgaagccggtgacaatctcattcgctaaccatacctcttgtaggtgtatgagcaaactggacgtttataggcaggtgcactcaatcatccgacgcagtcttccggccactctgccgcagtgccaggctgcaaacaaaacatgtcccacaaactatatgtggaacaatcacatctgtagatgccttgctcaggaagacttcatgttctcttccgacgctggggacgactccacagatggtttccatgatatttgtgggcctaataaggagctggacgaagagacttgtcaatgtgtttgtagagctggtctcagaccggcctcttgcggaccacacaaggagctcgataggaattcctgccagtgcgtgtgcaagaataagctgttcccgagccagtgcggggccaatcgcgaattcgacgagaatacttgccagtgcgtgtgcaagcgaacttgtcccagaaatcagcccctgaaccccggaaaatgtgcgtgtgaatgcacagaatcacctcagaaatgcctgctgaagggcaaaaagtttcaccatcagacctgctcctgttatagaagaccctgtaccaacaggcagaaggcctgcgaacccggtttcagctatagcgaagaggtatgtcggtgtgttccaagttactggaaaaggcctcagatgatgtct

SEQ ID NO: 155929 - DNA, 1260 bp, Artificial Sequence
  derived and/or modified sequence
atgcatttactaggttttttttcggtagcgtgttcgttattagcggcggcgctattaccgggtccgcgtgaagcgccggcggcggcggcggcgtttgaatcgggtctagatctatcggatgcggaaccggatgcgggtgaagcgacggcgtatgcgtcgaaagatttagaagaacaattacgatcggtatcgtcggttgatgaattaatgacggtattatatccggaatattggaaaatgtataaatgtcaactacgtaaaggtggttggcaacataatcgagaacaagcgaatttaaattcgcgaacggaagaaacgataaaatttgcggcggcgcattataatacggaaatattaaaatcgatagataatgaatggcgaaaaacgcaatgtatgccgcgtgaagtatgtatagatgttggtaaagaatttggtgtagcgacgaatacgttttttaaaccgccgtgtgtatcggtttatcgttgtggtggttgttgtaattcggaaggtctacaatgtatgaatacgtcgacgtcgtatctatcgaaaacgttatttgaaataacggttccgttatcgcaaggtccgaaaccggtaacgatatcgtttgcgaatcatacgtcgtgtcgatgtatgtcgaaattagatgtatatcgtcaagtacattcgataatacgtcgttcgttaccggcgacgttaccgcaatgtcaagcggcgaataaaacgtgtccgacgaattatatgtggaataatcatatatgtcgttgtctagcgcaagaagattttatgttttcgtcggatgcgggtgatgattcgacggatggttttcatgatatatgtggtccgaataaagaactagatgaagaaacgtgtcaatgtgtttgtcgtgcgggtttacgtccggcgtcgtgtggtccgcataaagaattagatcgtaattcgtgtcaatgtgtatgtaaaaataaactatttccgtcgcaatgtggtgcgaatcgtgaatttgatgaaaatacgtgtcaatgtgtttgtaaacgaacgtgtccgcgaaatcaaccgttaaatccgggtaaatgtgcgtgtgaatgtacggaatcgccgcaaaaatgtttactaaaaggtaaaaaatttcatcatcaaacgtgttcgtgttatcgacgaccgtgtacgaatcgacaaaaagcgtgtgaaccgggtttttcgtattcggaagaagtttgtcgatgtgtaccgtcgtattggaaacgaccgcaaatgatgtcg

SEQ ID NO: 155930 - DNA, 1260 bp, Artificial Sequence
  derived and/or modified sequence
atgcatctgttaggcttcttctcagtagcttgctccctgcttgccgctgcccttctccccggcccccgcgaggcgcccgctgcggcagccgcatttgagtctggacttgatctgtccgatgctgaacccgacgccggggaggccaccgcctatgccagcaaggatttagaagaacagttgcgaagcgttagtagcgtcgacgagctgatgacagtactgtacccagagtactggaaaatgtataaatgtcaactgaggaagggaggctggcagcacaatcgagagcaggcgaatctgaattcccgtacggaggagacaattaagttcgctgctgcacactacaacacagagatactcaagagcattgacaatgaatggagaaaaactcagtgcatgcctagagaggtgtgtatcgacgtgggcaaggagtttggcgtcgctactaatacttttttcaaacccccatgtgtgtccgtctacagatgtggcgggtgttgcaactctgagggcctacagtgtatgaatacctccacttcctatctttcgaaaactctcttcgaaattactgtgcccctgtcacaaggacccaaaccggtgacaataagttttgccaaccacactagttgccgctgcatgtccaaactggatgtttaccgccaggtgcattcaataatccggagaagtctgcccgcgactctcccacagtgtcaggcagctaataaaacatgcccaacgaactacatgtggaacaaccacatttgccgttgcttagcccaggaggacttcatgttctcctccgacgctggcgatgactccacagacggatttcatgatatttgtgggcccaacaaggagctggatgaggagacctgccagtgcgtttgtagggccggcctgcgtcccgcctcctgcggccctcacaaagagctagatcgtaatagctgccagtgcgtttgtaaaaacaaactatttccctcccaatgcggtgcgaatagggagtttgatgaaaacacctgccagtgtgtctgcaaacgtacgtgcccccggaatcagcctttgaatccgggtaagtgcgcctgcgaatgtacagagtcaccccaaaagtgtctgttgaaggggaaaaagtttcaccatcaaacctgcagttgttataggcgcccgtgtacaaaccgccagaaagcctgcgaaccagggttttcctacagcgaggaagtgtgtcgatgtgtcccctcttattggaagcgccctcagatgatgtcc

SEQ ID NO: 155931 - DNA, 1260 bp, Artificial Sequence
  derived and/or modified sequence
atgcatttattggggtttttctctgtggcgtgttctttgttagccgccgcccttctgccaggacccagggaggcgcctgccgccgctgctgcgtttgagtccggtttggatttgagcgatgctgagccggacgccggcgaggccacggcttacgctagcaaggacctcgaagagcagctgcgcagtgtttcctcagtcgacgaacttatgacggtcctgtaccctgaatattggaaaatgtataagtgtcagttgcggaagggagggtggcaacataaccgcgagcaggctaacctgaattccaggaccgaagagacaatcaagttcgcagccgctcactacaataccgaaattctcaaatccattgacaatgagtggcggaagacacaatgtatgccacgcgaggtgtgcatcgacgttggtaaggagttcggggtagctactaatacctttttcaagccaccttgcgtttccgtttacaggtgcggaggatgctgtaattcagagggcctgcagtgtatgaatacctctacttcttatctcagcaaaactctgttcgagattacggtgccgctctcacagggacccaagccagttactatttcttttgccaaccacaccagctgccgctgtatgtcaaagctggatgtgtacagacaggtacatagcataatccgcaggtcacttccggcaactcttcctcaatgccaggcagccaacaagacgtgtccaactaactacatgtggaataatcacatatgtaggtgtctggctcaggaagactttatgttttcctcagacgccggtgacgatagcactgacgggtttcacgatatctgcggccctaataaagaattggatgaggagacctgtcagtgtgtgtgcagggctggattgcggcctgctagctgcggtcctcacaaagagctggatcggaactcttgccagtgcgtgtgtaagaataaactattcccttcccaatgtggcgccaacagagagtttgatgaaaacacctgccagtgcgtctgcaagaggacatgccctagaaaccaacctctcaatcccggcaaatgtgcgtgcgagtgcacggagagccctcaaaaatgcctcctgaagggaaagaagtttcatcaccaaacatgttcctgttatcggcgcccatgtacgaatcgacagaaggcctgcgagcccggcttctcctattcagaagaagtgtgcaggtgcgtcccaagttattggaaacggccccagatgatgagc

SEQ ID NO: 155932 - DNA, 1260 bp, Artificial Sequence
  derived and/or modified sequence
atgcatctgctgggattcttttcggtcgcgtgctcactcctggccgccgctctgctcccgggaccacgcgaagcccctgccgccgccgcagcctttgagtcagggctggacctctcggatgcagaaccggatgccggtgaagcgacggcgtacgcttccaaagacctcgaggagcagctgcggtccgtctcgtctgtggacgagctgatgaccgttctctacccagaatattggaagatgtacaagtgccagctgcggaaggggggctggcagcacaatcgggagcaagcgaatcttaattcgagaaccgaggaaactatcaagttcgccgcagcacattacaatactgagatccttaagtcaattgataacgaatggagaaagacccaatgcatgcctcgggaagtgtgcatcgatgtgggtaaggagttcggagtcgctacgaatactttcttcaagcctccctgtgtgtcggtgtaccgctgcggagggtgttgtaattccgaaggtctgcaatgcatgaacacctccacctcttatctgtccaaaaccctcttcgaaatcactgtcccactgtcacagggcccaaaaccggtgactatctcattcgctaatcacacgtcgtgcaggtgtatgagcaagctggacgtttaccggcaggtccattcgattatcagacggagcctgccggccacgctcccgcagtgccaggccgcaaacaagacctgcccgaccaactacatgtggaacaatcatatttgtagatgcctggcacaggaggactttatgttctcatcggacgcgggggatgactctactgatggctttcacgacatctgcgggccaaacaaagagcttgatgaagaaacctgccaatgcgtgtgccgcgctggcctccggccggctagctgcggaccgcacaaggagctggacagaaattcctgccagtgcgtgtgcaagaacaagctgttcccttcgcagtgcggagctaacagagaattcgacgaaaatacctgtcagtgtgtgtgtaaaagaacttgcccgcggaaccaaccactgaatccgggaaagtgcgcttgcgaatgcactgagtcgccacaaaagtgtttgttgaagggaaagaaattccatcatcagacttgttcatgctacagacggccatgcactaaccgccaaaaagcgtgcgaaccgggattttcgtactccgaggaggtgtgtcgttgtgtgccgagctactggaaacgacctcagatgatgtcg

SEQ ID NO: 155933 - DNA, 1260 bp, Artificial Sequence
  derived and/or modified sequence
atgcatctcctgggctttttcagcgtagcatgttcgctccttgcagcagcgctcctgccgggacccagagaggcgcctgctgcagcggcagcctttgaatcaggtcttgatctgtcggatgcggaaccggatgccggagaggcgaccgcatacgcatcgaaagacctggaagaacagctgcgttccgtctcgtcagtggatgagctgatgaccgtgctgtatcctgagtactggaagatgtacaaatgccaacttcgcaagggtggttggcaacataaccgagagcaggcaaatcttaactcgagaactgaagaaactatcaagtttgccgcagcgcactacaataccgagattcttaaaagcattgacaacgaatggaggaaaacccagtgcatgcctagagaagtgtgtatcgatgtcgggaaagaatttggtgtggcaaccaatacctttttcaagcctccctgtgtctcggtctaccgatgcggcggttgctgcaatagcgaaggtctgcagtgcatgaacacgtcgacttcatacctttcaaagaccctgtttgaaattactgtgccgctctcccaaggaccgaagccggtgaccatctcctttgcgaatcacacgtcgtgtaggtgtatgtccaagctcgacgtgtaccggcaggtccatagcataatcagacgttcgcttccagcaacccttccacaatgtcaagcggcaaacaaaacctgcccaaccaactacatgtggaacaaccacatttgtagatgtcttgcacaagaggactttatgtttagctcggatgctggagatgattcgaccgatggtttccatgatatttgtggaccaaacaaagaactggatgaagagacttgtcagtgcgtctgtagagcaggccttcggcccgcatcgtgcggtccgcataaggagctggatcgaaatagctgtcaatgcgtgtgcaaaaacaagctgtttcctagtcaatgtggagcaaaccgagaattcgatgaaaatacctgtcaatgtgtgtgtaaacggacttgcccacggaaccagcctctgaaccctgggaagtgtgcatgcgagtgtactgagtcaccacagaaatgccttcttaagggaaaaaagtttcatcatcagacgtgctcatgttaccgccgcccttgtacgaatcgccaaaaggcatgcgaacccggattctcctactcggaagaagtgtgcaggtgtgttccttcatactggaaacgccctcagatgatgtcc

SEQ ID NO: 155934 - DNA, 1260 bp, Artificial Sequence
  derived and/or modified sequence
atgcacctgctgggattcttttccgtagcctgttcactactggcagccgcgctactgccaggacccagagaagcacccgccgcggccgctgcctttgaatctggactggacctgtcggatgccgagccagacgccggcgaagccacagcttacgcatccaaggatctcgaggagcaacttaggtccgtaagctccgttgacgaactaatgaccgtgctctaccccgagtactggaaaatgtataaatgccagctccgaaagggggggtggcagcacaacagggaacaagctaacctgaacagcaggacagaggagactatcaagtttgcggccgctcattataatactgagattcttaagagcattgataacgaatggcgcaagacgcagtgcatgccacgggaggtgtgcatcgacgtgggcaaggagtttggcgtcgccacaaatactttttttaagccaccgtgtgttagcgtgtatcgatgtggcggctgttgcaattcagaagggctccagtgtatgaatacaagcacgtcttacctcagcaaaacactcttcgaaatcaccgttcccctgtctcagggccccaagcctgtcacgatttcctttgcaaatcacacaagctgtaggtgcatgtcaaaattggatgtgtatcgccaagtccacagcattatcagaagatctctaccagcaacactgcctcaatgccaggcggctaataagacctgtccaactaactacatgtggaacaatcatatctgtcggtgtctggctcaggaggatttcatgtttagttccgacgctggagacgacagcacggacggcttccacgacatctgtgggcctaacaaagaactggatgaagagacatgccaatgtgtatgtcgggctggcctgcgtcccgcatcgtgtggcccacacaaggagcttgataggaattcctgccagtgcgtttgtaaaaacaaactcttcccgtctcaatgtggtgctaaccgtgaatttgacgagaacacttgtcagtgcgtgtgcaagcggacgtgtccaaggaatcagcccctgaatcccggtaagtgcgcctgcgagtgcacagagagccctcagaagtgtctactcaaggggaagaaattccatcaccagacatgttcctgctatcgccgcccatgcactaacagacaaaaggcttgcgaacccgggttttcgtatagcgaggaggtctgtcgctgtgttccatcttattggaaaagaccacaaatgatgtcc

SEQ ID NO: 155935 - DNA, 1260 bp, Artificial Sequence
  derived and/or modified sequence
atgcatctgctaggattcttcagcgtcgcctgtagcctactggccgcggctctcctgcccggaccccgggaagctcccgccgccgcagctgctttcgagtctggcctagacctgagcgatgccgaacccgacgctggcgaagcaacggcctatgcttctaaagatcttgaagagcaacttcgctctgtgagtagcgtggatgagttgatgaccgtgttgtaccctgaatactggaagatgtataaatgccaactgaggaagggaggttggcaacacaaccgggaacaggccaacctcaactctagaacagaggagaccataaagtttgccgctgcacattacaacactgagattctgaagtccatagacaacgaatggagaaaaacacagtgcatgccgcgggaggtgtgtattgatgtgggtaaagagttcggggtggccaccaacactttttttaaaccaccgtgtgtttctgtgtaccgttgcggagggtgctgcaatagcgagggtctgcagtgcatgaacacctcaacttcctatctttccaaaacgctcttcgagatcaccgtcccactatcgcagggtccaaaacccgtgacgatatccttcgctaatcacacttcttgccgatgcatgtccaagctggatgtttaccggcaggtgcacagtatcataaggaggtcattgcccgctactctccctcagtgtcaagccgcgaataagacgtgcccgaccaactacatgtggaacaaccacatttgcagatgcttggcccaggaggatttcatgttttcctcagacgcaggcgatgattccacagacggcttccacgacatttgtggcccgaataaagagctcgacgaagagacatgtcagtgcgtttgtcgagccggcctgcgacccgcaagttgcggtccacacaaggagttagaccggaactcttgccagtgcgtatgcaaaaataaactctttccatcacagtgcggggccaatagggagtttgatgaaaacacgtgccagtgtgtctgtaagcgtacgtgcccacgaaatcaacctctgaacccaggcaagtgcgcctgcgaatgtaccgagagcccccagaagtgtctattgaagggtaaaaaattccaccatcagacatgttcctgttaccgcaggccatgtaccaaccgccagaaggcctgcgagccagggtttagttactcagaagaagtgtgtagatgtgtgccttcttattggaagcggccacaaatgatgagc

SEQ ID NO: 155936 - DNA, 1260 bp, Artificial Sequence
  derived and/or modified sequence
atgcatctgctgggattcttctcagtcgcatgttcactcctcgctgccgctctactacctgggccacgcgaagcaccagccgctgccgccgcattcgagagtggtctcgacttgtccgacgccgagcctgatgctggagaagctaccgcttacgctagtaaggacttggaagaacaactgcgatctgtgtcatccgtagacgagttgatgacggttctgtacccagaatactggaagatgtacaagtgccagcttcgaaaagggggatggcagcacaacagagagcaggcaaatttgaattcaagaactgaggagaccattaagtttgcagccgctcactataatacggaaatccttaagtccatcgacaacgaatggcgtaagactcagtgtatgccccgcgaggtatgcattgatgtgggcaaagagtttggcgtcgccacaaacactttttttaaacccccctgcgtgagcgtgtaccggtgcgggggatgttgtaactcagagggattacagtgcatgaacacttccacttcctatttgtccaaaactctcttcgagataacagtgcctctcagtcaggggccaaaacccgtcaccatctccttcgctaaccatacttcttgcaggtgtatgtctaaattagacgtgtaccgacaggtccactccatcatcaggagatctctacctgccaccctgccccagtgccaggcagctaacaagacttgtcccacaaattacatgtggaacaatcacatatgcagatgtctggctcaggaagattttatgttctcgtccgacgctggagatgactccaccgacggttttcatgacatatgcgggcctaataaagagcttgacgaggagacatgtcagtgcgtttgcagggccggtttaagacctgctagttgtggtccccacaaggagcttgacaggaattcttgtcagtgcgtgtgcaaaaacaagctgttcccctcccagtgtggtgccaaccgggagttcgatgaaaatacatgccagtgtgtttgtaagaggacgtgcccaagaaaccagcccctaaaccccggaaagtgcgcatgcgagtgcacagaatctccccagaagtgtttattgaaaggtaagaagttccaccatcagacctgcagctgctaccgcagaccctgcacaaatcgccaaaaggcctgtgaaccggggttcagttactcagaagaggtgtgcagatgcgtcccgtcttactggaagcggccacagatgatgagc

SEQ ID NO: 155937 - DNA, 1260 bp, Artificial Sequence
  derived and/or modified sequence
atgcacctactaggtttctttagcgtggcatgcagcctcctcgccgccgccctccttcccgggcctcgggaagctcccgccgcggccgccgccttcgaatccggactcgatctgagcgatgccgaacctgacgccggcgaggctactgcctatgcttccaaggacttagaggaacagctcaggtccgtttcctccgtcgacgaacttatgacggtgctgtaccccgagtattggaaaatgtataaatgccagctgagaaaaggtgggtggcagcataaccgagagcaagctaatctgaattctcgcaccgaggaaacaataaaatttgcggccgcccattacaatacggagatactgaagtcaatcgacaacgagtggcgtaaaacgcaatgcatgccccgcgaggtgtgtatagatgttggtaaagagtttggcgttgctactaacaccttcttcaaaccaccctgcgtgtccgtgtataggtgtggcgggtgttgtaacagcgaggggctgcagtgtatgaatactagtactagttatcttagcaagacactctttgagataactgtacccttgtctcaggggccgaaacctgtaacaatctcatttgctaaccacacctcatgccggtgcatgagcaagctggacgtgtaccgccaggtgcactcaatcattaggcggagtctgccagccacacttccacaatgccaggccgcaaacaaaacctgtcccaccaattatatgtggaataatcacatatgccgatgcctggcgcaggaagactttatgttcagctcagatgcaggcgacgactcgaccgatggctttcacgacatatgcgggcctaacaaggagttagacgaggagacctgccagtgcgtatgcagggcgggcctcagaccagcttcctgcggccctcataaggaactggacagaaactcctgccagtgcgtgtgcaaaaataagctctttccgtcacagtgtggcgcaaaccgagaattcgacgaaaacacttgccagtgtgtgtgcaagaggacttgcccccgcaatcagccactgaaccctggcaaatgtgcctgtgagtgtacagagtcacctcagaagtgtttgctcaagggaaaaaaatttcaccatcaaacttgttcttgctacagaagaccttgtaccaatcgccagaaggcctgtgaacctggctttagctactccgaagaggtgtgtaggtgcgtgcccagttactggaaaagaccccagatgatgagc

SEQ ID NO: 155938 - DNA, 1260 bp, Artificial Sequence
  derived and/or modified sequence
atgcacctgctggggttcttttccgtggcatgcagcctcctggcagccgctttgcttcctggaccacgcgaggcgccagcggctgcggcagcgtttgaaagtggtttggacttgtcggatgcagaaccagatgccggggaggccaccgcgtatgcatcgaaggatctggaagagcaactgaggtcggtgtcgagcgtggacgaactgatgactgtgctttaccctgaatactggaagatgtacaagtgccagctcagaaagggcggctggcaacataaccgcgagcaggctaaccttaactcacgcactgaggaaactattaagttcgctgcagcacactacaatactgaaattcttaaaagtatagataacgaatggcgtaagacccaatgcatgcctcgtgaagtttgcatcgatgtgggcaaggagttcggagtggcaactaatacgttctttaagccaccgtgtgttagcgtgtacagatgtgggggttgttgcaattcagagggcctgcaatgcatgaacacttcgacctcctacctctcgaaaacccttttcgaaattaccgtcccactgtctcaaggtccgaagcccgtgacgatatcctttgcaaatcatacctcgtgtcgatgtatgtccaagctcgacgtctacaggcaagtccattccatcattagacgctcgctccctgcaacgcttccacaatgtcaggcagccaacaaaacttgcccaaccaactacatgtggaataatcacatttgcaggtgtcttgcccaagaagatttcatgttttcatcagatgcgggcgatgatagcacggacggttttcacgatatctgtggacctaacaaggagctggacgaagaaacttgtcagtgtgtatgtcgcgcgggacttcgaccggcttcctgcgggcctcataaggagctggatcggaatagttgtcaatgcgtgtgtaagaacaaacttttcccgagccagtgcggagccaaccgggagttcgacgagaacacctgccagtgtgtctgcaagagaacttgccccaggaatcagccactcaatcctggtaagtgtgcatgtgaatgtactgaatctcctcagaaatgcctccttaaaggaaaaaagtttcatcatcagacctgctcgtgctacagacgtccttgtactaaccgacagaaggcgtgtgagcctggattttcctatagcgaagaagtctgtcggtgtgtgccctcctactggaaaaggccccaaatgatgtca

SEQ ID NO: 155939 - DNA, 1260 bp, Artificial Sequence
  derived and/or modified sequence
atgcacctgctgggcttcttctctgtggcctgctcactgctggcggctgctttactacccggacctcgcgaggctccggccgcagcggccgcgttcgagtcgggactcgacctgtccgacgctgaaccggacgctggtgaggctaccgcatatgcttcgaaagacttagaagagcagctgcggtctgttagtagtgtggatgagttaatgacagtgttatacccagagtactggaaaatgtacaagtgtcagctccggaaaggtggatggcaacacaacagagagcaggcgaatttaaatagccggaccgaggaaacgatcaaattcgctgccgcgcactacaataccgaaatactcaagtccattgacaacgagtggcgcaaaacgcaatgcatgcctcgcgaagtctgcatcgacgtgggcaaagagttcggagtcgcaactaacacctttttcaagccaccttgcgtcagcgtgtacaggtgcgggggatgttgtaactctgagggtctccaatgcatgaatacctctacgagttacctgtccaagacactctttgagatcaccgtccctttaagtcaaggcccaaagccagtcacgatctccttcgctaaccacacctcgtgccgatgcatgagtaagctcgatgtgtaccgccaggtgcacagtataatcaggcggtcgctgcctgccactcttccacaatgccaagcagccaacaagacatgccctaccaattacatgtggaataatcacatctgcaggtgcctcgcgcaagaggattttatgttctcttctgatgccggtgacgattctaccgacggtttccatgatatttgcggtcccaacaaagaacttgacgaggaaacatgtcagtgcgtgtgcagggccggcctacgccccgcttcttgcggtccacataaggaactggatcggaattcctgtcagtgtgtgtgcaaaaataagctgtttcccagtcagtgcggtgctaaccgcgagttcgacgaaaacacctgccagtgtgtctgtaagaggacctgcccccggaatcaaccactgaaccctggtaagtgtgcctgtgagtgcacagaaagcccccagaagtgcctgctgaagggaaagaaattccaccatcagacatgctcctgctaccgccgaccctgtaccaaccgacagaaggcttgtgaacccgggtttagttactccgaggaagtttgcaggtgtgtaccctcatactggaagcggccccagatgatgagc

SEQ ID NO: 155940 - DNA, 1260 bp, Artificial Sequence
  derived and/or modified sequence
atgcacctgttaggcttcttttctgtcgcgtgtagtcttttggcggctgcactcctgcctgggccccgggaggctcccgctgcagccgcagcgtttgagtcgggcttggacctttccgacgctgaacctgatgctggggaagccacagcttacgcgtccaaggatctggaagagcagctgcggtctgtgtcttcggttgatgagcttatgaccgttttgtaccctgagtactggaagatgtacaagtgtcaattaagaaaggggggctggcaacacaaccgggaacaggcaaatctcaattcgcgtaccgaggaaaccatcaagtttgctgccgcacattacaacacggagatcctgaagagtattgacaatgaatggcgaaagacacagtgcatgcccagagaagtgtgcatagacgtcgggaaggagtttggagtggcaaccaacactttttttaaaccaccatgcgtaagtgtttaccgctgcggcggatgctgtaattccgaaggcctccaatgtatgaatacctctacatcttacctttccaagaccctctttgagatcaccgtgccacttagccaaggccctaagccggtgacgatatccttcgccaatcacacctcttgccgctgtatgtctaagcttgacgtgtatcgccaggtgcactctattattcgccgcagtttaccagccacactaccacagtgtcaggcggccaacaaaacgtgccctaccaactacatgtggaataatcacatctgccggtgtctcgcccaagaagacttcatgttctcttcagacgccggtgacgactctactgacgggtttcacgatatctgcggacccaacaaggagctcgacgaggaaacctgtcagtgcgtttgtcgggccgggcttcgtccagccagctgtggcccacataaagaattggaccggaatagttgtcagtgcgtctgcaaaaataagctcttcccttcacagtgtggagcaaaccgtgaatttgacgagaatacgtgccaatgcgtgtgcaaacgtacttgcccaagaaaccagcccctgaacccaggaaaatgtgcgtgcgagtgtacagagagcccccagaagtgtttgttaaaggggaaaaagtttcaccaccagacctgctcttgttataggcggccatgcaccaatcgtcaaaaggcctgcgagcccggctttagctactccgaggaggtgtgccggtgcgtgcctagctactggaaacgaccacagatgatgagc

SEQ ID NO: 155941 - DNA, 1260 bp, Artificial Sequence
  derived and/or modified sequence
atgcacctactgggattcttttccgtggcttgttctttgctggctgccgccttgctccctggacctcgggaagcgccagcagctgcggctgcatttgagagcggtctggacttaagtgacgccgagccggatgcaggagaagccacagcttacgcctctaaggatttggaggaacaattgagaagcgtatcatctgtcgatgagcttatgaccgttctttaccccgagtactggaagatgtataagtgccaacttcgcaaggggggttggcagcacaatcgggaacaggcaaatctgaactctcgcacagaagagacaataaagttcgctgccgcacattacaacactgagattctgaaaagtatagataacgagtggcgaaagactcagtgcatgccaagagaggtctgcattgacgtgggaaaggagttcggggttgctaccaacacattttttaagcctccctgcgtgagcgtgtatcgctgtggaggatgttgtaacagcgaaggtcttcagtgtatgaacacaagcaccagctatttgtcgaagaccctatttgagataacggtgccactatcccaggggcctaagcccgtgaccataagttttgcaaaccacaccagctgtagatgtatgtctaagctggatgtatacaggcaagtacatagtatcatccgaaggtctctgcctgccaccttgccccagtgccaagcagctaataagacctgccccaccaattacatgtggaacaaccacatttgtagatgcttggcacaggaagactttatgttttcctctgatgcaggggatgattccacagacggcttccacgatatctgtggccctaacaaagaacttgatgaagagacttgtcagtgcgtttgcagagccggccttaggcccgcatcctgtggcccgcataaagagctggacagaaacagctgtcagtgtgtgtgtaagaataaattgtttccgtctcagtgtggggctaatcgagaattcgacgagaacacgtgccagtgcgtgtgcaaaaggacttgtccaagaaatcaacctctgaaccctgggaaatgtgcttgcgagtgtacagaatccccccagaagtgccttctgaaaggaaagaagtttcatcaccaaacttgtagctgttatcggcggccctgcaccaatcggcagaaggcctgcgagcctgggttctcatatagtgaggaagtatgcaggtgtgtcccttcttactggaagcggccccagatgatgagt

SEQ ID NO: 155942 - DNA, 1260 bp, Artificial Sequence
  derived and/or modified sequence
atgcatttgctgggctttttttccgttgcctgttcgctgctcgcagctgccctgctgccaggcccgcgggaagcaccagctgccgccgctgcttttgagtccggcttggacctttctgacgccgaaccagacgctggcgaagctacggcttacgcctctaaagatctggaagaacagctgcggtcagtgtctagtgttgacgagctcatgactgttctctacccagaatactggaaaatgtacaaatgccaattgagaaagggcggatggcagcataatagggagcaggccaacttaaactcaagaactgaagaaactataaagttcgccgctgcccattacaacactgaaattctaaaatccatcgacaacgaatggaggaaaacccagtgcatgcccagagaggtttgtattgatgtgggtaaagaattcggtgtcgctacaaatacatttttcaaacccccgtgtgtatcagtgtatagatgcggcggctgctgtaactcagagggcttgcagtgtatgaatacgagtaccagctacctgtccaagactctgttcgaaatcacagtacctctgtctcaagggccgaaacccgtcacgatcagctttgctaaccacactagctgccgttgtatgagtaagctcgatgtgtacaggcaggtacactccatcattcggcggagcctgcctgcgaccctgccccagtgccaggcggcaaataagacttgccccacaaattacatgtggaataaccacatatgcagatgcctggcacaggaagacttcatgttcagctctgatgctggggatgattccacagatgggtttcatgatatatgcgggccaaataaggagctcgatgaagagacgtgtcagtgcgtttgtcgagcgggtctgcgccctgcctcttgtggcccgcataaggagctggatcgcaactcttgccagtgtgtttgcaagaataaactgttccccagtcagtgtggcgctaatcgggagtttgacgaaaatacatgccaatgcgtgtgtaaacgtacctgccctagaaatcagccactgaaccccggtaagtgtgcttgcgagtgtaccgagagtccacaaaaatgcttgctaaaaggcaagaagtttcaccaccagacttgttcatgctacaggaggccctgcacgaataggcagaaggcctgcgagcctggcttttcttactccgaagaggtgtgtcgatgcgttcccagttactggaaacgaccacaaatgatgagc

SEQ ID NO: 155943 - DNA, 1260 bp, Artificial Sequence
  derived and/or modified sequence
atgcacttgctgggcttctttagcgtcgcctgctctctgctcgcagcagccctactgcctggtcccagagaggccccagctgcagcagccgcctttgagagcggactggatttatctgacgcggaaccagacgctggcgaagcaacagcctacgccagcaaagacctggaggaacaactgagatcagtctctagtgtcgacgaactcatgaccgtgttgtaccccgagtattggaagatgtataaatgccagctgaggaaaggcggctggcaacacaaccgagaacaagcgaatttgaatagccgtacagaggaaaccattaagtttgccgctgcgcactacaatactgagatcctcaagtctattgacaacgaatggcggaaaacccagtgtatgcctcgcgaggtctgtattgacgtcgggaaggagttcggtgtcgcaacaaatactttctttaaacccccctgtgtgtccgtttatcgctgtggaggatgctgcaactcggagggactgcagtgtatgaacacctctacttcctacctgagtaaaacactatttgagataactgtgccactctctcagggacccaaacctgtgaccatatctttcgctaatcatactagctgcaggtgtatgtctaagttagacgtgtatcggcaggtccactcaatcatcaggcgctctctgcccgcgacacttccccagtgccaggcagcaaacaaaacctgtcccaccaactacatgtggaacaaccatatatgcagatgcttggcccaagaggacttcatgttcagtagtgacgccggcgatgactcgaccgacgggttccatgatatctgcggcccaaataaggaattggacgaggagacatgccagtgtgtctgccgtgctggactgcgtccggcctcctgtggccctcataaggaacttgaccgaaatagctgccagtgcgtgtgtaagaacaaactgttcccttctcagtgcggggccaatagggagtttgatgaaaacacctgccagtgtgtctgtaagaggacatgtcccaggaatcagcctttgaatccaggaaaatgtgcctgcgagtgcacagagtcgccccagaagtgcctgcttaagggaaaaaaatttcaccatcagacttgctcgtgttatagaaggccgtgtactaaccggcagaaggcctgtgagcccggcttcagctacagtgaagaggtgtgcaggtgtgtgcccagctactggaagaggccacagatgatgtct

SEQ ID NO: 155944 - DNA, 1260 bp, Artificial Sequence
  derived and/or modified sequence
atgcatctcttgggattcttcagcgtggcatgctcactgctggcggctgccttgctgccagggccgagagaagcgcccgcggctgcagctgcattcgagtcgggtctggacctgtccgacgccgagccagatgctggagaggcaaccgcatatgcttccaaggatctggaggagcaactgcggagcgtgagctcagttgatgaactcatgaccgtcctgtacccggaatactggaagatgtacaaatgccagctgcggaaagggggatggcagcacaaccgcgagcaagccaatctgaactcgcgcactgaagaaaccatcaagttcgctgctgcccactacaatactgagatcctgaagtcaatcgacaacgaatggcggaaaacccagtgtatgccgcgtgaagtgtgtatcgatgtggggaaggagttcggagtggctaccaacaccttctttaagcctccctgcgtgagcgtgtaccgctgtggcggatgctgtaactcggaggggctccagtgtatgaataccagcacttcctacttgtctaagaccttgttcgagatcacggtgccactttctcaaggaccaaaaccggtcaccatctcctttgcaaaccacacttcgtgccggtgtatgagcaaattggacgtgtaccggcaggtgcactcgattattcgccggtccctccctgccaccctgccacaatgccaggcagcgaataagacctgccctactaactacatgtggaacaatcatatctgccgctgtttggcccaagaagatttcatgttttcatcggatgcgggcgacgactcgactgatggattccatgacatctgcgggccgaacaaggaactcgatgaagaaacttgccagtgtgtgtgccgggcgggtctgcgcccagcgtcgtgcggtccccataaagaactggatcgcaattcctgccaatgcgtctgcaagaataagctcttcccctcgcagtgtggagcgaacagagaatttgacgagaatacgtgccagtgcgtttgcaaaaggacctgccccaggaatcagccgctgaacccaggaaagtgcgcgtgtgaatgcactgaatcccctcagaagtgtctgcttaagggaaagaagttccaccatcagacctgcagctgctatcgccggccgtgcactaaccgacaaaaagcgtgcgagccagggtttagctactcagaggaagtctgccgctgcgtgccatcatactggaaacggccgcagatgatgtcc

SEQ ID NO: 155945 - DNA, 1260 bp, Artificial Sequence
  derived and/or modified sequence
atgcacctgctgggattcttctccgtcgcatgctcgctgcttgctgcggccctgctgccggggcctcgggaagcaccagcggcggcggcggccttcgagagcgggctcgatctgtcggatgcagagccggacgccggagaagcaactgcctacgcgtcgaaagacctggaggagcagctccggtccgtgtcctccgtcgacgaactgatgaccgtgttgtacccagaatactggaagatgtataagtgccagctccggaagggaggatggcagcataaccgggaacaggccaacctgaactcccggacggaagagacgatcaaatttgccgctgcgcattacaatacggagatccttaagagcattgacaatgagtggcgcaagacgcaatgcatgccacgggaggtgtgcatcgacgtgggaaaggaattcggagtggcgaccaacactttcttcaaacccccgtgcgtgtccgtgtatcgctgcgggggatgctgtaactcggaaggcctgcagtgcatgaacacttcaactagctacctgtcaaagactcttttcgagatcaccgtgccgcttagccaagggccgaaaccagtcactatctcatttgctaaccatacttcctgccggtgtatgtcgaagctggacgtgtaccgtcaagttcactccatcatccgcagaagcctgccagcaactctccctcagtgtcaggccgccaacaagacctgcccgaccaactacatgtggaataatcacatctgccgctgtttggcccaggaggacttcatgttctcgtcagatgctggtgatgattcgaccgacggattccatgacatctgtggcccgaataaggagttggacgaggagacttgtcagtgcgtctgcagagccggcctgcgccctgcaagctgtggaccgcacaaggaattggatcgaaactcatgccagtgcgtctgtaaaaacaaactgtttccgtcccagtgtggagcaaaccgagagttcgatgaaaatacctgtcagtgtgtgtgtaagcggacctgcccgcgaaaccaacctctcaacccaggaaagtgcgcgtgcgagtgcaccgaatcgccgcagaaatgtctgctgaaaggaaagaagttccaccaccagacgtgctcttgctacagacggccctgcactaaccgccaaaaagcctgcgaaccaggattttcgtactccgaagaagtgtgccgctgcgtgccttcctactggaaacggccgcaaatgatgagc

SEQ ID NO: 155946 - DNA, 1260 bp, Artificial Sequence
  derived and/or modified sequence
atgcatcttctcggctttttctcagtggcatgctcgcttctggccgcagcactgcttccaggtcctcgggaggcacctgccgcggctgctgcgtttgaatccggactggatctctccgatgcagaaccagacgcaggtgaagccaccgcatacgcctcgaaggaccttgaagaacagctccgttcggtgtccagcgtcgatgagctgatgactgtgctctaccccgagtactggaagatgtataagtgccaacttagaaagggaggatggcaacataatcgcgaacaggcaaatctcaatagccgcacggaagagacgattaagttcgccgccgcacattacaatactgaaattctgaagtcgattgataacgaatggcggaaaacccagtgcatgcctagagaggtctgtattgatgtgggaaaggaatttggggtggccaccaacactttcttcaagcctccctgtgtctccgtgtaccgttgcggggggtgctgcaactcggaaggactgcagtgcatgaacacttcgacttcgtacttgagcaagactctttttgaaatcacggtcccattgtcgcaaggtccaaaaccagtgaccatcagcttcgcaaatcatacgtcgtgcagatgtatgtcaaagctcgacgtgtaccggcaagtgcattcgattattcgtcgttcactccctgcaactctgccccagtgccaggcagcgaacaagacctgtcccactaattacatgtggaacaaccatatctgcaggtgccttgcacaggaagatttcatgttttcgagtgatgcgggtgacgactcgaccgacggctttcacgatatctgtggccccaacaaggaactggacgaggaaacctgtcagtgtgtctgccgtgcaggacttcggcctgcctcctgtgggccacacaaggaacttgaccggaattcgtgccagtgtgtttgtaagaacaaactttttccgtctcaatgtggtgcaaacagggaatttgatgagaacacctgtcaatgcgtgtgtaagcggacctgtccacgcaaccagcctcttaaccctggtaagtgcgcgtgtgaatgtaccgaatctccccagaagtgcctgctgaaggggaaaaagttccaccaccaaacctgttcctgttaccggcgcccttgcaccaacaggcaaaaagcatgtgaaccgggattttcgtactcggaagaagtctgccgatgcgtgccttcatactggaagcgaccacagatgatgagc

SEQ ID NO: 155947 - DNA, 1260 bp, Artificial Sequence
  derived and/or modified sequence
atgcatcttctgggatttttttctgtggcatgctctcttctggccgctgccctgctgccgggacccagagaggcccccgccgccgctgccgcatttgagtctggcctcgatctgtctgatgccgagccagatgctggcgaagctacagcctacgcctctaaggaccttgaagaacaactgaggagtgtatcaagtgtggacgagctgatgactgtcctttatcctgagtactggaagatgtacaagtgtcaactccgcaagggggggtggcaacacaaccgcgaacaagccaacttgaacagtcggaccgaggagacaatcaaattcgctgccgctcactacaacaccgagattctcaaatctatcgacaatgagtggagaaagacccagtgcatgcccagagaggtttgcatcgacgtaggaaaggaatttggcgtggccactaacactttctttaaaccaccttgcgtgtcagtttaccggtgcgggggttgctgcaatagcgaggggctgcagtgcatgaacacgtcaaccagttacctgtccaagactcttttcgagattactgtccccctgtcccagggccccaaacctgtaactatcagcttcgccaatcacacatcctgccgctgcatgtcaaaactcgacgtgtaccgccaggtgcacagcataattaggagatctctgcctgccaccctgcctcagtgtcaggctgccaataaaacctgcccgacaaattatatgtggaacaatcacatctgcaggtgtctcgcccaggaggattttatgttctcttctgatgccggggacgactctacagatggcttccacgatatctgcgggcctaacaaggaactggatgaagagacatgtcaatgtgtctgccgcgctggcctgagaccagcgtcctgtggtcctcacaaggaactggatcggaattcctgccagtgtgtgtgcaagaacaaactgtttcccagtcagtgcggagcgaacagggaatttgacgaaaacacatgccagtgcgtctgtaagcggacgtgcccacgcaaccagcccttgaatcccggaaagtgtgcatgcgagtgcaccgaatccccacaaaaatgtcttctcaagggcaagaaatttcatcatcagacatgcagctgctatcggcgaccttgtacaaacagacaaaaggcttgtgagcccgggttctcatactccgaggaggtgtgcagatgtgtgcccagctactggaagaggccgcagatgatgagt

SEQ ID NO: 155948 - DNA, 1260 bp, Artificial Sequence
  derived and/or modified sequence
atgcacctactaggctttttttctgtggcctgctccttgcttgccgcagccctgcttccaggcccacgcgaggcgcccgccgccgcagccgcattcgaatcgggactggatttgagcgacgccgaacccgacgcaggtgaagccacggcgtacgcttctaaggacctcgaggagcagctccgaagtgtgtcgtctgtggatgagctcatgaccgttctatacccagaatattggaagatgtataagtgccaactgcggaagggaggctggcagcacaacagagaacaagcaaatttgaacagtcgtacagaggagacgatcaagttcgccgccgcccactacaacaccgagattttgaaatccatcgataacgaatggcgcaagactcagtgtatgccacgcgaggtgtgcattgatgtcggcaaagagtttggtgtggccacaaacactttcttcaagccaccgtgtgtctccgtgtatcgctgcggcggctgctgcaatagcgagggactacagtgcatgaacacgagcacaagttacctgtcgaagacactgtttgagatcacggtcccgttaagtcagggacctaagccggttacaatcagtttcgccaaccacacctcatgtagatgcatgagtaagctggacgtgtacagacaggtccattcgattatccgccgttcacttcccgcgacgttgccacagtgccaagcggccaacaagacctgtccgaccaattacatgtggaacaaccatatctgccggtgcctggctcaggaagatttcatgttttcctccgacgcgggcgatgactcaaccgatggatttcatgatatctgcggcccaaataaggagctagatgaggagacatgccagtgtgtttgcagggccggcctccgtcccgctagctgcggacctcataaggaacttgaccgtaattcctgtcagtgtgtatgcaagaacaagttgtttcccagccagtgcggcgccaatcgtgaatttgatgagaacacctgtcagtgcgtatgcaagcgcacttgcccacgtaaccagcctctgaatcccgggaagtgtgcgtgcgagtgcaccgaatcaccccagaagtgcttgctgaagggcaagaagttccaccaccagacgtgctcctgctaccgtcgtccgtgcactaaccgccagaaagcctgcgagccgggtttcagttactctgaggaagtatgccggtgcgtcccctcgtactggaagcgcccccagatgatgagt

SEQ ID NO: 155949 - DNA, 1260 bp, Artificial Sequence
  derived and/or modified sequence
atgcatcttttgggattctttagcgtcgcatgtagcctgttggcagctgcactcctgcccggaccccgggaggcccccgccgcagccgcagcctttgaaagtgggctagatttatcggatgcggagcctgatgcaggagaggccaccgcctatgcttctaaagatctcgaggaacagcttcggtctgtgtctagtgtggatgagcttatgacagtgctgtacccagagtactggaaaatgtacaaatgtcaattgcggaaggggggatggcagcataacagagagcaggcgaatttgaactccagaactgaagaaacaattaaattcgctgcggcgcattacaataccgagatccttaagtctattgacaacgagtggaggaagacccagtgcatgcccagggaagtgtgcattgatgtcggcaaagaattcggagtcgctactaataccttttttaaacccccatgcgtgtcagtgtatcgctgtggcgggtgctgtaacagcgagggactgcagtgtatgaacacatctacctcctaccttagcaagaccttgttcgaaatcacagtaccgcttagtcagggcccaaaaccagtgactatcagtttcgcgaaccatacttcttgtcgctgcatgtccaagcttgacgtgtaccgccaggtccactccatcattcggaggagccttcctgctacactgccccagtgccaggcggcaaataagacatgccccacaaattacatgtggaacaatcatatatgccgatgtctcgctcaggaggactttatgttcagctcagacgctggcgatgatagcacagacggattccacgatatctgcgggccaaataaggagctggatgaggagacctgtcagtgtgtgtgtagagcaggcctgcgccctgcctcctgtggcccccataaagagctagatagaaactcttgccagtgtgtgtgtaagaacaagttgttcccctctcagtgtggcgccaaccgggagtttgatgagaacacttgccagtgtgtgtgtaagcgcacctgccctcggaaccagcctctgaaccctggaaaatgcgcttgtgaatgcaccgagtcgccacaaaagtgcttgctgaaaggaaaaaaattccatcaccagacatgctcgtgctacagacggccttgtacgaatcgacagaaggcttgcgagccggggttcagctactctgaggaagtgtgtaggtgcgtgccgtcatactggaaacggcctcaaatgatgtct

SEQ ID NO: 155950 - DNA, 1260 bp, Artificial Sequence
  derived and/or modified sequence
atgcacttgttgggttttttctcagtcgcctgctcgttgctggcagctgctctactccccggccctagagaggccccagccgctgccgccgcattcgaaagtggactcgatctgtcagacgcagaacctgatgccggagaggcgactgcatacgcatcaaaagacctcgaagaacagttgaggtccgtttcatctgtggatgagttgatgactgttttataccccgagtactggaagatgtacaaatgccagttgaggaaagggggatggcagcataaccgtgagcaggccaacttgaattcgaggacagaagagactatcaaattcgctgccgctcattataatactgaaattcttaagagtattgataacgaatggagaaaaacccaatgcatgccgagggaggtttgcatcgacgttggtaaagaatttggtgttgccactaatacgttcttcaagccaccatgtgtgtccgtttatcgatgcggggggtgttgtaactccgaaggattacagtgtatgaatacctctacatcatatctgtctaagacgctatttgaaatcaccgtaccattaagccaaggtcctaagccagttactatcagctttgcaaaccacacaagttgtcgctgtatgagtaaattggacgtctataggcaagtacattccattattcggaggagtttacccgcaaccttgcctcaatgccaagcggcaaataaaacctgtccaacgaactatatgtggaataatcacatttgtcgatgcttagcccaagaagactttatgttctcatctgacgccggggacgatagtaccgatgggttccacgatatctgcggaccaaacaaggagttggatgaagagacctgtcaatgtgtttgtagagctggtctcagacctgccagttgcggtcctcataaggaattggatcgcaattcatgtcaatgcgtgtgcaaaaacaagctctttccttcacaatgtggggcaaacagggagttcgatgaaaatacctgccaatgcgtgtgcaaaaggacctgtccgaggaaccagccactaaatcccggtaagtgcgcttgtgagtgcactgaaagcccgcaaaagtgtctacttaaaggcaaaaagttccatcaccaaacctgctcatgctacaggagaccatgtacgaaccgacaaaaggcatgcgagcctggcttttcctattcagaagaggtttgtcgctgtgtgccatcctactggaagagaccacaaatgatgtct

SEQ ID NO: 155951 - DNA, 1260 bp, Artificial Sequence
  derived and/or modified sequence
atgcatctgttgggcttcttctccgtggcatgttcattgctggccgcggctctgcttcctgggccaagagaggcccccgctgccgctgcggcattcgaaagcggtcttgacttgagcgacgccgagccagatgccggggaagctacggcttacgcttccaaggacttagaagagcagctaaggtcggtctcctcggttgacgagttgatgacggtactatacccagaatattggaaaatgtacaaatgtcagctccggaagggcggatggcagcacaaccgcgagcaggccaatctgaactcacgaacagaggaaactattaaatttgctgccgctcactataacacagaaatcttgaagtccattgataacgagtggagaaaaacccagtgtatgcctcgtgaggtttgcattgacgttggcaaagagttcggagtggctaccaacaccttcttcaaacctccctgcgtgagtgtgtaccgatgtggggggtgctgtaactccgagggcctgcagtgtatgaatacatctacaagctacctgagtaaaacactatttgaaattaccgtccccttgtcccagggcccgaagccggtgacaattagctttgcaaatcatacatcctgtcggtgcatgtccaaattggacgtctataggcaggttcactccatcatcaggcggtctctgccagccactttaccacagtgccaagcagccaataaaacatgcccaactaactacatgtggaacaatcatatttgcagatgtttggcccaggaggactttatgttttcatccgatgcgggcgatgattccactgatggctttcacgatatttgcggacctaacaaggagctggacgaggaaacatgtcaatgtgtctgtagggcaggcttgcgccccgcgtcctgcggtccacacaaggagctagacaggaatagttgccaatgcgtgtgtaaaaataaactgttcccaagtcagtgcggagccaacagggaattcgacgagaacacatgccaatgcgtatgtaaaaggacctgcccaaggaaccagcctctgaaccccgggaagtgtgcctgtgagtgtaccgagtctccgcagaagtgtttgctgaaaggaaaaaagttccaccaccagacttgtagctgctaccggcgcccttgcaccaatcggcaaaaggcttgtgaacccgggttcagttatagcgaggaggtttgtagatgcgtgccgtcctattggaagaggcctcagatgatgtct

SEQ ID NO: 155952 - DNA, 1260 bp, Artificial Sequence
  derived and/or modified sequence
atgcacctcctcggattcttttcggtcgcttgctccctccttgcagccgcgcttcttccggggcctagagaagcaccagccgccgcagccgcttttgagtcaggacttgatctcagcgacgctgaacctgacgcgggggaagccactgcatacgcatccaaggacctcgaagaacaactcaggtccgtgtcaagcgtggatgaacttatgactgtgttgtacccggagtactggaagatgtacaaatgccaactccgcaagggcggatggcagcacaatcgggagcaggcaaacctgaactcgcgtacggaagaaaccatcaagtttgctgcagcgcattacaataccgagattctgaagagcatagacaacgaatggcgtaaaacccagtgtatgccgcgtgaggtctgtattgacgtgggaaaggaatttggggtggcaactaatactttctttaagccgccctgcgtgtctgtgtaccggtgtggaggctgttgcaactcagaaggtttgcaatgtatgaacacctccacctcatacctgtcgaaaactctctttgaaatcactgtccccctgtcgcaaggtcccaagcctgttaccatctccttcgctaatcatacttcctgtcgttgtatgtcgaagttggacgtgtaccggcaggttcactcgattattcgtcgctcgctgccagcaactcttcctcagtgccaagccgccaacaaaacctgtccgacgaactatatgtggaacaaccatatttgtagatgcttggcacaagaagatttcatgtttagctcggatgctggtgacgattcaacggatggtttccatgatatctgtggtccaaataaggagctggatgaagagacttgccaatgtgtgtgccgcgcgggcctgaggccagcaagctgtgggcctcacaaggagcttgatcgcaactcgtgtcagtgtgtctgcaagaataagctgttcccttcgcaatgtggagccaacagggagttcgatgaaaatacgtgtcagtgcgtgtgtaagcggacctgcccacgcaaccagcctctgaatcccggcaaatgtgcatgcgaatgtaccgaaagcccccagaagtgcctgctgaagggcaagaagtttcatcatcaaacttgctcgtgttaccggcggccctgtactaacagacaaaaagcatgtgaacctgggtttagctattccgaagaggtgtgtcggtgtgtcccttcctactggaaaagaccgcagatgatgtca

SEQ ID NO: 155953 - DNA, 1260 bp, Artificial Sequence
  derived and/or modified sequence
atgcacctgctgggatttttctcggtggcatgctcgctgctggccgcggcgctgctgccgggcccgagggaggctccggcagctgcagcagcattcgaatcaggtctggatctctcggacgccgaacccgacgccggagaagcaactgcatacgcctccaaggacctggaggaacagctgagaagcgtgtcgagcgtcgatgaattgatgactgtgctttaccctgagtactggaagatgtacaagtgccagctgcgcaagggcggatggcaacataacagagagcaggccaacctgaacagccggacggaagagactatcaagtttgcagcagcgcattacaacacggagatcctgaagtcgatcgacaacgaatggcgcaagacccagtgcatgccacgcgaagtctgcatcgatgtcggcaaggagtttggtgtggcaaccaatactttcttcaagcccccctgcgtgtcagtctacaggtgcggcggctgctgtaactccgaaggactgcagtgcatgaacacctcaacgtcgtatctttcgaaaaccctgttcgaaatcacggtgccgctctcccaaggacctaagccggtgaccatctccttcgccaaccatacctcatgtcggtgcatgagcaaactggacgtgtacaggcaggtgcactccatcatccgcaggtccctgccagcaactctgccgcaatgccaggccgcgaacaaaacttgcccgactaactacatgtggaataatcatatttgccgctgcctcgcccaagaggacttcatgttctcatccgacgccggcgacgactcgaccgatgggttccacgacatttgcggacccaacaaagaactggacgaagaaacttgccagtgcgtctgccgcgcgggcctccggcctgcatcttgtgggccccataaggagctggatcggaactcgtgccagtgtgtctgtaaaaacaagctgtttccgtcccagtgcggagccaacagagagttcgacgaaaacacctgccagtgcgtgtgcaagagaacttgtccgcgcaatcagccgctcaatccgggcaagtgcgcctgcgaatgcactgaaagcccacaaaagtgcctcctgaaaggcaagaaatttcatcatcagacctgttcctgctaccggcggccgtgcaccaatagacaaaaggcatgtgaacctggattctcatattccgaggaggtgtgccggtgcgtgccatcatactggaagcgcccgcaaatgatgtca

SEQ ID NO: 155954 - DNA, 1260 bp, Artificial Sequence
  derived and/or modified sequence
atgcacttacttggattcttctcagttgcttgtagcttgctagcagctgctttattgccgggacctagagaagcgccagcagctgccgctgcatttgaatctgggcttgatttgtcagatgctgagccagatgctggcgaagcaactgcttatgcatcaaaggacttagaggaacaactcagatcagtgagttcggtcgatgaacttatgaccgtgctttatccggagtattggaaaatgtacaaatgccaactacgaaaaggaggctggcaacacaatcgggaacaggctaacctgaactctcgaactgaggaaacaataaaatttgccgcggcccattacaatactgagattttgaagtcaattgataacgaatggcgaaaaacgcagtgcatgcctcgtgaggtatgcatagatgtgggaaaagaatttggagtcgccacaaacaccttttttaagccaccttgcgtgtcagtatatagatgtggaggttgctgcaactcggaaggactccaatgcatgaatacatctacatcgtatctcagcaagactttgtttgaaattactgtaccattatctcagggtccaaaacctgttactattagttttgcgaaccatacatcgtgccgatgtatgtcaaaacttgatgtttaccgacaggttcactctattataagacgttcactacccgctacacttccacagtgccaagcggccaataaaacgtgcccaacgaactacatgtggaacaatcatatttgtcgctgcttggcccaggaagattttatgttctcctcagatgcaggtgatgacagtactgatggttttcacgacatttgcggcccgaataaggaacttgatgaagagacttgtcaatgcgtgtgccgggcaggtctacgtccagctagttgcggaccacataaagagctcgatcgtaactcttgccagtgtgtttgtaaaaataaactatttccttcacaatgcggtgcaaatcgagaatttgacgagaatacctgtcaatgcgtttgtaaacggacatgcccacgcaaccagccgcttaatccaggaaagtgtgcatgcgagtgcaccgaaagtccacaaaagtgcctgcttaagggaaagaaattccatcaccaaacttgttcttgttacagacgcccgtgtacgaaccgtcaaaaagcttgcgagcccggcttctcgtattctgaagaagtttgccgttgtgtcccatcctattggaaaagaccacaaatgatgtct

SEQ ID NO: 155955 - DNA, 1260 bp, Artificial Sequence
  derived and/or modified sequence
atgcacctgttgggcttcttttccgttgcctgcagtcttctggcagccgcccttctgcccggccctcgagaggcacctgccgccgcagctgcgtttgagtctggtctggatctttccgatgctgagcccgacgccggtgaagctaccgcgtacgcatctaaggacctggaagagcaactgaggagcgttagcagtgttgatgagctgatgactgtgctgtacccggaatactggaagatgtacaagtgccagcttagaaaaggaggctggcagcataacagagaacaagccaatctgaatagccggacagaggagactattaagtttgcagcagcgcactataacacagaaattctgaagagcatcgacaacgagtggaggaaaactcagtgcatgccgcgcgaggtttgcattgacgtggggaaggagttcggagtggccaccaacacttttttcaaacccccctgtgtaagcgtctaccgctgcggtggctgttgcaactcagaggggctccaatgtatgaacaccagtacatcatacctctcaaaaaccctgttcgaaattacagtgcctctgtcacagggtcctaagcccgtcaccatttcctttgctaatcacaccagttgtcggtgcatgagcaaactcgacgtgtatcgccaggtgcactctattatccgccggagtctccctgctacactcccgcaatgccaagccgccaacaaaacatgccccactaattacatgtggaataatcacatatgtaggtgcttggcacaggaggactttatgttttccagtgatgctggggatgacagcaccgacggctttcacgatatatgtggaccgaataaagaactggacgaggaaacttgccagtgtgtctgtagggccgggctgcgccctgcctcctgcgggccccacaaagagctggacaggaactcctgccaatgtgtctgtaaaaataagctcttcccatcccagtgtggggctaaccgagaatttgacgagaatacctgccaatgcgtgtgcaaaagaacttgtccccggaatcaacctctgaaccctgggaagtgcgcctgtgaatgcaccgaatctccccaaaagtgtctgctgaagggcaagaaatttcaccaccagacctgtagttgctatcgacggccttgtaccaacagacagaaggcctgtgagcccgggttctcatactcagaagaggtctgcaggtgcgtgcccagttattggaaacgaccacagatgatgtcc

SEQ ID NO: 155956 - DNA, 1260 bp, Artificial Sequence
  derived and/or modified sequence
atgcacctgctcggttttttttcggttgcctgcagtctacttgcggccgccctcctgccaggccctcgggaggcgcccgccgccgccgctgctttcgagtcaggcctggatctttctgacgcagagccagacgccggcgaagccaccgcctacgcgtccaaggatctggaggaacagcttcggagcgttagttcagtcgacgagcttatgacggtgctataccccgaatactggaagatgtacaagtgtcagttgcggaaaggcggctggcagcataacagggagcaggccaacctgaacagccgtacggaggaaaccatcaaatttgcggccgctcattacaacacggagatcttgaagtcaattgacaacgaatggcgcaagacacagtgtatgccccgcgaggtctgcatcgacgtgggtaaggagtttggcgttgccaccaacaccttcttcaagcctccttgcgtgtctgtctaccgatgcggtggttgttgtaattcggaagggctgcagtgtatgaacacttccacttcatatctcagcaagacactgttcgagatcacggtgccattgagccagggccctaagcccgtgaccatctcattcgctaaccatacctcttgccgctgtatgagcaagcttgacgtttaccgccaggtgcactcgattatccgccggagcctccctgccactctgcctcaatgccaagcggctaacaagacctgccccactaactatatgtggaacaaccacatttgtcgctgccttgcccaggaggatttcatgttctcttcggatgccggagacgattccaccgacggtttccatgatatctgcggccccaacaaggagctcgatgaagagacttgccagtgcgtgtgtcgggctggtcttcgccccgcatcatgcggcccccataaggagctcgaccgtaactcctgccagtgcgtatgcaagaacaaacttttcccctcccagtgcggcgcaaatcgtgaatttgatgaaaatacctgccagtgtgtctgcaaacgtacctgcccacgtaaccagcccctcaaccccggaaagtgtgcatgcgagtgtactgagagcccccagaagtgtctgttgaagggtaagaagtttcatcaccagacctgctcgtgctatcgcagaccttgcaccaataggcagaaggcgtgtgagccgggtttctcatacagcgaagaagtttgccgctgcgttccctcctattggaagagacctcagatgatgagc

SEQ ID NO: 155957 - DNA, 1260 bp, Artificial Sequence
  derived and/or modified sequence
atgcatctgttgggctttttctcggtggcgtgttccctcctggctgcagcacttttgccgggacctcgcgaagcaccggccgctgcggcagcgttcgagtctggactggatctctcggacgctgagcccgatgcgggagaagcaaccgcttacgcttccaaagatctggaggaacaactccgatctgtgagcagcgtggacgaactgatgactgtgctgtacccggagtattggaagatgtacaaatgccagttgagaaagggtggctggcaacacaacagagaacaggcgaatctcaactcccggaccgaggaaaccatcaagtttgcagccgcgcactacaataccgagatcttgaaatcgatcgacaacgagtggaggaaaacgcagtgcatgccgcgcgaggtgtgcattgacgtcggaaaagagttcggggtggccactaacacgttcttcaagccgccatgcgtgtcggtctaccggtgcggagggtgctgcaactcagaagggctgcagtgtatgaataccagcactagttacctgtcgaaaactctgttcgagattaccgtccccctgtcgcagggccccaagcctgtgacgatctccttcgccaaccacacctcctgcaggtgcatgtcaaaattggatgtgtacagacaggtgcattcgatcatccgccgttctcttccagccactctgccccaatgccaggcagcaaataagacgtgtccgactaactacatgtggaacaatcatatttgccgctgtctggcacaagaagatttcatgttttcgtcggacgcaggcgacgattcaactgacgggttccacgacatttgcggaccgaacaaggaactcgatgaagaaacctgtcagtgcgtctgccgcgctggactccgcccggcatcctgcggccctcacaaggagcttgataggaactcgtgtcaatgcgtgtgcaagaataagttgttcccgagccagtgtggagcgaatcgggaattcgacgaaaacacgtgccaatgtgtatgtaagcgcacttgccctcggaaccaacctctgaaccctggtaagtgcgcctgcgagtgcaccgaatccccgcaaaaatgtctcctcaagggaaagaagtttcatcaccagacttgctcttgttacagaaggccgtgtaccaaccggcaaaaagcctgcgaaccaggattctcctactccgaggaggtgtgtcgctgcgtgccgtcctactggaagaggccacagatgatgtcc

SEQ ID NO: 155958 - DNA, 1260 bp, Artificial Sequence
  derived and/or modified sequence
atgcatttactcggtttcttttcagtcgcttgttcactgttggccgcagcactgcttcctggccctcgcgaagcacctgctgctgccgccgcatttgagtcggggttggacctgagtgatgccgagccggacgccggggaggcgacagcatacgcctctaaggatctggaggagcaactgagaagtgtttctagtgtggacgagttaatgaccgtgctgtacccagagtactggaagatgtataagtgccaactgaggaagggaggttggcagcacaatcgcgagcaagctaacctgaactctaggaccgaggagacaataaagtttgccgcagctcattacaacaccgaaatactgaaatcaatcgacaacgagtggcgtaagactcagtgcatgcccagggaggtgtgcattgatgtgggtaaggaattcggagtcgccacaaatactttttttaagcccccctgtgtcagcgtgtacaggtgtgggggctgctgtaattccgagggactgcagtgtatgaacaccagcacatcatatttgagtaagacactgtttgaaataactgttcctttatcacaagggcctaagcccgttacaattagctttgctaaccatacatcctgcaggtgcatgtcaaagctggacgtgtaccgacaagtacacagcattattcggcgctccctgcccgccaccctgccacagtgccaagccgcaaacaagacctgccctaccaattacatgtggaacaaccatatatgccggtgcctggcccaggaagactttatgttctcctctgatgctggggatgattctactgacgggttccatgacatatgcggcccaaacaaggagctggatgaagagacctgccagtgcgtatgtcgggcaggcctgagacctgcctcatgtggaccccataaggagctggataggaattcttgtcaatgtgtgtgtaagaataaattgttcccatcacagtgcggggctaacagggaatttgacgaaaacacttgccagtgcgtgtgtaaaaggacttgtccccggaaccagcccctgaaccccgggaagtgcgcatgtgaatgtaccgaaagcccccaaaaatgtcttttaaaaggtaagaaatttcaccaccagacatgcagctgctacaggaggccatgcaccaaccgccagaaggcttgcgagcctggatttagctacagcgaggaggtctgtaggtgtgtacccagttattggaagcggcctcagatgatgtca

SEQ ID NO: 155959 - DNA, 1260 bp, Artificial Sequence
  derived and/or modified sequence
atgcacctactaggcttcttttcagtggcttgctctctgctcgcggctgcactgctgcccgggcctcgtgaggcccccgccgctgcagcggccttcgagagcggactggatttgtccgacgccgagccagacgccggggaagcaaccgcatatgctagcaaggacctggaagagcagctgcggtcagtgtcatccgtggatgaattaatgaccgtgctgtaccctgaatattggaagatgtacaaatgccagttgcggaagggagggtggcagcacaacagagagcaggctaacttaaactctcgaacagaggagacgataaagtttgcagccgcgcattacaatactgaaattcttaagtctatcgacaatgagtggcggaagacacagtgtatgccacgcgaggtttgtattgatgtcgggaaggagttcggcgtggcgacgaatacattcttcaagcccccatgcgtgtctgtatataggtgtggcgggtgttgtaattctgaggggctgcagtgcatgaatacctccacatcgtacctttccaagactctattcgagattacggttccattgtcccagggaccaaagcccgtaaccatctcctttgccaatcatacatcctgccggtgcatgagtaaactcgatgtttacagacaggtacattccattataagaaggagcttgcctgctactctaccccagtgccaagcagccaataagacctgtcccactaactacatgtggaacaatcatatttgcagatgtctggcgcaggaggattttatgttttcatctgatgcaggggatgactccaccgacggatttcacgatatctgcggccctaacaaagaactggacgaggagacatgtcagtgtgtgtgtcgtgctgggttgcgccctgcttcatgcggtcctcataaggaactggacagaaattcctgccagtgcgtgtgcaagaataagctcttcccctcccaatgtggggccaaccgtgagtttgacgaaaacacctgtcagtgcgtgtgcaagaggacctgtccgcggaaccagccgctcaatcctggaaagtgtgcttgtgagtgtaccgaaagtccccagaagtgtctgctcaaaggcaagaaatttcaccaccagacttgttcctgctatcggcgcccctgtactaaccggcagaaagcatgcgaaccaggattctcttattctgaggaggtgtgcaggtgcgttccctcctattggaagcggccacaaatgatgagc

SEQ ID NO: 155960 - DNA, 1260 bp, Artificial Sequence
  derived and/or modified sequence
atgcacctgctgggattcttttccgttgcttgcagtctcctggcagctgccctgcttcctggcccccgcgaagccccagcggcagcggctgcctttgagagcggtcttgacctctccgatgccgaacccgacgccggtgaggccactgcatacgccagcaaggacctggaggagcaacttcgctccgtatcctccgtggacgaactgatgacggtgctttaccccgagtattggaagatgtacaagtgccaacttcgcaaaggaggttggcagcacaacagggaacaggctaatctgaacagtaggacagaggagacgataaagtttgcagccgcgcactacaacactgaaatcctgaagagcattgacaatgagtggagaaagacgcagtgtatgccccgcgaggtatgtatcgacgtgggaaaggagtttggagtggccaccaataccttcttcaagcctccgtgcgtgtcagtctatcgctgtggcggatgctgcaactcagagggcctgcagtgcatgaacacttccaccagctacctctccaaaacactgttcgaaataacagtacctttgtcacagggccccaaaccagtaacaatcagtttcgccaaccacacaagctgccgctgcatgagcaagctggacgtttacagacaggtacatagcatcatacgccgcagtcttccggcgactctcccgcaatgtcaagctgccaacaaaacgtgccccacaaattacatgtggaacaaccacatctgccgctgtttggcccaggaagacttcatgttctcaagtgatgccggcgatgacagtactgacggtttccatgatatttgtggtcctaataaggaacttgacgaggagacgtgtcagtgcgtgtgtcgcgctggactcaggcctgcgtcatgcggccctcataaggagctcgacaggaactcatgtcaatgcgtctgtaaaaacaagctgtttccatcacaatgtggagcgaatcgcgagttcgatgagaacacgtgtcagtgcgtgtgcaagcgcacctgtccaaggaaccagccactgaacccaggcaaatgcgcatgcgagtgtacagaaagtccgcagaagtgcctgctgaagggcaagaagttccaccaccaaacctgcagctgctacagaagaccatgcaccaacagacagaaggcttgcgagcccggcttcagctactcagaggaagtgtgtagatgtgtcccctcttactggaagaggccccaaatgatgtca

SEQ ID NO: 155961 - DNA, 1260 bp, Artificial Sequence
  derived and/or modified sequence
atgcacctcctgggatttttcagtgttgcttgttcattgcttgctgctgctctgctcccaggcccaagagaggcccccgccgctgccgctgcattcgaatcaggcctcgacctgagcgacgcagagccggatgcaggcgaggccaccgcctatgcttccaaggaccttgaagagcaactgaggtctgtctctagtgtggatgaactcatgaccgtgctttaccccgagtactggaagatgtacaaatgccaactccgcaaaggaggctggcagcacaacagggaacaagcaaaccttaattctaggaccgaagagacaatcaagtttgccgcggcacattacaacaccgaaattttgaagagcatcgataacgaatggaggaagacccagtgcatgcctagggaggtgtgcatcgatgtcgggaaagaatttggggttgcaacaaacacctttttcaaaccaccttgtgtgtcagtgtaccgttgcggggggtgctgcaactcggaaggattgcaatgtatgaacactagtacctcgtacttgagtaagactctctttgaaatcaccgttcctctgagccagggccctaaaccggtaacaatctcctttgccaatcacacaagttgtcgctgcatgtctaagctggatgtttatcgccaagtgcattcgatcatcaggaggagcctgccagctaccctcccacagtgccaagccgcaaacaaaacttgcccaacaaactacatgtggaataatcacatctgcagatgtctcgcacaggaggactttatgttctcgagtgacgcaggggatgacagcacagatggattccacgatatctgtggcccaaacaaagagcttgatgaagagacttgccagtgcgtgtgtcgagctggactcaggccggctagctgtggaccacataaagaacttgatcgcaactcatgccaatgtgtctgcaagaataaactttttccgagccagtgcggagccaatagagagtttgatgaaaacacttgtcagtgcgtgtgcaaaaggacatgtcctagaaaccagccacttaatccgggcaaatgcgcttgcgaatgcaccgagtcaccgcaaaagtgcctgctgaaaggaaaaaagttccatcaccagacttgctcgtgttacaggagaccatgcactaaccggcagaaagcgtgcgaacccggcttctcctacagtgaggaagtgtgccggtgcgtgccaagctactggaagcgccctcaaatgatgagc

SEQ ID NO: 155962 - DNA, 1260 bp, Artificial Sequence
  derived and/or modified sequence
atgcatttacttggattttttagtgttgcttgttcacttttagcagctgctttgcttccaggaccaagagaagcaccagcagctgctgcagcttttgagtcaggattagatctttcagatgcagaaccagatgccggggaggctactgcttatgcatcgaaagatcttgaagaacaattacgaagtgtatcatcagttgatgaattaatgacagtactttatcctgaatattggaaaatgtataagtgtcaacttcgtaagggaggttggcaacataatagagaacaagctaatcttaattcaagaacagaagaaactattaagttcgcagcagctcattataatacagaaattttaaaatcaatagataatgaatggcgtaaaacacaatgtatgccaagagaagtttgtattgatgtaggtaaggaatttggagttgctacaaacacattttttaaaccaccttgtgtttccgtatatagatgtggtggatgttgtaattcagagggattgcaatgtatgaatacaagtacttcttatctttcaaaaacattatttgaaattacagttccattatcacaaggaccaaaaccagttactatttcttttgcaaatcatactagttgtagatgtatgtcaaagttagatgtttatagacaagttcattctataattagaagaagtcttccagctactttaccacaatgtcaagctgcaaataaaacatgtccaacaaattatatgtggaacaatcatatttgtagatgtcttgcacaagaagattttatgtttagtagtgatgcaggagatgattctacagacggattccatgatatatgtggacctaataaggaattagatgaagaaacatgtcaatgtgtttgtagagcaggattaagacctgcttcatgtggaccacataaagaacttgacagaaactcttgtcaatgtgtttgtaaaaataagcttttcccaagccaatgtggtgcaaatagagaattcgatgaaaatacttgtcaatgtgtttgtaaaagaacctgtccaagaaatcaaccacttaatccaggaaaatgtgcatgtgaatgcacagaaagtccacaaaaatgccttcttaaaggtaaaaaattccatcatcaaacttgctcttgttatagaagaccatgtacaaatagacaaaaagcatgtgaaccaggtttttcatattcagaagaagtttgtagatgtgttccatcatattggaagcgtccacaaatgatgagt

SEQ ID NO: 155963 - DNA, 1260 bp, Artificial Sequence
  derived and/or modified sequence
atgcatcttcttggatttttctccgtggcatgttcgctccttgcggcagcactgttgccaggtcctcgcgaagcacccgccgcagccgccgccttcgagtcaggactcgacctgtcagatgcagaacctgatgcaggtgaagcgaccgcatacgcatcgaaagacctggaggagcaacttaggtcagtgtcgtccgttgatgagctgatgactgtgttgtaccctgaatactggaagatgtacaagtgtcagctgcggaaaggagggtggcagcacaacagggaacaagcaaacctgaattcccgtactgaagaaaccatcaaatttgcagcagcacactacaataccgagatacttaaatcaatcgataacgagtggcggaaaacgcaatgcatgccacgggaggtgtgcattgacgtcggaaaagaatttggtgtcgcaaccaacacctttttcaagccgccttgtgtgagcgtctaccggtgcggcggctgttgcaattccgaaggtctgcagtgtatgaacacctcgacttcctacctctcgaaaacgcttttcgagattaccgtcccactctcgcaaggcccgaaaccagtcactatatcgttcgcaaaccatactagctgtaggtgtatgtcaaagttggatgtgtacagacaagtgcattcgattattcggcgctccctcccagcaacgttgccccagtgccaggccgcgaataagacctgcccaactaactacatgtggaataaccacatctgtcgttgcctcgcacaggaagatttcatgttctcaagcgacgccggtgatgactcgactgatggatttcacgatatttgtggaccaaacaaagagcttgatgaggagacttgtcaatgtgtgtgtagagcaggacttcggccggcatcatgtggtcctcacaaggaactggacaggaactcttgccaatgtgtgtgcaagaacaaactgttcccatcccagtgtggcgctaaccgagagtttgacgagaacacctgtcaatgcgtgtgcaagcggacctgtcctagaaaccagcctctcaacccaggaaagtgtgcctgcgagtgtaccgaaagcccgcagaagtgtctcctgaaaggaaaaaagtttcaccatcaaacttgcagctgctacagacgtccgtgtaccaaccggcagaaggcctgtgagcctgggttttcgtacagcgaagaggtgtgccgatgtgtcccctcatactggaaaagaccacaaatgatgtca

SEQ ID NO: 155964 - DNA, 1260 bp, Artificial Sequence
  derived and/or modified sequence
atgcacctgctgggatttttctccgtggcgtgttctctgcttgccgcagccttgctgcctggcccacgcgaggcgccagccgccgcggctgcattcgaatccgggctcgacttgtcggatgcagagcccgacgcaggagaagcaactgcttacgcatccaaggatctggaggagcagcttagatccgtgagctccgtcgatgagttgatgaccgtgctgtatcctgaatactggaaaatgtacaagtgtcaacttcggaaaggtggatggcagcataaccgcgagcaagcgaatctgaactcgcgcactgaagaaactataaagttcgcagcagcacattacaacaccgaaattctcaagtcaattgataacgagtggagaaaaactcagtgtatgccccgcgaagtgtgtattgatgttggcaaggaattcggcgtggcgactaataccttctttaaacccccgtgcgtgagtgtctaccggtgtggaggttgttgtaactcggaagggctgcagtgtatgaataccagcactagctacctttcaaagacgctttttgagatcactgttcccctgtcgcagggtccaaaaccagtcaccatttccttcgcaaaccacacttcctgtcgatgtatgagcaagctggacgtgtaccgccaagtccattcaatcatacggagatccctgcctgctacccttccccagtgtcaggcagctaataagacgtgtcctaccaactacatgtggaacaaccatatatgccgctgtctggctcaagaggacttcatgttttcatcggatgcaggagacgattcgactgatggatttcatgacatttgtggaccgaacaaagaacttgatgaagaaacgtgtcagtgcgtttgtcgagctggacttcggccagcgagctgcggcccacataaggaacttgatcgcaactcctgccagtgtgtgtgcaagaataagctgtttccaagccagtgtggagccaaccgcgaatttgacgagaacacctgccaatgcgtgtgtaaacgcacctgccctagaaatcaaccactgaatccgggtaagtgtgcgtgtgaatgtacggaatcgcctcaaaagtgccttctcaagggaaagaagtttcaccatcaaacttgttcatgctaccgccggccttgtactaatcgacagaaggcctgcgaacccgggttttcgtactcggaagaagtgtgcaggtgcgtccctagctactggaaacgcccgcagatgatgtcc

SEQ ID NO: 155965 - DNA, 1260 bp, Artificial Sequence
  derived and/or modified sequence
atgcatttgctggggtttttcagtgtggcatgcagtctgctggctgctgccttgctaccaggcccaagggaggctcccgccgctgctgccgccttcgagtccggcctggacctctccgacgcagaaccagatgccggcgaagctaccgcctacgcaagcaaggatttagaggagcagcttagatccgtgagtagcgtggacgaactgatgacagtgttatatccagaatactggaaaatgtacaagtgccagctacggaaaggcggctggcagcacaatagagaacaggccaatctaaattcacgcacagaagagactatcaaatttgccgccgctcactacaacaccgagatattaaagagtatagataacgagtggagaaagacacaatgtatgccccgcgaagtctgcatagatgtgggtaaggagttcggtgtggcaaccaacaccttctttaaacccccttgtgttagcgtgtaccggtgcggggggtgttgcaactccgagggactgcaatgcatgaatacctctacctcttacctgagtaagacactgtttgaaataacagtgcctctgtctcaaggacccaaaccagtgacaatcagctttgccaaccatacttcttgtaggtgcatgtccaaactcgatgtttaccggcaggtgcatagtatcataagacgcagtctaccagccacactgcctcaatgtcaggccgccaacaaaacctgcccaactaactatatgtggaacaatcacatctgtcgttgtttagcccaggaggacttcatgttttcatccgacgctggggacgattccaccgatgggttccatgacatttgtggaccaaacaaggagctggacgaagaaacctgccaatgcgtttgtcgcgctgggttgcggcccgcttcttgtgggcctcacaaagagctagatagaaacagttgtcaatgtgtttgtaaaaacaagctcttccctagccaatgtggagccaaccgggaattcgacgaaaatacttgccagtgtgtgtgcaaacgtacttgcccaagaaaccagccacttaatcccggcaagtgtgcctgcgagtgtaccgagtcaccccagaagtgtctgttaaagggcaagaagttccaccatcagacatgttcctgctaccggcgcccatgcaccaatcgccagaaagcttgtgagccgggtttcagttactccgaggaagtgtgccggtgcgtgccttcttactggaagagaccccagatgatgagc

SEQ ID NO: 155966 - DNA, 1260 bp, Artificial Sequence
  derived and/or modified sequence
atgcacctcctcgggttcttctctgtcgcctgtagcctcctagcggcagcattactgccaggccccagggaagcccctgctgcagctgccgcatttgagagtggcctggatctgagcgacgcagaacctgatgccggggaagcaacagcctacgcgtccaaagatttggaggaacaactccgttcagttagttccgtcgatgagctgatgactgttttgtatcccgagtattggaagatgtataagtgtcagcttagaaagggcgggtggcagcataatcgagaacaggccaatctgaatagcagaaccgaggaaacaattaagttcgctgccgcgcactataacaccgaaatacttaagtctattgacaatgagtggcgaaaaacacaatgtatgccacgagaggtgtgcatagacgtgggcaaggaatttggcgtggccactaacacattctttaaacctccttgtgtgagcgtgtatagatgtggcggttgctgcaactctgaagggctgcagtgtatgaacacgtctaccagctatttgtcaaagaccctgtttgaaatcacagtgcctctgagtcaaggtcccaaacctgtaacaatcagcttcgccaatcacacctcgtgtagatgtatgtctaaactggatgtctatagacaagtgcactctatcattcgtagatctctgcctgctacgctcccacaatgtcaggctgcgaacaagacatgcccaaccaattacatgtggaataatcacatttgcaggtgtctggcccaggaagactttatgttttctagcgacgctggtgatgactccacagacgggtttcatgacatttgcggacctaataaagaactcgacgaagagacctgccagtgcgtttgccgagcgggactccgacccgcgtcatgcggaccccataaagagctggaccgcaatagttgccaatgtgtttgtaagaacaagctgtttccctcacaatgtggtgcgaatagagagtttgacgaaaacacttgccagtgtgtttgcaagcgcacttgtcctcgaaaccagccactaaacccagggaaatgtgcctgcgagtgcaccgagtctcctcaaaaatgtctcctgaagggaaaaaagtttcatcaccagacctgtagctgctatcggcgaccgtgcaccaaccgccagaaagcatgcgaaccaggattcagctattctgaggaggtgtgccggtgcgtcccctcctactggaaaagacctcagatgatgagc

SEQ ID NO: 155967 - DNA, 1260 bp, Artificial Sequence
  derived and/or modified sequence
atgcatttacttggcttcttctctgttgcatgttcactgctcgccgccgcactgctgcctgggcccagagaggccccagctgccgcagctgcatttgagagtggacttgatctgagtgacgccgaaccagacgcaggtgaagcaactgcatatgctagcaaggatttggaggagcagttacggtctgtaagttcagtggatgagttaatgactgtcttgtatcccgaatactggaagatgtacaagtgccagctacgaaagggaggttggcagcacaatcgtgaacaggcaaatctgaactcacgcacagaggaaaccattaaattcgccgccgctcactataacaccgagatcctgaagagcatcgacaacgaatggcggaagacacaatgtatgcctcgcgaggtgtgtatcgatgttggcaaagagtttggggtcgctacaaacacattctttaagcccccttgcgtgtctgtttacagatgtggtggatgctgtaactctgagggactccagtgtatgaatacatcgacgtcttacttgtccaaaacccttttcgaaattaccgtcccactgagtcaggggccgaagcccgttactatttctttcgcgaatcacacatcctgccgatgtatgagtaagctggatgtctaccgccaggtgcactccattattagaagatctctacctgccactcttccccagtgccaggcagccaacaagacatgtcccacaaactatatgtggaacaaccacatctgtcggtgcttagcacaagaagattttatgttctccagtgacgccggagacgactcaacggacggcttccacgacatctgcgggccaaataaggaactggacgaggaaacctgccagtgcgtttgtcgcgcgggcttgagacctgcaagctgcggcccccataaagaactggatcgcaattcctgccaatgtgtgtgtaagaataagctgttcccttctcagtgtggtgctaaccgcgaattcgatgaaaacacctgtcagtgtgtatgcaagaggacctgcccaaggaaccagcctctgaaccccggtaaatgcgcttgcgagtgtactgagtcaccacagaaatgccttttgaaaggaaaaaaattccatcaccagacatgttcctgttatcgaagaccatgtaccaatagacagaaggcgtgtgagcccgggttctcttattccgaggaagtgtgccgttgtgtccccagctattggaaacggcctcagatgatgagt

SEQ ID NO: 155968 - DNA, 1260 bp, Artificial Sequence
  derived and/or modified sequence
atgcacctgctgggattcttttcggtggcatgttcgctgcttgcagcagcacttcttccgggtcctagagaggcccctgcggctgcggcagcgtttgaatcgggacttgatctttcagatgctgaacctgatgcaggtgaagccactgcatacgcatccaaggacctggaggaacagcttagatcagtgtcgtcagtggatgaacttatgaccgtcctctaccctgagtactggaaaatgtacaaatgtcagcttagaaagggagggtggcaacacaaccgagagcaggcgaaccttaactccaggaccgaggaaactattaagtttgccgcagcgcattacaatactgaaattctcaagtcaatcgataacgagtggagaaagacccagtgtatgccacgggaagtctgtatagacgtcggtaaagagtttggtgtggccactaacacctttttcaaaccgccttgtgtctccgtgtaccgatgcggaggatgttgtaactccgaaggactgcagtgcatgaatacctccaccagctacttgagcaagactctttttgagatcaccgtgcctctgtcgcaaggaccgaagccagtgactatttccttcgcaaaccacacctcatgcaggtgtatgtccaaattggatgtctaccgccaagtgcattcaataatcagacggtcccttccagccactctgccacaatgccaagcagcaaacaaaacgtgtcctacgaactatatgtggaacaaccacatctgccgatgtctggcacaggaggactttatgttttcgtctgatgcgggtgatgatagcaccgatggttttcatgatatctgtggtcccaacaaggagctggacgaagaaacttgccagtgcgtgtgccgcgccggacttagacctgcatcgtgcggacctcacaaggaactggaccgcaattcatgtcagtgcgtgtgtaagaacaagctgtttccttcccagtgcggtgcaaacagagaattcgacgagaacacgtgccagtgtgtgtgtaagaggacgtgccctcgaaatcaaccgctcaatcctggaaaatgcgcatgtgaatgcacggaaagccctcaaaagtgtctccttaagggaaaaaagttccatcatcaaacctgcagctgctaccgccggccctgcactaacagacagaaggcatgtgaacctgggttcagctactccgaagaggtctgcagatgcgtcccatcttactggaaacgcccccaaatgatgtcg

SEQ ID NO: 155969 - DNA, 1260 bp, Artificial Sequence
  derived and/or modified sequence
atgcacctgcttggtttcttttcggtcgcatgcagcctgctggcagcggcactcctgcccggcccacgggaagcaccagcagctgccgccgcattcgaatcgggactcgatctctccgacgccgaaccggacgcgggagaagccactgcatatgcctcaaaggacttggaagagcaactccgcagcgtgtcctccgtggacgaacttatgactgtgctctacccagaatactggaagatgtacaaatgtcaattgcgcaaggggggatggcaacataatcgcgaacaagcgaatctgaactcaagaaccgaagagactatcaaatttgccgcggctcactacaacaccgagatcttgaagtccattgacaacgaatggagaaagactcagtgcatgccgcgcgaagtgtgtatcgatgtgggaaaagagttcggagtggcgaccaacacttttttcaagcccccatgcgtcagcgtttaccggtgcggaggatgctgcaactcagaggggctgcaatgcatgaacacctcgacttcctaccttagcaagacgctgttcgaaatcacggtgccgctctctcagggcccgaagcccgtgaccatctcgttcgccaaccatacttcttgtagatgcatgagcaaactggatgtgtacaggcaggtccactcgattatcagaagatccctccctgccaccctcccacagtgccaggctgccaataagacgtgccctactaactatatgtggaataatcacatttgcagatgcctggctcaagaggactttatgttctcctcagatgcgggagacgactctactgatggctttcatgacatctgcgggcctaataaggagctcgatgaagaaacctgccagtgcgtgtgtcgcgcgggcctcaggcccgcgtcatgcggaccgcacaaggaattggaccgcaattcgtgccagtgcgtatgcaagaataagctcttcccatcacagtgcggagccaaccgcgaattcgatgagaacacctgccaatgcgtctgcaagaggacctgcccccggaaccagcctctgaacccaggaaagtgcgcctgcgagtgtactgagtcgccccagaagtgcctgctcaagggcaagaaattccaccatcagacgtgcagctgttaccgccggccgtgtactaatagacagaaggcctgtgaaccaggtttctcgtactcggaagaagtgtgccggtgtgtgccgagctactggaaaagacctcagatgatgtcg

SEQ ID NO: 155970 - DNA, 1260 bp, Artificial Sequence
  derived and/or modified sequence
atgcacctactgggcttcttttctgttgcttgctcccttctagcggccgcattgctccccggccccagagaggccccagcagccgccgccgcgtttgagtcggggttggacctgagcgacgcagagccagacgcgggagaggcgacagcatacgcatctaaggacctggaagagcagctcaggtctgtaagctccgttgatgaactgatgactgtattgtatcctgagtattggaagatgtacaaatgccagctccggaaagggggttggcagcataatcgcgaacaggccaatctcaacagtagaactgaagaaactattaaatttgccgccgcacactataacaccgaaattttgaaatccatcgacaacgaatggagaaagacacagtgtatgccgagagaggtatgcatcgacgtgggcaaagagttcggggtcgccaccaacacctttttcaagcctccttgtgttagtgtgtaccggtgtggcggatgttgcaactcggagggcctgcagtgtatgaacactagcacctcttacctgtccaaaaccctgttcgagatcactgttccactgtcccaaggtcccaagccggtgacaatttcattcgccaaccacacttcatgcaggtgtatgagtaagctggatgtttatcgccaggtgcatagtattatacgcagatcattaccggcaaccctgccacagtgtcaggcagcaaataaaacatgccctacaaactatatgtggaacaatcacatttgccggtgcttggctcaggaggactttatgttcagcagtgacgcgggtgatgattctactgatggttttcacgatatttgcggccctaataaagaactggacgaggagacctgccagtgcgtgtgtagggctggactgaggcccgcatcttgcggcccccacaaagagttggacaggaatagctgtcaatgtgtgtgcaaaaataaactattcccctcccagtgcggtgcaaatcgtgagttcgacgagaatacatgtcagtgcgtttgtaagaggacgtgcccaagaaaccaaccactgaaccccggcaaatgtgcatgcgaatgtactgaaagcccccaaaagtgtctgctgaaagggaaaaaattccatcaccagacttgctcatgttatcgacggccttgcaccaatagacagaaggcttgcgagcccggcttctcctactccgaggaggtgtgccgctgcgtgccaagttattggaaacgccctcagatgatgtca

SEQ ID NO: 155971 - DNA, 1260 bp, Artificial Sequence
  derived and/or modified sequence
atgcaccttttagggtttttctccgtagcctgttctctgctggctgccgccctccttcccgggcccagagaagcacccgccgccgccgccgcgttcgagtccgggctggatctgtctgatgctgaacccgacgccggggaggcaacagcctatgcatctaaagatcttgaagagcaactgagatctgtgtcctccgtggatgaactgatgacagtgttatatcccgaatactggaaaatgtataaatgtcagctgcgaaaaggagggtggcagcacaatcgggaacaggctaatttgaattccagaacagaagaaacaattaaatttgccgctgcccattacaatacagaaattctgaaatctatagacaacgaatggcggaaaacacagtgtatgccacgggaagtgtgcatcgacgtagggaaggaattcggagtagcaacaaatacattcttcaaacccccctgtgttagtgtttacaggtgtggagggtgctgtaactctgaagggttacagtgtatgaatactagtacatcctatctctccaaaactctttttgaaataacagtacccctctcccaggggcctaaaccagtgacaatatccttcgccaaccatacttcatgcagatgcatgtcaaaattagacgtttaccggcaggttcattccataatcagacggagtctccctgccacgctgccacagtgtcaggcagccaacaaaacatgccccactaattacatgtggaacaaccacatatgccggtgtctagcacaggaagatttcatgttttcctctgatgctggggatgattccactgatgggttccatgacatttgtggaccaaataaagaactggatgaagaaacttgtcagtgtgtatgccgcgcaggactcagacctgcatcatgtgggccacacaaagagctcgataggaattcttgtcagtgtgtgtgcaaaaacaaactttttccttcccagtgcggagctaatcgagaattcgacgagaacacatgccagtgcgtgtgtaaaagaacatgcccccggaaccagcctctaaatccagggaagtgtgcctgtgagtgcactgaatcaccccagaaatgcctactaaaagggaaaaaattccaccaccagacatgttcttgttataggaggccctgcactaatagacagaaggcctgcgaacctggattctcatatagtgaagaagtatgccggtgtgtgccatcgtattggaaaaggccacagatgatgtca

SEQ ID NO: 155972 - DNA, 1260 bp, Artificial Sequence
  derived and/or modified sequence
atgcatctcctcggattcttctccgtggcctgctcgcttctggccgcggcccttcttcccgggccgcgggaagcaccggccgcggcggccgcatttgaaagcggtttggatttgtcggacgcggaaccagatgcgggtgaagccaccgcctacgcgagcaaggatctggaagaacagttgagatcagtgtcatccgttgacgagctgatgactgtgctgtaccccgagtactggaagatgtataagtgccagcttcggaagggaggatggcaacacaaccgggaacaagcaaatctgaattctcgcaccgaagaaaccattaagttcgcagccgcccattacaataccgaaatcctcaagtcgatcgacaacgagtggcggaaaactcaatgtatgccaagggaagtgtgcatcgatgtgggtaaggagttcggagtggcgactaacacctttttcaagccgccatgtgtgtcagtctacagatgtggaggatgctgcaactccgaaggattgcagtgcatgaacacgtccacttcatacctgtccaagacgctgttcgagatcaccgtgccgctgagccaaggtccaaagcccgttaccatctccttcgcgaatcacacctcctgcagatgcatgtcgaagctggacgtctaccgtcaggtgcactcaatcatcaggagatcgctgcctgccactctcccgcagtgccaagccgctaacaagacttgtccgactaattacatgtggaacaatcatatctgtagatgcctggcgcaagaggatttcatgttctcatccgacgccggagacgattccacggatggtttccacgacatctgcggcccgaacaaagaactcgacgaagagacttgccagtgcgtctgccgcgccggcctgcgcccggcttcctgcggaccgcacaaggagctggaccgtaactcctgtcagtgcgtgtgcaagaacaagctgttcccatcgcagtgcggggctaaccgggaattcgacgaaaacacctgccagtgtgtgtgcaagagaacctgccctagaaaccagcctctgaacccagggaagtgcgcttgcgagtgcaccgaatcgccgcagaagtgccttctgaaaggtaagaagttccaccaccagacctgctcctgctaccggcgcccgtgcactaaccgacagaaggcttgtgaaccaggtttttcgtactcggaggaggtgtgccggtgtgtcccatcctattggaagcgcccgcagatgatgtct

SEQ ID NO: 155973 - DNA, 1260 bp, Artificial Sequence
  derived and/or modified sequence
atgcacttattgggttttttttcagttgcgtgctctcttctggcggctgcactacttcctggacctcgagaagctccggctgctgcagcagcattcgagtcgggtcttgacctgagcgacgctgaacctgacgcaggggaagctacagcgtacgcctctaaagacctggaagaacagcttcgatctgtttcaagcgttgatgaactgatgactgtcctgtatccggagtactggaaaatgtacaagtgccagctgcgcaaagggggatggcaacacaaccgagaacaggctaatctgaattcgcgcacggaagagacaattaaatttgccgcagctcactacaacacggagattttgaaaagcatcgataatgaatggcggaaaacacaatgtatgcctcgggaggtctgtattgatgtcggcaaggagtttggagtcgcgactaacacattcttcaaacctccttgtgtctctgtttatagatgcggtggatgctgtaactctgaaggattgcaatgcatgaatacttccacatcatacttatcaaaaacactctttgaaatcactgtaccgttatcccagggccctaaaccagttacgatttcatttgctaaccatacaagctgccggtgtatgtctaaattggatgtatatagacaagtgcacagcattattcggcgctcactgccggctacccttccacagtgtcaggcggcgaacaagacttgcccaacaaactacatgtggaataatcacatatgccggtgcctggcacaggaggactttatgttctcctctgatgcgggggatgattccaccgacgggttccatgatatttgcggtcccaacaaagaacttgatgaggaaacttgtcaatgtgtctgtcgtgccggcttgagaccagcgtcatgtggacctcataaagagcttgatcgtaacagttgtcaatgtgtttgcaagaataaattgtttccgtctcagtgcggcgcaaatcgtgaattcgacgaaaatacatgtcaatgtgtttgcaagcgaacatgcccgcgtaatcagccgcttaatccgggcaagtgtgcctgtgagtgtacagaatcacctcaaaagtgtcttctaaaaggcaaaaaatttcatcatcaaacgtgtagttgttacagaaggccgtgtacaaatagacagaaagcttgtgaaccaggcttttcttatagcgaggaagtttgccgttgcgtcccatcatattggaaacgtccgcaaatgatgtca

SEQ ID NO: 155974 - DNA, 1263 bp, Artificial Sequence
  derived and/or modified sequence
atgcacctgctgggcttcttcagcgtggcctgcagcctgctggccgccgccctgctgcccggccccagagaggcccccgccgccgccgccgccttcgagagcggcctggacctgagcgacgccgagcccgacgccggcgaggccaccgcctacgccagcaaggacctggaggagcagctgagaagcgtgagcagcgtggacgagctgatgaccgtgctgtaccccgagtactggaagatgtacaagtgccagctgagaaagggcggctggcagcacaacagagagcaggccaacctgaacagcagaaccgaggagaccatcaagttcgccgccgcccactacaacaccgagatcctgaagagcatcgacaacgagtggagaaagacccagtgcatgcccagagaggtgtgcatcgacgtgggcaaggagttcggcgtggccaccaacaccttcttcaagcccccctgcgtgagcgtgtacagatgcggcggctgctgcaacagcgagggcctgcagtgcatgaacaccagcaccagctacctgagcaagaccctgttcgagatcaccgtgcccctgagccagggccccaagcccgtgaccatcagcttcgccaaccacaccagctgcagatgcatgagcaagctggacgtgtacagacaggtgcacagcatcatcagaagaagcctgcccgccaccctgccccagtgccaggccgccaacaagacctgccccaccaactacatgtggaacaaccacatctgcagatgcctggcccaggaggacttcatgttcagcagcgacgccggcgacgacagcaccgacggcttccacgacatctgcggccccaacaaggagctggacgaggagacctgccagtgcgtgtgcagagccggcctgagacccgccagctgcggcccccacaaggagctggacagaaacagctgccagtgcgtgtgcaagaacaagctgttccccagccagtgcggcgccaacagagagttcgacgagaacacctgccagtgcgtgtgcaagagaacctgccccagaaaccagcccctgaaccccggcaagtgcgcctgcgagtgcaccgagagcccccagaagtgcctgctgaagggcaagaagttccaccaccagacctgcagctgctacagaagaccctgcaccaacagacagaaggcctgcgagcccggcttcagctacagcgaggaggtgtgcagatgcgtgcccagctactggaagagaccccagatgatgagctag

SEQ ID NO: 155975 - DNA, 1263 bp, Artificial Sequence
  derived and/or modified sequence
atgcatttgctggggtttttcagcgtcgcctgttctctgttggctgcagctctgttacccggcccccgggaagcccctgccgcagccgccgccttcgagtccgggctcgatctgtccgacgccgagcccgacgccggggaagccacagcatatgctagtaaggatcttgaggagcagcttcgtagtgtatcttcagttgatgagctgatgaccgttctttatcccgagtactggaaaatgtataagtgccaactgcgcaagggcggctggcagcacaatcgggaacaggctaatctcaatagtcgaacggaggagaccattaagttcgcggcagcccactataacactgaaattctgaaaagcatcgataacgagtggaggaagacacagtgtatgccacgggaggtttgtattgacgttgggaaggaatttggcgtcgctactaacactttcttcaagccaccctgtgtgagcgtctacagatgtggcggctgctgcaactccgaagggcttcagtgcatgaacacctctactagctatctgtcaaagacgctcttcgagatcactgtgcccctttcacagggaccaaagcccgtgaccataagctttgccaaccacaccagttgcagatgcatgtcaaagttggacgtctatagacaggtgcattccatcatccgcagatctcttcctgctacactgccccagtgccaagcagcaaacaagacgtgtcctaccaattacatgtggaataatcacatatgtcgctgcctcgcacaggaggactttatgttttccagtgatgcaggggacgactccaccgacggattccatgacatatgcggaccaaataaggagctggacgaggaaacttgtcagtgcgtgtgccgtgccgggctcaggcctgcttcttgcggaccccataaagagctggatcgaaattcttgtcaatgtgtatgtaagaataagctgttcccttcacagtgtggagccaaccgtgaattcgacgaaaacacatgccagtgcgtgtgcaagcgcacatgcccacgaaaccagccactaaatcctggtaagtgcgcatgtgagtgtactgagtctccccagaaatgtttgttgaaaggtaagaagttccaccaccagacctgttcttgctaccggagaccgtgcaccaaccgacaaaaagcatgcgagcccgggttttcctattccgaggaggtatgtcgatgcgtccctagctactggaaaaggcctcagatgatgagctag

SEQ ID NO: 155976 - DNA, 1263 bp, Artificial Sequence
  derived and/or modified sequence
atgcacctgctgggcttcttctctgtggcctgcagcctgctggccgccgccctgctgcccggcccccgggaggccccagctgctgctgctgcctttgagagcggcctggacctgagtgatgctgagccagatgctggggaggccacagcctatgccagcaaggacctggaggagcagctgcggtctgtgtcctctgtggatgagctgatgacagtgctgtacccagagtactggaagatgtacaagtgccagctgaggaaaggaggctggcagcacaaccgggagcaggccaacctgaacagcaggacagaggagaccatcaagtttgctgctgcccactacaacacagagatcctgaagagcattgacaatgagtggaggaagacccagtgcatgccccgggaggtgtgcattgatgtgggcaaggagtttggagtggccaccaacaccttcttcaagccaccctgtgtgtctgtgtaccgctgtggcggctgctgcaacagcgagggcctgcagtgcatgaacaccagcaccagctacctgagcaagaccctgtttgagatcaccgtgcccctgagccagggccccaagcctgtgaccatcagctttgccaaccacaccagctgccgctgcatgagcaagctggatgtgtaccggcaggtgcacagcatcatccgccgcagcctgcctgccaccctgccccagtgccaggccgccaacaagacctgccccaccaactacatgtggaacaaccacatctgccgctgcctggcccaggaggacttcatgttcagcagtgatgctggagatgacagcacagatggcttccatgacatctgtggccccaacaaggagctggatgaggagacctgccagtgtgtgtgcagagctggcctgcggcctgccagctgtggcccccacaaggagctggacaggaacagctgccagtgtgtgtgcaagaacaagctgttccccagccagtgtggggccaaccgggagtttgatgagaacacctgccagtgtgtgtgcaagaggacctgccccaggaaccagcccctgaaccctggaaaatgtgcctgtgaatgtacagagagcccccagaagtgcctgctgaagggcaagaagttccaccaccagacctgcagctgctacagaagaccctgcaccaaccggcagaaggcctgtgagcccggcttctcctacagcgaggaggtgtgccgctgtgtgcccagctactggaagaggccccagatgatgtcctag

SEQ ID NO: 155977 - DNA, 1263 bp, Artificial Sequence
  derived and/or modified sequence
atgcacctgctgggcttcttcagcgtggcctgcagcctgctggccgcggctctgctgcccggaccaagggaagctcctgctgctgctgctgctttcgagagcgggctggacttgagcgatgcggagccggatgctggggaggccaccgcttatgcctcaaaagatcttgaagagcagctgaggtccgtctcatctgttgacgagctgatgacagtcttataccccgaatactggaaaatgtataaatgtcagctccggaagggtggctggcaacataaccgagagcaggctaatttaaattcccgcaccgaggaaaccattaagtttgcggcggcacactacaatacagagattctaaagtccatagataacgagtggagaaagacccagtgcatgcctcgagaggtgtgcatcgatgttggcaaggaatttggcgtcgcgaccaatacattcttcaagccaccttgtgtgtcagtgtacaggtgcggaggctgctgcaacagcgaagggctgcagtgtatgaacacgtccacatcttacttgtctaaaacactgtttgaaattactgtacctttgagtcagggccccaagcctgtgaccatttcgtttgccaatcacacctcgtgcaggtgtatgtccaagctggatgtttatcggcaggtccacagtattattcgtagatcccttccagcaacactccctcagtgccaggcagccaataaaacatgtccaaccaattatatgtggaacaatcacatctgtcgctgtctcgcacaagaggatttcatgttttcaagcgatgccggagacgacagcaccgacggattccatgacatctgtggccctaacaaggaactagacgaagaaacatgccagtgcgtgtgccgagccgggctgcgacctgcctcttgcgggccgcacaaagaactggacagaaactcctgtcagtgcgtttgtaaaaacaagctctttccttctcagtgcggtgcaaatagagagttcgacgagaacacttgtcagtgcgtctgtaaacgcacatgccccagaaaccaacctctcaatccaggcaaatgtgcgtgtgagtgtactgagtctccgcagaaatgcctgctcaagggcaagaaattccaccaccaaacgtgtagctgctataggaggccttgcacaaacaggcaaaaagcttgtgaaccgggtttttcgtactccgaggaggtctgtcggtgtgtgccttcttattggaagagacctcagatgatgtcttag

SEQ ID NO: 155978 - DNA, 1263 bp, Artificial Sequence
  derived and/or modified sequence
atgcacttactgggatttttctctgtggcctgtagtttgctggccgcagccctacttcctggccctagagaggctcccgctgccgctgccgctttcgagtccggccttgacctgtcagacgctgaaccggacgctggggaggcgacagcctacgcaagtaaagatctggaagaacagctacgctccgtgtcaagtgtcgatgaactgatgacagtgctctatcctgagtactggaagatgtataagtgtcagctgagaaaaggcggttggcagcataaccgcgaacaggccaacctgaacagtcgcactgaggaaacgattaagttcgccgcagcccactacaacaccgaaatcctgaaatcgatcgataatgagtggcggaaaacgcaatgtatgccgagggaagtttgtatcgatgtaggcaaggaattcggtgtggctaccaacacattttttaagcctccctgtgttagcgtctatcgctgcggtggatgctgcaattctgagggccttcagtgcatgaatacatcaaccagctacctcagtaagaccctctttgaaattaccgtgccgctgagccagggcccaaagcccgttacaattagcttcgctaaccataccagctgcaggtgcatgtcaaagttggacgtgtaccgccaggtccactccatcatacgcaggtctctgcccgctacactcccccaatgtcaagccgcaaacaagacctgtcccaccaactacatgtggaacaaccatatctgtaggtgcctcgcccaggaggattttatgttctcatcagatgcaggggacgattccaccgatggatttcatgacatatgcggcccaaataaagagcttgacgaggagacatgccaatgcgtatgcagagcgggtttacgcccagctagttgtgggcctcataaagagctggataggaatagttgccaatgtgtctgcaagaataaactgtttccttcccagtgtggggctaacagagaattcgatgaaaatacttgccagtgtgtatgcaaacggacctgtcccaggaatcagcccctgaatcctgggaaatgcgcttgtgagtgtacagagagcccccaaaagtgcctactcaaaggcaaaaaattccaccatcaaacctgctcctgttataggagaccctgcaccaaccgtcaaaaggcgtgcgaaccaggcttctcctactcagaggaggtgtgccgttgcgttccctcgtactggaagcgcccacagatgatgtcttag

SEQ ID NO: 155979 - DNA, 2067 bp, Artificial Sequence
  derived and/or modified sequence
gaggagggggacgagggctctggcgggtttggaggggctgaacatcgcggggtgttctggtgtcccccgccccgcctctccaaaaagctacaccgacgcggaccgcggcggcgtcctccctcgccctcgcttcacctcgcgggctccgaatgcggggagctcggatgtccggtttcctgtgaggcttttacctgacacccgccgcctttccccggcactggctgggagggcgccctgcaaagttgggaacgcggagccccggacccgctcccgccgcctccggctcgcccagggggggtcgccgggaggagcccgggggagagggaccaggaggggcccgcggcctcgcaggggcgcccgcgcccccacccctgcccccgccagcggaccggtcccccacccccggtccttccaccatgcacttgctgggcttcttctctgtggcgtgttctctgctcgccgctgcgctgctcccgggtcctcgcgaggcgcccgccgccgccgccgccttcgagtccggactcgacctctcggacgcggagcccgacgcgggcgaggccacggcttatgcaagcaaagatctggaggagcagttacggtctgtgtccagtgtagatgaactcatgactgtactctacccagaatattggaaaatgtacaagtgtcagctaaggaaaggaggctggcaacataacagagaacaggccaacctcaactcaaggacagaagagactataaaatttgctgcagcacattataatacagagatcttgaaaagtattgataatgagtggagaaagactcaatgcatgccacgggaggtgtgtatagatgtggggaaggagtttggagtcgcgacaaacaccttctttaaacctccatgtgtgtccgtctacagatgtgggggttgctgcaatagtgaggggctgcagtgcatgaacaccagcacgagctacctcagcaagacgttatttgaaattacagtgcctctctctcaaggccccaaaccagtaacaatcagttttgccaatcacacttcctgccgatgcatgtctaaactggatgtttacagacaagttcattccattattagacgttccctgccagcaacactaccacagtgtcaggcagcgaacaagacctgccccaccaattacatgtggaataatcacatctgcagatgcctggctcaggaagattttatgttttcctcggatgctggagatgactcaacagatggattccatgacatctgtggaccaaacaaggagctggatgaagagacctgtcagtgtgtctgcagagcggggcttcggcctgccagctgtggaccccacaaagaactagacagaaactcatgccagtgtgtctgtaaaaacaaactcttccccagccaatgtggggccaaccgagaatttgatgaaaacacatgccagtgtgtatgtaaaagaacctgccccagaaatcaacccctaaatcctggaaaatgtgcctgtgaatgtacagaaagtccacagaaatgcttgttaaaaggaaagaagttccaccaccaaacatgcagctgttacagacggccatgtacgaaccgccagaaggcttgtgagccaggattttcatatagtgaagaagtgtgtcgttgtgtcccttcatattggaaaagaccacaaatgatgagctaagattgtactgttttccagttcatcgattttctattatggaaaactgtgttgccacagtagaactgtctgtgaacagagagacccttgtgggtccatgctaacaaagacaaaagtctgtctttcctgaaccatgtggataactttacagaaatggactggagctcatctgcaaaaggcctcttgtaaagactggttttctgccaatgaccaaacagccaagattttcctcttgtgatttctttaaaagaatgactatataatttatttccactaaaaatattgtttctgcattcatttttatagcaacaacaattggtaaaactcactgtgatcaatatttttatatcatgcaaaatatgtttaaaataaaatgaaaattgtattataa

SEQ ID NO: 155980 - DNA, 2076 bp, Artificial Sequence
  derived and/or modified sequence
cggggaaggggagggaggagggggacgagggctctggcgggtttggaggggctgaacatcgcggggtgttctggtgtcccccgccccgcctctccaaaaagctacaccgacgcggaccgcggcggcgtcctccctcgccctcgcttcacctcgcgggctccgaatgcggggagctcggatgtccggtttcctgtgaggcttttacctgacacccgccgcctttccccggcactggctgggagggcgccctgcaaagttgggaacgcggagccccggacccgctcccgccgcctccggctcgcccagggggggtcgccgggaggagcccgggggagagggaccaggaggggcccgcggcctcgcaggggcgcccgcgcccccacccctgcccccgccagcggaccggtcccccacccccggtccttccaccatgcacttgctgggcttcttctctgtggcgtgttctctgctcgccgctgcgctgctcccgggtcctcgcgaggcgcccgccgccgccgccgccttcgagtccggactcgacctctcggacgcggagcccgacgcgggcgaggccacggcttatgcaagcaaagatctggaggagcagttacggtctgtgtccagtgtagatgaactcatgactgtactctacccagaatattggaaaatgtacaagtgtcagctaaggaaaggaggctggcaacataacagagaacaggccaacctcaactcaaggacagaagagactataaaatttgctgcagcacattataatacagagatcttgaaaagtattgataatgagtggagaaagactcaatgcatgccacgggaggtgtgtatagatgtggggaaggagtttggagtcgcgacaaacaccttctttaaacctccatgtgtgtccgtctacagatgtgggggttgctgcaatagtgaggggctgcagtgcatgaacaccagcacgagctacctcagcaagacgttatttgaaattacagtgcctctctctcaaggccccaaaccagtaacaatcagttttgccaatcacacttcctgccgatgcatgtctaaactggatgtttacagacaagttcattccattattagacgttccctgccagcaacactaccacagtgtcaggcagcgaacaagacctgccccaccaattacatgtggaataatcacatctgcagatgcctggctcaggaagattttatgttttcctcggatgctggagatgactcaacagatggattccatgacatctgtggaccaaacaaggagctggatgaagagacctgtcagtgtgtctgcagagcggggcttcggcctgccagctgtggaccccacaaagaactagacagaaactcatgccagtgtgtctgtaaaaacaaactcttccccagccaatgtggggccaaccgagaatttgatgaaaacacatgccagtgtgtatgtaaaagaacctgccccagaaatcaacccctaaatcctggaaaatgtgcctgtgaatgtacagaaagtccacagaaatgcttgttaaaaggaaagaagttccaccaccaaacatgcagctgttacagacggccatgtacgaaccgccagaaggcttgtgagccaggattttcatatagtgaagaagtgtgtcgttgtgtcccttcatattggaaaagaccacaaatgagctaagattgtactgttttccagttcatcgattttctattatggaaaactgtgttgccacagtagaactgtctgtgaacagagagacccttgtgggtccatgctaacaaagacaaaagtctgtctttcctgaaccatgtggataactttacagaaatggactggagctcatctgcaaaaggcctcttgtaaagactggttttctgccaatgaccaaacagccaagattttcctcttgtgatttctttaaaagaatgactatataatttatttccactaaaaatattgtttctgcattcatttttatagcaacaacaattggtaaaactcactgtgatcaatatttttatatcatgcaaaatatgtttaaaataaaatgaaaattgtattat

SEQ ID NO: 155981 - protein, 370 aa, Artificial Sequence
  derived and/or modified sequence
MGLWALLPGWVSATLLLALAALPAALAANSSGRWWGIVNVASSTNLLTDSKSLQLVLEPSLQLLSRKQRRLIRQNPGILHSVSGGLQSAVRECKWQFRNRRWNCPTAPGPHLFGKIVNRGCRETAFIFAITSAGVTHSVARSCSEGSIESCTCDYRRRGPGGPDWHWGGCSDNIDFGRLFGREFVDSGEKGRDLRFLMNLHNNEAGRTTVFSEMRQECKCHGMSGSCTVRTCWMRLPTLRAVGDVLRDRFDGASRVLYGNRGSNRASRAELLRLEPEDPAHKPPSPHDLVYFEKSPNFCTYSGRLGTAGTAGRACNSSSPALDGCELLCCGRGHRTRTQRVTERCNCTFHWCCHVSCRNCTHTRVLHECL

SEQ ID NO: 155982 - protein, 195 aa, Artificial Sequence
  derived and/or modified sequence
WHWGGCSDNIDFGRLFGREFVDSGEKGRDLRFLMNLHNNEAGRTTVFSEMRQECKCHGMSGSCTVRTCWMRLPTLRAVGDVLRDRFDGASRVLYGNRGSNRASRAELLRLEPDLVYFEKSPNFCTYSGRLGTAGTAGRACNSSSPALDGCELLCCGRGHRTRTQRVTERCNCTFHWCCHVSCRNCTHTRVLHECL

SEQ ID NO: 155983 - DNA, 1113 bp, Artificial Sequence
  derived and/or modified sequence
atgggcctgtgggccctgctgcccggctgggtgagcgccaccctgctgctggccctggccgccctgcccgccgccctggccgccaacagcagcggcagatggtggggcatcgtgaacgtggccagcagcaccaacctgctgaccgacagcaagagcctgcagctggtgctggagcccagcctgcagctgctgagcagaaagcagagaagactgatcagacagaaccccggcatcctgcacagcgtgagcggcggcctgcagagcgccgtgagagagtgcaagtggcagttcagaaacagaagatggaactgccccaccgcccccggcccccacctgttcggcaagatcgtgaacagaggctgcagagagaccgccttcatcttcgccatcaccagcgccggcgtgacccacagcgtggccagaagctgcagcgagggcagcatcgagagctgcacctgcgactacagaagaagaggccccggcggccccgactggcactggggcggctgcagcgacaacatcgacttcggcagactgttcggcagagagttcgtggacagcggcgagaagggcagagacctgagattcctgatgaacctgcacaacaacgaggccggcagaaccaccgtgttcagcgagatgagacaggagtgcaagtgccacggcatgagcggcagctgcaccgtgagaacctgctggatgagactgcccaccctgagagccgtgggcgacgtgctgagagacagattcgacggcgccagcagagtgctgtacggcaacagaggcagcaacagagccagcagagccgagctgctgagactggagcccgaggaccccgcccacaagccccccagcccccacgacctggtgtacttcgagaagagccccaacttctgcacctacagcggcagactgggcaccgccggcaccgccggcagagcctgcaacagcagcagccccgccctggacggctgcgagctgctgtgctgcggcagaggccacagaaccagaacccagagagtgaccgagagatgcaactgcaccttccactggtgctgccacgtgagctgcagaaactgcacccacaccagagtgctgcacgagtgcctgtag

SEQ ID NO: 155984 - DNA, 588 bp, Artificial Sequence
  derived and/or modified sequence
tggcactggggcggctgcagcgacaacatcgacttcggcagactgttcggcagagagttcgtggacagcggcgagaagggcagagacctgagattcctgatgaacctgcacaacaacgaggccggcagaaccaccgtgttcagcgagatgagacaggagtgcaagtgccacggcatgagcggcagctgcaccgtgagaacctgctggatgagactgcccaccctgagagccgtgggcgacgtgctgagagacagattcgacggcgccagcagagtgctgtacggcaacagaggcagcaacagagccagcagagccgagctgctgagactggagcccgacctggtgtacttcgagaagagccccaacttctgcacctacagcggcagactgggcaccgccggcaccgccggcagagcctgcaacagcagcagccccgccctggacggctgcgagctgctgtgctgcggcagaggccacagaaccagaacccagagagtgaccgagagatgcaactgcaccttccactggtgctgccacgtgagctgcagaaactgcacccacaccagagtgctgcacgagtgcctgtag

SEQ ID NO: 155985 - DNA, 1113 bp, Artificial Sequence
  derived and/or modified sequence
atgggcctttgggcgcttctcccaggctgggtgtccgccaccttgctgctggccttggccgcgctgcccgctgccctggcggcaaattcgagcgggaggtggtgggggattgtcaatgtcgcctccagtactaacctgctgacggactccaagtcactgcaactcgttctggagccatctctgcagctcctgagccgcaaacagcggcgcctgataaggcagaatccagggattttgcactcggtctcgggtggtctccaatcagcggtacgggaatgcaagtggcagtttcgcaacaggcgctggaactgtccgacggcccctggacctcaccttttcgggaaaattgttaaccgaggttgtcgagaaaccgcttttattttcgctattacctccgccggagtgactcactccgtagctaggtcttgctctgaggggagcatagagagctgtacctgcgactatcggcgacggggtcccggcggccctgattggcactggggcgggtgtagtgacaacattgattttgggaggctctttgggcgtgagttcgtggattcaggtgaaaaaggaagagacctgaggttcttaatgaacctgcacaacaacgaggcaggtcggacaacagtgttctccgagatgcgacaagagtgcaaatgccatggcatgtctggcagctgcactgtccgcacatgttggatgcgcctgcctaccctgcgagctgtaggcgacgtcctccgtgatcgatttgatggtgcctcccgcgttctctatggaaatcgaggcagcaatagagcgtctcgtgccgagttgctacgtttggaaccggaggatccagcccacaagcccccatccccacatgatcttgtgtacttcgagaagtcgcccaatttctgcacctactccgggcgtctcggaaccgctggcacagccggtcgcgcctgcaattcaagtagccccgcactcgatggatgcgagctgctgtgttgcgggcggggccaccgaacacgaacccaacgagttacagaaagatgcaactgcactttccattggtgttgccatgtatcttgtcggaactgcacgcacacaagggtactccacgagtgcctttag

SEQ ID NO: 155986 - DNA, 588 bp, Artificial Sequence
  derived and/or modified sequence
tggcactggggcgggtgcagcgacaacattgattttgggcgtttatttgggagggagttcgtggattccggggagaagggcagagaccttcggttcctgatgaatctgcacaacaatgaagccggccggaccacagtgttttcagagatgcggcaggagtgtaagtgtcacggcatgagcggttcctgcaccgtcagaacatgctggatgagactgccaacattaagggcagttggcgatgttctcagggacaggtttgacggagcctctcgcgtgttatatggaaacagggggtcaaatcgggcgtctcgcgcagaattgctccggctggagccagacctagtatattttgagaagtcccctaacttctgcacctactcaggtagattaggtacagccggaactgctggacgagcatgcaattcttcttcacccgccctggacgggtgtgaactgctgtgctgcggacgaggccaccgcacgcgcactcagcgagtgactgagagatgcaattgcacattccactggtgctgtcacgtgtcttgcaggaactgtactcacactcgggtcctgcatgagtgtctatag

SEQ ID NO: 155987 - DNA, 1113 bp, Artificial Sequence
  derived and/or modified sequence
atgggcctgtgggccctgctgcccggctgggtgtctgccaccctgctgctggccctggccgccctgcctgctgccctggccgccaacagcagcggccgctggtggggcatcgtgaatgtggccagcagcaccaacctgctgacagacagcaagagcctgcagctggtgctggagcccagcctgcagctgctgagcaggaagcagaggaggctcatccggcagaaccctggcatcctgcacagcgtgtctgggggcctgcagagcgctgtgcgggagtgcaagtggcagttcaggaacagacgctggaactgccccacagcccctggcccccacctgtttgggaagatcgtgaacagaggctgccgggagacagccttcatctttgccatcaccagcgctggggtgacccacagcgtggcccggagctgcagcgagggcagcattgagagctgcacctgtgactacagaagaagaggccctgggggccctgactggcactggggcggctgcagcgacaacatcgactttggccgcctgtttggccgggagtttgtggacagcggggagaagggccgggacctgcgcttcctgatgaacctgcacaacaatgaagctggccgcaccaccgtcttcagcgagatgaggcaggagtgcaagtgccacggcatgagcggcagctgcaccgtgaggacctgctggatgaggctgcccaccctgcgggctgtgggagatgtgctgcgggacagatttgatggagccagccgggtgctgtatggcaacagaggcagcaacagagccagcagagctgagctgctgcggctggagccagaagatcctgcccacaagccacccagcccccatgacctggtgtactttgagaagagccccaacttctgcacctacagcggccgcctgggcacagctggaacagctggccgggcctgcaacagcagcagccctgccctggatggctgtgagctgctgtgctgcggccggggccacaggaccaggacccagagggtgacagagcgctgcaactgcaccttccactggtgctgccacgtgtcctgcaggaactgcacccacaccagggtgctgcacgagtgcctgtag

SEQ ID NO: 155988 - DNA, 588 bp, Artificial Sequence
  derived and/or modified sequence
tggcactggggcggctgcagcgacaacatcgactttggccgcctgtttggccgggagtttgtggacagcggggagaagggccgggacctgcgcttcctgatgaacctgcacaacaatgaagctggccgcaccaccgtcttcagcgagatgaggcaggagtgcaagtgccacggcatgagcggcagctgcaccgtgaggacctgctggatgaggctgcccaccctgcgggctgtgggagatgtgctgcgggacagatttgatggagccagccgggtgctgtatggcaacagaggcagcaacagagccagcagagctgagctgctgcggctggagccagacctggtgtactttgagaagagccccaacttctgcacctacagcggccgcctgggcacagctggaacagctggccgggcctgcaacagcagcagccctgccctggatggctgtgagctgctgtgctgcggccggggccacaggaccaggacccagagggtgacagagcgctgcaactgcaccttccactggtgctgccacgtgtcctgcaggaactgcacccacaccagggtgctgcatgaatgtctgtag

SEQ ID NO: 155989 - DNA, 1113 bp, Artificial Sequence
  derived and/or modified sequence
atgggcctgtgggccctgctgcccggctgggtgagcgccaccctgctgctggccttagccgcgctccccgcagcactcgcagctaacagctcaggcagatggtggggtattgtgaatgtcgcaagttctacaaatcttctaacagacagtaagagtctgcaactcgttctagagccctcccttcagctactcagcaggaaacagcggcgcctcatccgccagaaccctggaatactgcacagcgtgtccggcggcctgcagtccgcagttcgagagtgtaaatggcaatttcgaaacaggcgctggaattgccccactgcaccgggcccacacctgtttggcaagattgttaaccgcggctgtcgagagacagcttttatatttgctattacgtccgctggtgttacacacagcgtcgctagatcctgcagcgaggggtccattgagtcttgcacttgcgactaccgccgaaggggtcccggagggcccgattggcattggggaggatgcagcgataatatcgactttggaaggctgttcggaagagagtttgtggacagtggtgagaagggcagggatcttcgcttcctgatgaatctccataacaacgaagccggccgcaccacagtgttcagcgaaatgcgccaggagtgcaaatgtcacggcatgtccggctcctgcacggtgagaacttgctggatgaggctcccgacccttcgggccgtcggggacgtactgcgcgataggttcgatggcgcctcaagagtgctctacggaaacaggggtagtaaccgggcctcgagagccgaactcctgcgcctggaacctgaggatcccgcccataaaccaccatcaccccacgatcttgtttacttcgaaaaatctccaaatttctgcacatatagcgggcggctgggaacagccggtacagctggccgagcctgtaacagttcctcccctgccctcgacggttgcgaactcctttgctgcggccgaggccacagaacgaggacacaaagagtgaccgaaagatgcaactgcactttccattggtgttgccacgttagctgccgaaattgcacgcacaccagggtgctgcacgaatgtctctag

SEQ ID NO: 155990 - DNA, 588 bp, Artificial Sequence
  derived and/or modified sequence
tggcactggggcggctgcagcgacaacatcgacttcggccggctgttcggccgcgagttcgtggactccggtgaaaagggcagggatctgcggtttttgatgaatttacataataatgaagctggtcggaccacagtgttcagcgaaatgaggcaggagtgtaagtgtcacgggatgagtggcagttgcaccgtgcgcacctgttggatgcggttaccgactttgcgagccgtaggcgacgtgctgagagaccggtttgatggcgcatccagagtattgtatggtaacaggggctctaacagagcttccagagcggagctgctgagactcgaacccgacctcgtgtattttgagaaatctcctaacttctgtacttattctgggaggctcggcactgcaggtactgccggtagggcgtgtaactccagcagccctgcccttgacgggtgtgagttgttgtgctgcggcagggggcataggacgcggacacagagagtgactgagcgctgcaactgtacctttcattggtgctgccacgtgagttgtcgcaattgcacccacacaagggtcttgcacgaatgcctttag

SEQ ID NO: 155991 - DNA, 1113 bp, Artificial Sequence
  derived and/or modified sequence
atgggactttgggctctgctgccgggttgggtttctgctactctactcctggcattggcagccctgcctgctgctttagccgctaattcaagcggcagatggtggggcatcgtcaacgtggcttcttccacaaacctactgactgactcaaaaagcctgcagttagtactcgagcccagtcttcagttgctatcacggaaacagcgtaggctgataaggcagaaccctggcatccttcacagcgtatctgggggattgcagtctgctgtgagggaatgtaagtggcagtttcgtaatagaaggtggaactgtcccaccgcgcctggaccgcatctcttcgggaagatcgtgaataggggttgtcgcgagactgcgttcatatttgccatcacaagcgccggagtgacacacagcgtcgcgagaagctgcagtgagggcagcattgagagctgtacttgtgactaccgccgtagggggcctggcggacctgactggcattggggcggatgcagcgacaacatcgactttggtagactcttcggcagagaatttgtcgattcaggagagaagggcagggatctgaggtttttgatgaacctgcataataatgaggcgggacgcaccacagtattttccgagatgcggcaagagtgcaagtgccacggtatgtctggcagctgcacagtgcgaacctgctggatgcggcttcctacgctgcgtgcagtaggagatgtcctgcgggacaggttcgacggggcttcaagagtgctgtacgggaaccggggttccaaccgagcatcccgagctgaactgctgcggttggagcccgaagatcccgcacataagcccccatcccctcacgaccttgtgtatttcgagaagagtccgaacttctgcacttactccggacgccttggtacagccggtactgctggcagagcctgtaatagcagctcccccgcacttgatggttgcgaattgctatgctgtggacgcggacaccgcaccaggacgcaacgcgtgactgagcggtgcaactgcactttccattggtgctgccacgtgtcctgtagaaactgtacacatacccgcgtgctccacgagtgcttatag

SEQ ID NO: 155992 - DNA, 588 bp, Artificial Sequence
  derived and/or modified sequence
tggcattggggaggatgttcagataatattgattttggtagactgttcggcagggaatttgttgattctggcgagaaaggacgcgatctgcgcttcctcatgaatttgcataacaatgaagctgggcgaacaacagtgttctctgaaatgaggcaagagtgcaaatgtcacggcatgtccggcagttgcactgtgaggacctgctggatgcgattgccaactttacgggctgtaggcgacgtgctgcgggatcgatttgacggggcttccagagtcctatacggcaacagggggtcaaaccgtgcaagccgtgccgagctgctgcggctggagcctgacctggtttacttcgaaaagagcccgaacttctgtacgtactccggcaggctgggaaccgcagggaccgcagggagggcctgtaactcttcttctcccgcactggacggatgcgaacttctctgttgcggcagggggcaccggactagaactcagcgtgtcactgagcgctgcaactgcaccttccactggtgctgtcacgtgagttgtaggaattgtacacatacacgggtgctccatgaatgtctttag

SEQ ID NO: 155993 - DNA, 1185 bp, Artificial Sequence
  derived and/or modified sequence
caactgcagcacagagcgggcaaagccaggcaggccatggggctctgggcgctgttgcctggctgggtttctgctacgctgctgctggcgctggccgctctgcccgcagccctggctgccaacagcagtggccgatggtggggtattgtgaacgtagcctcctccacgaacctgcttacagactccaagagtctgcaactggtactcgagcccagtctgcagctgttgagccgcaaacagcggcgtctgatacgccaaaatccggggatcctgcacagcgtgagtggggggctgcagagtgccgtgcgcgagtgcaagtggcagttccggaatcgccgctggaactgtcccactgctccagggccccacctcttcggcaagatcgtcaaccgaggctgtcgagaaacggcgtttatcttcgctatcacctccgccggggtcacccattcggtggcgcgctcctgctcagaaggttccatcgaatcctgcacgtgtgactaccggcggcgcggccccgggggccccgactggcactgggggggctgcagcgacaacattgacttcggccgcctcttcggccgggagttcgtggactccggggagaaggggcgggacctgcgcttcctcatgaaccttcacaacaacgaggcaggccgtacgaccgtattctccgagatgcgccaggagtgcaagtgccacgggatgtccggctcatgcacggtgcgcacgtgctggatgcggctgcccacgctgcgcgccgtgggcgatgtgctgcgcgaccgcttcgacggcgcctcgcgcgtcctgtacggcaaccgcggcagcaaccgcgcttcgcgggcggagctgctgcgcctggagccggaagacccggcccacaaaccgccctccccccacgacctcgtctacttcgagaaatcgcccaacttctgcacgtacagcggacgcctgggcacagcaggcacggcagggcgcgcctgtaacagctcgtcgcccgcgctggacggctgcgagctgctctgctgcggcaggggccaccgcacgcgcacgcagcgcgtcaccgagcgctgcaactgcaccttccactggtgctgccacgtcagctgccgcaactgcacgcacacgcgcgtactgcacgagtgtctgtgaggcgctgcgcggactcgcccccaggaacgctctcct

SEQ ID NO: 155994 - DNA, 588 bp, Artificial Sequence
  derived and/or modified sequence
tggcactgggggggctgcagcgacaacattgacttcggccgcctcttcggccgggagttcgtggactccggggagaaggggcgggacctgcgcttcctcatgaaccttcacaacaacgaggcaggccgtacgaccgtattctccgagatgcgccaggagtgcaagtgccacgggatgtccggctcatgcacggtgcgcacgtgctggatgcggctgcccacgctgcgcgccgtgggcgatgtgctgcgcgaccgcttcgacggcgcctcgcgcgtcctgtacggcaaccgcggcagcaaccgcgcttcgcgggcggagctgctgcgcctggagcccgacctcgtctacttcgagaaatcgcccaacttctgcacgtacagcggacgcctgggcacagcaggcacggcagggcgcgcctgtaacagctcgtcgcccgcgctggacggctgcgagctgctctgctgcggcaggggccaccgcacgcgcacgcagcgcgtcaccgagcgctgcaactgcaccttccactggtgctgccacgtcagctgccgcaactgcacgcacacgcgcgtactgcacgagtgtctgtga

SEQ ID NO: 155995 - protein, 280 aa, Artificial Sequence
  derived and/or modified sequence
MCSAFHRAESGTELLARLEGRSSLKEIEPNLFADEDSPVHGDILEFHGPEGTGKTEMLYHLTARCILPKSEGGLEVEVLFIDTDYHFDMLRLVTILEHRLSQSSEEIIKYCLGRFFLVYCSSSTHLLLTLYSLESMFCSHPSLCLLILDSLSAFYWIDRVNGGESVNLQESTLRKCSQCLEKLVNDYRLVLFATTQTIMQKASSSSEEPSHASRRLCDVDIDYRPYLCKAWQQLVKHRMFFSKQDDSQSSNQFSLVSRCLKSNSLKKHFFIIGESGVEFC

SEQ ID NO: 155996 - DNA, 843 bp, Artificial Sequence
  derived and/or modified sequence
atgtgcagcgccttccacagagccgagagcggcaccgagctgctggccagactggagggcagaagcagcctgaaggagatcgagcccaacctgttcgccgacgaggacagccccgtgcacggcgacatcctggagttccacggccccgagggcaccggcaagaccgagatgctgtaccacctgaccgccagatgcatcctgcccaagagcgagggcggcctggaggtggaggtgctgttcatcgacaccgactaccacttcgacatgctgagactggtgaccatcctggagcacagactgagccagagcagcgaggagatcatcaagtactgcctgggcagattcttcctggtgtactgcagcagcagcacccacctgctgctgaccctgtacagcctggagagcatgttctgcagccaccccagcctgtgcctgctgatcctggacagcctgagcgccttctactggatcgacagagtgaacggcggcgagagcgtgaacctgcaggagagcaccctgagaaagtgcagccagtgcctggagaagctggtgaacgactacagactggtgctgttcgccaccacccagaccatcatgcagaaggccagcagcagcagcgaggagcccagccacgccagcagaagactgtgcgacgtggacatcgactacagaccctacctgtgcaaggcctggcagcagctggtgaagcacagaatgttcttcagcaagcaggacgacagccagagcagcaaccagttcagcctggtgagcagatgcctgaagagcaacagcctgaagaagcacttcttcatcatcggcgagagcggcgtggagttctgctag

SEQ ID NO: 155997 - DNA, 843 bp, Artificial Sequence
  derived and/or modified sequence
atgtgttctgcctttcatcgcgccgagagtgggaccgagcttctggctcgcctcgaggggcgaagctctctcaaagagatcgaacctaatctgtttgccgacgaggacagccccgtacacggcgatatcctcgagttccatgggcctgaaggcaccggcaaaactgaaatgctctaccatcttaccgcccgctgtatcctgcctaagagcgagggtggactcgaggtcgaggtcctgtttatcgacaccgactaccactttgacatgttacgattggtgactatcctggaacatcgcttgagtcagtcgagtgaggaaatcattaagtattgcctggggcgcttctttttagtctattgttcctcttcaactcacctgttgctgacactctattccctggaaagcatgttctgcagccacccgtctctctgtctcctgatcctcgactctttatcagccttctactggattgatagggtcaacggcggcgagagcgtgaacctccaggagagtacgttaagaaagtgctctcagtgtctcgagaaattggtgaatgactatcgtctggtgctatttgcaactacgcagactatcatgcagaaggcatctagttcctctgaggagccttcacacgctagtcgacgattgtgcgatgttgatatagattatcgaccatatttgtgcaaggcttggcagcagttggtgaagcacagaatgtttttctctaaacaggatgactcacaatccagcaatcagtttagtctggtgtcgaggtgtttgaaaagtaactccctcaagaaacattttttcataatcggcgagtcgggtgtagagttctgctag

SEQ ID NO: 155998 - DNA, 843 bp, Artificial Sequence
  derived and/or modified sequence
atgtgcagcgccttccacagagctgagagcggcacagagctgctggcccggctggagggccgcagcagcctgaaggagattgagcccaacctgtttgctgatgaggacagccctgtgcacggggacatcctggagttccacggccctgagggcaccgggaagacagagatgctgtaccacctgacagcccgctgcatcctgcccaagtctgagggcggcctggaggtggaggtgctcttcatcgacacagactaccactttgacatgctgcggctggtgaccatcctggagcaccggctgagccagagcagcgaggagatcatcaagtactgcctgggccgcttcttcctggtgtactgcagcagcagcacccacctgctgctgaccctgtacagcctggagagcatgttctgcagccaccccagcctgtgcctgctgatcctggacagcctgagcgccttctactggattgacagagtgaatggaggagagagcgtgaacctgcaggagagcaccctgaggaagtgcagccagtgcctggagaagctggtgaatgactaccgcctggtgctgtttgccaccacccagaccatcatgcagaaggccagcagcagcagcgaggagcccagccacgccagccggcggctgtgtgatgtggacatcgactaccggccctacctgtgcaaggcctggcagcagctggtgaagcacaggatgttcttcagcaagcaggatgacagccagagcagcaaccagttcagcctggtgagccgctgcctgaagagcaacagcctgaagaagcacttcttcatcatcggggagagcggcgtggagttctgctag

SEQ ID NO: 155999 - DNA, 843 bp, Artificial Sequence
  derived and/or modified sequence
atgtgcagcgccttccaccgggccgagagcggcaccgagctgctggcccgtctagagggaagatcctctctgaaagagatagagccgaacctcttcgcagacgaggattctcccgtgcacggagatatcttggaatttcacggtccagagggcacaggcaagaccgaaatgctttaccatctgacagcccgctgcattctcccaaaaagtgagggaggcctagaggtggaggtcctctttatcgacacagattaccacttcgatatgcttagactggttaccatcctcgagcacagactttctcagagcagcgaggagatcatcaaatattgcctcggcagattttttctggtgtattgctctagctccacccatctgctgctcaccttgtactctttggaatccatgttttgcagccacccatctctgtgtctactgatccttgactcactgagcgcattctactggatcgatagggttaatggaggggaaagcgtgaacctccaggagagtaccctgcgcaagtgcagtcagtgtcttgagaaactggtgaacgattacagactcgttctgtttgcaacaacacaaaccataatgcagaaggcctcaagtagcagtgaagagccttcacatgcatcccggaggctgtgtgatgtggacatagactacagaccctatctttgtaaggcttggcaacaacttgtgaaacatcggatgtttttcagcaagcaggacgattcccagtcttcaaatcaatttagccttgttagtcggtgtctgaagagcaacagtctcaaaaagcactttttcatcattggtgaatccggcgtggagttttgctag

SEQ ID NO: 156000 - DNA, 843 bp, Artificial Sequence
  derived and/or modified sequence
atgtgttcagccttccacagagctgagagcggcaccgagctgctggctaggctggagggacggagctctcttaaggagattgaacccaatttgttcgccgacgaagactcccccgtgcatggcgacatcttggagtttcatggacctgaggggacgggtaagaccgaaatgctataccacctgacagccagatgcatcctgcccaagagtgaaggcggtttggaagtggaggtgctgttcatcgacacagactaccacttcgatatgctgaggctcgtcacaatactcgagcaccgactgtcccaaagcagcgaagaaattatcaaatactgtctcgggcgattcttcctggtttattgctcatcgtctacacatttactactgaccctctactctttggaatctatgttctgcagtcacccctctctttgcttgctcatactggattccctgagcgccttctactggatagaccgcgtgaacgggggagagtcagtcaacctgcaggagagcaccttgagaaaatgctcacagtgtctcgaaaagctcgtcaacgactatcggcttgtattattcgcgacgactcagacgattatgcagaaggcttcttcatctagtgaggagccctcccatgcctcacggcgtttgtgcgacgtggacatcgattaccgcccttacctgtgtaaagcttggcagcaattggtgaagcatcgtatgttcttttcaaaacaggacgatagtcagtcatctaatcagttttcgctggtgagcagatgccttaaatccaactcacttaagaagcacttcttcattattggtgagtctggtgttgagttctgttag

SEQ ID NO: 156001 - DNA, 3067 bp, Artificial Sequence
  derived and/or modified sequence
tttgactggccgtagagtctgcgcagttggtgaatggcgttggtggcgggaaagttgagtctctcctgcgccgagccttcggggcgatgtgtagtgccttccatagggctgagtctgggaccgagctccttgcccgacttgaaggtagaagttccttgaaagaaatagaaccaaatctgtttgctgatgaagattcacctgtgcatggtgatattcttgaatttcatggcccagaaggaacaggaaaaacagaaatgctttatcacctaacagcacgatgtatacttcccaaatcagaaggtggcctggaagtagaagtcttatttattgatacagattaccactttgatatgctccggctagttacaattcttgagcacagactatcccaaagctctgaagaaataatcaaatactgcctgggaagattttttttggtgtactgcagtagtagcacccacttacttcttacactttactcactagaaagtatgttttgtagtcacccatctctctgccttttgattttggatagcctgtcagctttttactggatagaccgcgtcaatggaggagaaagtgtgaacttacaggagtctactctgaggaaatgttctcagtgcttagagaagcttgtaaatgactatcgcctggttctttttgcaacgacacaaactataatgcagaaagcctcgagctcatcagaagaaccttctcatgcctctcgacgactgtgtgatgtggacatagactacagaccttatctctgtaaggcatggcagcaactggtgaagcacaggatgtttttctccaaacaagatgattctcaaagcagcaaccaattttcattagtttcacgttgtttaaaaagtaacagtttaaaaaaacatttttttattattggagaaagtggggttgaattttgttgatatacatcataaaatagtcttttgcagggtactacgcaagccttaaaatttttcttaagacagagtcttgctctgtctcccaggctggagtgcagtggcacaatcatggctcactgcagccttgaactcctggcctcaagggatcctcctatgtgtgcctcctagagtgcagggattacaggcgtgagccactgctcgtggccaaaagttttctttttttttttttttctttttgaaacagtcttactctgtctcccaggctgctggagtgcagtggcacaatctcggcccgctgcagcctctgcctcttgggttcaagtgattcttccacctcagcctcccaggtagctgggattacaggcacccaccaccacgcctggctaatttttgtatttttaatagagacggggtttcaccatgttggccaggctggtctcgaactcctgacctcaagtgatccacccacctcggcctcccaaagtgctaggattacaggcccgtgcccagccctaaagttttaaactctaggggaattaacagtatttctttacagaatggatttgttaaactagcacagtaaaagtaaagactattctgtttctaggctgttgaatcaaagtgattttagcaattaaactttgtattaatttaccaccaatatttcttcacaaaggaacttttaaaagattatctcagaaagtaaatctgagaggtaagaagtaataatgagtaaatggtaagtacttgagtaaatctaaagaaatattgatagtaaggcaatcctaagcaaaaagaacaaagctggaggcatcacgctacccagcttcaaactatactacaaggctacagtaaccaaaacagcatagtactggcacaaaaacacacgtagactgatggaacagaatagagaatttagaaatgagaccacacacctataatttttttgatcttcgatgaacctgacaaaaacaagcaatgggcaatggattctctattcaataaatcgtgctgggataactggccagccatatggaaaagattgaaaatggacgccttccttatgccatatacaaaaattaactcaagatggattaaagacttaatgtaaaacccaaaacagtaaaaatcctggaagacaacccaggcagtaccattcaggacataggcacaggcaaagatttcatgacgaagacgccaaaaacaattgcaacagaagcaaaaattcacaaatgggatctaattaaactaaagagctgcacagcaaaagaaactatcaagagagtaaacagacagcttacagaatgggagaaaattgttgcaaactatgcatctgagaaaggtctgaaatccagcatctatacgtaatttaaacaaatttagaagaaaaaaccaccccattaaaaagtgggcaaaggacatgaacagacacttttcaaaagaagacatctgtggccaacaatcctatggaaaaaagcccagcatcactgatcattagagaaatgcaaatcgaaacaacaacgagataccatctcacaccagtccaaatggctattataaaaatgtcagaaaataacagatgctggtgaggttgtggagaaaaagatatgcttatacactgttggtggaaatgtaaattaaattagttcagccattgtggaagacagtgtggggataaagacagagataccattcaacccagcaatctcattactgggtatatacccaaaggaatagaaatcattgttataaagacacatgcacgcgtatgttcgttgcagcactgcccatcagtgacagactggattaaaaaaatgtggtacatacacaccagggaatactatacagccataaaaaggaacaagactgactgggcgtggtggctcatgcctgtgatcctagcactttgcgaggccgaggtgggtggattgcccgcgctcaggaggtcaagaccagcctgggcaacacggtgaaaccccatctctattaaaatacaaaaaattagctgggcatggtggtgcgtgcctgtagtgccagctactcaggaggccgaggcaggagaattgctggaacccaggaggtggaggttgcagtgagctgagatcgcgccattgcactcccgcctgggcgactccatctct

SEQ ID NO: 156002 - protein, 153 aa, Artificial Sequence
  derived and/or modified sequence
MASPDPPATSYAPSDVPSGVALFLTIPFAFFLPELIFGFLVWTMVAATHIVYPLLQGWVMYVSLTSFLISLMFLLSYLFGFYKRFESWRVLDSLYHGTTGILYMSAAVLQVHATIVSEKLLDPRIYYINSAASFFAFIATLLYILHAFSIYYH

SEQ ID NO: 156003 - DNA, 462 bp, Artificial Sequence
  derived and/or modified sequence
atggccagccctgatccaccagcaacctcttacgccccctcggacgtccccagcggcgttgcactgttcttgacaattccatttgccttcttcctgcccgagctcatcttcgggtttctggtttggacaatggtagccgctacacacattgtgtaccctttactgcaggggtgggtaatgtacgtgtcactaacctcgtttcttatcagcctgatgtttctgctcagttacttgttcggtttttacaagaggttcgagtcctggcgggtactggactcgctctaccacggcaccaccgggatcttgtacatgagtgccgctgtcctgcaagtgcacgcgacaatcgttagcgaaaagctgctggatcccagaatttactatataaattccgcagctagtttcttcgcatttatcgctacgcttctgtatatactacatgccttctccatctactatcactag

SEQ ID NO: 156004 - DNA, 462 bp, Artificial Sequence
  derived and/or modified sequence
atggccagcccagaccccccagccaccagctatgcccccagtgatgtgcccagcggcgtggccctcttcctgaccatcccctttgccttcttcctgcctgagctgatcttcggcttcctggtgtggaccatggtggccgccacccacatcgtgtaccccctgctgcagggctgggtgatgtatgtgtccctgaccagcttcctgatcagcctgatgttcctgctgagctacctgtttggcttctacaagagatttgagagctggagggtgctggacagcctgtaccacggcaccaccggcatcctgtacatgtctgctgctgtgctgcaggtgcacgccaccatcgtgtctgagaagctgctggacccccgcatctactacatcaacagcgctgccagcttctttgccttcatcgccaccctgctgtacatcctgcacgccttcagcatctactaccactag

SEQ ID NO: 156005 - DNA, 3061 bp, Artificial Sequence
  derived and/or modified sequence
actagaggcagcagccagccagcccagcccttctctggtgcctgccggtgtggtcctctcccagagactggggggccttcatctgccccatgaggaaaagaggagtggaggaccatggaaagggatccagaaaaagaaggaaacaccaagtcccaggggcatgagctggaagggagggctgctcctcccaggggaggctggggactgagagctgtccccaagagtggaaaaggagggagctgggcaagacccagcattgttagtaaccagctctgtggtcttgacttgacctcactgattctcagtctcctcacttggaaaagggcaaaacagccacgtgcaggccgtggtgggcacccgggctgtctgcagatagcttggctcattgttggtcctcagtacgcagccctcgtagccaagcagcttgggcctacactctgggcccaggggagtggctgtcgctggcatcccctggaataacatgctccgggggtcaaagattccttagctggaaaggtctaggaggagactcccgctctgctccctcctgcaccagcgctgtgccccccgccggccaggcagagccatccgatgccgctgggccgcccactgaggatctgctggctgcagcgagtggaaggacctgctcggctggaacgttttttttttttttccctcccaggcgacgtccgatgggtgtgtcgggcaggaggtgatatttgacaggctgcgcgcgggcgagctgccgcggagcacccggcaggggctgacagcatggcctcgcccgacccgcccgccaccagctacgccccgtccgacgtgccctcgggggtcgcgctgttcctcaccatccctttcgccttcttcctgcccgagctgatatttgggttcttggtctggaccatggtagccgccacccacatagtataccccttgctgcaaggatgggtgatgtatgtctcgctcacctcgtttctcatctccttgatgttcctgttgtcttacttgtttggattttacaaaagatttgaatcctggagagttctggacagcctgtaccacgggaccactggcatcctgtacatgagcgctgccgtcctacaagtacatgccacgattgtttctgagaaactgctggacccaagaatttactacattaattcggcagcctcgttcttcgccttcatcgccacgctgctctacattctccatgccttcagcatctattaccactgatgcacaggcgccaggccaagggggaaatgctctttgaaagctccaattattggtccccaaaagcagcttccaacgtttgccatctggatgacaaacggaagatccactaaaacgtccacgggattaacagaacgtccttgcagactgagcgatgacaccacactttgtttggacatttaaattcactctgctgaataggaggaagcttttctttttcctgggaaaacaactgtctcttggaattatctgaccatgaacttgctcttctagacaactcacatcaaagccctcactccactaatggagaatcctagccccactaatgccaagtctgtttggggattttgcctcagctatgggcttccctagagtaggtctaggggaatactcagtctgatcttttttttgtttgttttattttgttttttttgagacggagtctcgctcttcctccaaggctggagtgcagtgacgcgatctccactcactgcaggctccgcctcccgggttcccgccattctcctgcctcagcctcccgagtagccgggactacaggcgcccaccaccgtgcccggctaatttagttgtatttttagtagagatggggtttcaccgtattagccaggatggtctcgatctcctgacctcgtgatccgcccgcctcggcctcccaaagtgctgggattacaggcgtgagccaccgcgcccggcctgattctcttaaaattgaagaggtgctgccaaggccttcagatctaacgcagatgcatagaccttgttcctggtacttgttcagcctgtgctggggagccgtggtcccgagttccctgggaggctgacagggtcaagccaccctgcccaccaccctcccacttcccctcccctttcctctccagcattaggattcaagggaaatttgcatgaagccaattttgagggtagacgtgtggggaaaataaatcattatacagtaagacctggggcttgaggggtggggaatggggagggaagggcatagcctgctcctccatgagtctgacatctcggaaactgagcagctgccggacgcctgggtcaggaatccaagaccccacctcttaaggactggttcctcagaaagcaccctcagggaaaaaggtgaaaacattacatccgtggattctcctgccacaaccgcattggaagaaaaggctgccgcaacatctcagcgaggagtgaaggacccatgtcccaggaaccgcgctgcgccacctgcactcacccccctcacattctcttaagcacccggtggccctccgaggcctggcggaatggtggtgcccacggggttgggcaagggctcaccaggacctcaacgggcaaagttgtgcacactaaaatatcaaatcaaggtgcttggttttaaagtaaatgtttttctaaagaaagctgtgctcttctgttgacccagacgaatagggcacagccctgtaactgcacgtgccttctgtcattgggaatgaaataaattattacgagaaagggacttgtcctaactggtttgaggccttacagttttgtatctacatttttcccctcctggggtttgcggggacagggacagaactacaggagtcatgggaaagaaaattctggcttcactactgctcactgctcactttctgatcactctgatacttttttttttttttttttttttgcaacctgataccttgaaaagcttctatgtgtctctccttttgttgcctggcagctgtctaggatgatcactgattactatttactaagtagccacatgcaaataaaagttgtttggtaaaaagga

SEQ ID NO: 156006 - DNA, 462 bp, Artificial Sequence
  derived and/or modified sequence
atggccagccccgacccccccgccaccagctacgcccccagcgacgtaccatccggcgtggcgctgttccttacaatcccgttcgcgtttttcctgcccgagctaattttcggatttctggtttggactatggtggctgcaacgcacattgtataccccctgctgcagggctgggtaatgtacgtgagcttaacttcctttttaatttctctcatgttcctgctcagctaccttttcggattttataagcggttcgaatcgtggcgagtacttgactcattgtaccatggcacaacggggatactgtacatgtcagctgctgtccttcaagtacacgccaccattgtttccgagaagctgcttgatccccgcatttactatattaacagcgccgctagcttttttgctttcatagcaaccctcttgtatatcctacatgccttcagtatttactatcattag

SEQ ID NO: 156007 - DNA, 462 bp, Artificial Sequence
  derived and/or modified sequence
atggcctcacccgaccctcctgccacctcttatgccccatccgacgtgccctccggggtggctttgtttctcacaatcccatttgcctttttccttccagaactgatctttggattcctcgtatggacgatggtggcagcgacccacatagtgtatccgcttttgcagggatgggtaatgtacgtgtccctcacctccttcctgataagtttgatgtttctgttgtcctatttatttggtttctataaacgattcgagagctggcgagtgttggatagtttataccacgggaccacaggaatactatacatgtctgcagctgtcttacaagtccatgccaccatcgtttctgaaaagctgctggatcccagaatttactacattaattcagccgcatcattttttgcatttattgcaaccctgttatacatactacatgcattttctatctattaccactag

SEQ ID NO: 156008 - DNA, 462 bp, Artificial Sequence
  derived and/or modified sequence
atggccagccccgacccccccgccaccagctacgcccccagcgacgtgcccagcggcgtggccctgttcctgaccatccccttcgccttcttcctgcccgagctgatcttcggcttcctggtgtggaccatggtggccgccacccacatcgtgtaccccctgctgcagggctgggtgatgtacgtgagcctgaccagcttcctgatcagcctgatgttcctgctgagctacctgttcggcttctacaagagattcgagagctggagagtgctggacagcctgtaccacggcaccaccggcatcctgtacatgagcgccgccgtgctgcaggtgcacgccaccatcgtgagcgagaagctgctggaccccagaatctactacatcaacagcgccgccagcttcttcgccttcatcgccaccctgctgtacatcctgcacgccttcagcatctactaccactag

SEQ ID NO: 156009 - protein, 1597 aa, Artificial Sequence
  derived and/or modified sequence
MEAEEAQRGASPPISAIEEFSIIPEAPMRSSQVSALGLEAQEDEDPSYKWREEHRLSATQQSELRDVCDYAIETMPSFPKEGSADVEPNQESLVAEACDTPEHWEAVPQSLAGRQARTLAPPELWACPIQSEHLDMAPFSSDLGSEEEEVEFWPGLTSLTLGSGQAEEEEETSSDNSGQTRYYSPCEEHPAETNQNEGSESGTIRQGEELPPEELQESQGLLHPQEVQVLEEQGQQEAGFRGEGTLREDVCADGLLGEEQMIEQVNDEKGEQKQKQEQVQDVMLGRQGERMGLTGEPEGLNDGEWEQEDMERKAQGQGGPEQGEERKRELQVPEENRADSQDEKSQTFLGKSEEVTGKQEDHGIKEKGVPVSGQEAKEPESWDGGRLGAVGRARSREEENEHHGPSMPALIAPEDSPHCDLFPGASYLMTQIPGTQTESRAEELSPAALSPSLEPIRCSHQPISLLGSFLTEESPDKEIDQNSQQEESRLRKGTVSSQGTEVVFASASVTPPRTPDSAPPSPAEAYPITPASVSARPPVAFPRRETSCAARAPETASAPLSMDDPSPCGTSEMCPAALYGFPSTGTSPPRPPANSTGTVQHLRSDSFPGSHRTEQTPDLVGMLLSYSHSELPQRPPKPAIYSSVTPRRDRRSGRDYSTVSASPTALSTLKQDSQESISNLERPSSPPSIQPWVSPHNPAFATESPAYGSSPSFVSMEDVRIHEPLPPPPPQRRDTHPSVVETDGHARVVVPTLKQHSHPPPLALGSGLHAPHKGPLPQASDPAVARQHRPLPSTPDSSHHAQATPRWRYNKPLPPTPDLPQPHLPPISAPGSSRIYRPLPPLPIIDPPTEPPPLPPKSRGRSRSTRGGHMNSGGHAKTRPACQDWTVPLPASAGRTSWPPATARSTESFTSTSRSKSEVSPGMAFSNMTNFLCPSSPTTPWTPELQGPTSKDEAGVSEHPEAPAREPLRRTTPQQGASGPGRSPVGQARQPEKPSHLHLEKASSWPHRRDSGRPPGDSSGQAVAPSEGANKHKGWSRQGLRRPSILPEGSSDSRGPAVEKHPGPSDTVVFREKKPKEVMGGFSRRCSKLINSSQLLYQEYSDVVLNKEIQSQQRLESLSETPGPSSPRQPRKALVSSESYLQRLSMASSGSLWQEIPVVRNSTVLLSMTHEDQKLQEVKFELIVSEASYLRSLNIAVDHFQLSTSLRATLSNQEHQWLFSRLQDVRDVSATFLSDLEENFENNIFSFQVCDVVLNHAPDFRRVYLPYVTNQTYQERTFQSLMNSNSNFREVLEKLESDPVCQRLSLKSFLILPFQRITRLKLLLQNILKRTQPGSSEEAEATKAHHALEQLIRDCNNNVQSMRRTEELIYLSQKIEFECKIFPLISQSRWLVKSGELTALEFSASPGLRRKLNTRPVHLHLFNDCLLLSRPREGSRFLVFDHAPFSSIRGEKCEMKLHGPHKNLFRLFLRQNTQGAQAEFLFRTETQSEKLRWISALAMPREELDLLECYNSPQVQCLRAYKPRENDELALEKADVVMVTQQSSDGWLEGVRLSDGERGWFPVQQVEFISNPEVRAQNLKEAHRVKTAKLQLVEQQA

SEQ ID NO: 156010 - protein, 398 aa, Artificial Sequence
  derived and/or modified sequence
MASSGSLWQEIPVVRNSTVLLSMTHEDQKLQEVKFELIVSEASYLRSLNIAVDHFQLSTSLRATLSNQEHQWLFSRLQDVRDVSATFLSDLEENFENNIFSFQVCDVVLNHAPDFRRVYLPYVTNQTYQERTFQSLMNSNSNFREVLEKLESDPVCQRLSLKSFLILPFQRITRLKLLLQNILKRTQPGSSEEAEATKAHHALEQLIRDCNNNVQSMRRTEELIYLSQKIEFECKIFPLISQSRWLVKSGELTALEFSASPGLRRKLNTRPVHLHLFNDCLLLSRPRESEKLRWISALAMPREELDLLECYNSPQVQCLRAYKPRENDELALEKADVVMVTQQSSDGWLEGVRLSDGERGWFPVQQVEFISNPEVRAQNLKEAHRVKTAKLQLVEQQA

SEQ ID NO: 156011 - protein, 519 aa, Artificial Sequence
  derived and/or modified sequence
MGGFSRRCSKLINSSQLLYQEYSDVVLNKEIQSQQRLESLSETPGPSSPRQPRKALVSSESYLQRLSMASSGSLWQEIPVVRNSTVLLSMTHEDQKLQEVKFELIVSEASYLRSLNIAVDHFQLSTSLRATLSNQEHQWLFSRLQDVRDVSATFLSDLEENFENNIFSFQVCDVVLNHAPDFRRVYLPYVTNQTYQERTFQSLMNSNSNFREVLEKLESDPVCQRLSLKSFLILPFQRITRLKLLLQNILKRTQPGSSEEAEATKAHHALEQLIRDCNNNVQSMRRTEELIYLSQKIEFECKIFPLISQSRWLVKSGELTALEFSASPGLRRKLNTRPVHLHLFNDCLLLSRPREGSRFLVFDHAPFSSIRGEKCEMKLHGPHKNLFRLFLRQNTQGAQAEFLFRTETQSEKLRWISALAMPREELDLLECYNSPQVQCLRAYKPRENDELALEKADVVMVTQQSSDGWLEGVRLSDGERGWFPVQQVEFISNPEVRAQNLKEAHRVKTAKLQLVEQQA

SEQ ID NO: 156012 - protein, 797 aa, Artificial Sequence
  derived and/or modified sequence
  misc_feature (1)..(1): Xaa can be any naturally occurring amino acid
XVVVPTLKQHSHPPPLALGSGLHAPHKGPLPQASDPAVARQHRPLPSTPDSSHHAQATPRWRYNKPLPPTPDLPQPHLPPISAPGSSRIYRPLPPLPIIDPPTEPPPLPPKSRGRSRSTRGGHMNSGGHAKTRPACQDWTVPLPASAGRTSWPPATARSTESFTSTSRSKSEVSPGMAFSNMTNFLCPSSPTTPWTPELQGPTSKDEAGVSEHPEAPAREPLRRTTPQQGASGPGRSPVGQARQPEKPSHLHLEKASSWPHRRDSGRPPGDSSGQAVAPSEGANKHKGWSRQGLRRPSILPEGSSDSRGPAVEKHPGPSDTVVFREKKPKEVMGGFSRRCSKLINSSQLLYQEYSDVVLNKEIQSQQRLESLSETPGPSSPRQPRKALVSSESYLQRLSMASSGSLWQEIPVVRNSTVLLSMTHEDQKLQEVKFELIVSEASYLRSLNIAVDHFQLSTSLRATLSNQEHQWLFSRLQDVRDVSATFLSDLEENFENNIFSFQVCDVVLNHAPDFRRVYLPYVTNQTYQERTFQSLMNSNSNFREVLEKLESDPVCQRLSLKSFLILPFQRITRLKLLLQNILKRTQPGSSEEAEATKAHHALEQLIRDCNNNVQSMRRTEELIYLSQKIEFECKIFPLISQSRWLVKSGELTALEFSASPGLRRKLNTRPVHLHLFNDCLLLSRPRESEKLRWISALAMPREELDLLECYNSPQVQCLRAYKPRENDELALEKADVVMVTQQSSDGWLEGVRLSDGERGWFPVQQVEFISNPEVRAQNLKEAHRVKTAKLQLVEQQA

SEQ ID NO: 156013 - DNA, 155952 bp, Artificial Sequence
  derived and/or modified sequence
gatcagatgattatgatggaagcctctgctaaagaaccactgcttttctatcaggattcctaaacctggcttctcatcctaatcataatcatcttaaaaacaaacaacagtcaggcccagtggctcatgcctgtaacctctgcacccagggaagccaagggaggaggatcccttgaggccaggggttcaaaatcagtctgggaaaatagagagtactgagaccccatctctacaaacaaattaaaaattagctgtacatggtggtgtgtacctgtagtcccagctaccagggaggctgaggtgagaggatggcttgagcccaggagttcaaggctgcagtgagctatgatcacgccactgcactccagcctaagcgacatagcaagactctgtctcatagatagatagatagatagatagatagatagatagatagatagattgatagacagatggattttaaggaaattttgctgatttgccaggtttgggagccactgtgtcagaagtgttcaaaccacagtgactccatcataaatagggacttgataaaacaaagctgagacctatggggctacattcccaggaggttaggcgttcttagtcacaggatgagataggggtcggcacaagatacaagtcacaaggaccttgctgataaaacaggatacagtaaagacaccagccaaaacccaccaaatccaaaacagtgatgaaagtgacctctctggtcatccttactgctcattatatgctactcataattcattagcatgcgaaaagacactcccaccagtgccatgacaacttaaaaatgccaggcagtgtctgaactttagaccctatagggtctaaagtggagaggaaccctcagttctgggaactgcctgtacctttcttggaacactcatgagtaatccacccattgtttagcatataatgaagaaataactgtaagtatactcagtcgaacagcccattcttttattcctttgctttcttaataaacttgctttccctttacgggcttgccccaaattcgttcttgtgcaaggcccgtgaacactcccttggggttgggaccagaacctctttctggtaacaaatacagtagagccagaactccactaaatgaactttactggttatagtctctttaagaacaggaattgggctgggcgcggtggctcacgcctgtaatcccagcactttgggaggctgaggcgggaggatcatgaggtcaggagatcaagactatcctggccaacacggtgaaaccctgcctctactaaaaatacaaaaaattagccgggcgtggtggcgggcgcctgtagtcccagctactcaggaggctgaggcaggagaatggcatgaacccgggaggtggagcttgcagtgagcctagatcatgccactgcactccagcctgggccacagagcgagactccatttcaaaagaataggaattggctgagtgcagtggctcacgcctgtaatctcgccagcactttgggaggttgaggcaggtggatcatttgagcccaggagtttgagaccagcctgggcaacaaagtgggacccccatctctacaaaacaatacaaaaattagccaggcatggtggtgtgcacctgtagtcccagctactcgggaggctgaggtgggaggattgcttgagcctgggaggtggagactgcagtaagccatgatagcaccactgcactccagtctaggcaacaaagcgagaccctgtatcaaaaaaataaaaataaaaaataaggaacagggatcattcccatccccatccctatcttccaaaaattttggatggggaaatttccaaaacatcccaaatccaaacatttcaaaagacaaaaagcaagacaacctgaataacagcgcttctagggattgctcactgtagggcaggcaggcaaggacccactccctcttcatgactgcaacacctcaccatagctataaccagcctccaggaggacctgggcattctcagacattatgtaccagacgttttggaaatgttcaactgaatgagatttggaagtatacatatttttctatgatatatgcactcaagttaaaaatgtctttgtacaggagattcgaaaaatatgagcctctagtctagagacttaggaagagtgatggtgtaactgctgacctacaagcatcacacagaggcatcatcactttggcattggtttataaactcaccgacaagataatcttttcctcctccaaactcccatggcacctctagcataaagtgcactgcacttcaacactgttgttcatctgtcacatccattacactgtgagctccttgacatcagggtaggcaacctattcatcttttagaacccagcagagctggtaagaggctattctttttttttttttttttttttttgagatggagtcttgctttgttgcccaggctggagtgcagtggtgcaatctcggctcattgcaatctccacctcctgggttcaagcgattctcctgtctcagtctcccgagtagctgggattacaggtgcaagccactgagcctggctaatttttgtattttttttagtagagacagggtttcgccatgttggccaggctggtcttgaactcctgacctcaggtgatctgcccacctcgacctcccgaagtgctgggattacaggcgtgagccaccacacccggccagggctgttctttttttttaaggcaatggcactctttccatctcttcctcctgaccattccaccaaacatctcccacagatacaaaccatagagaatatcaggtattttcaactttgctaatcaactctttaaaatgatagtccattttagaacttgaacaaatatttactataccatttatcgaccccaagttgggctttcctcctcttaaagaagttcagtgaactacaagaatttgtggattaaaaaaaaaaaaatttaacccaaagactcctagtgacctttgctggagctaacacagcatctcttaatccagctctaaaggatgtgaagagctccaggcctgaggcaccatgctgtgcagcaatttacttcttcattgcaccaggctcatccctcattgcccacagcatccaggggtaaactcggaacaaaagattgcttacactttcataacttcaaaaattacatcacacatgcatgtccagtgttaaactacaactgattacatgtactgtctaacgaaattgttgaatacttgctctgcttttctccctgttggccttacaatccctgtttctaatttccttccatcctcgggtcataaaactttatacccagtggcctggcacaaaagtttcttttcttgtttccctaatatccttaaagcaggcattgcagtccactgtacttcttccttctatacaagctggaacaccctgagtcctaagctttactgtgcttaagaatgacccgtgggaggctgaggtgtgtggttcacgaggtcaggagttcaagaccagcctggccagtatggtgaaaccccatctctactaaaaatacaaaaacattagccaggcgtagtggcgggcgcctgcaaccccagctacttaggaggctgaggcagagaactgcctgaacctgggaggcggaggttgtagtgagccaagatcatgccactgcactccagcctgggcaacagagtaagactccatctcaaaaaaaaagaatgactcacaaagcgaattggagactccaatgcaggtgtaccacaaactacactttgatctatggtgtggcagatgtcacagccggatcacccgcacatccacaaactatacgttgagaccctccgcacacttagttgttatatacattattaataattcacaagtgaacacaactgtgaattattaaaaattcacaattcattcattcattcaggtcgaggtggtctctttcacttcttaaactcccatccttttcctacacccatgacttaatatctctgagaataagtgagtttctaaatgtctgagttaatagaaacattctttttacaagcaaaacagaccatttcctcagtaacccttcccagaaccacccatcttaccactcttaccactactgattaaaaaaaagaaaaacaggtagtgccgatcaaaccaggcaagctgaagcccatggctcctggacacaaatgatgacagctgtgactaaactcctaggcaaggctctttgatgtgtctatctggccaataggcctctacatcttgaaagcaaagtagcaacattgagaaaaaaaagggccaggctgtgaaatgcaagttcaaagcaagcagcaaagtattaatagttgagcttctttctgcaaataaaacacagagctctagaggcagcccctgcaaaatcaagagcagaactcctcaaggagtcctctcacaaacagagaagtactcagagaggacatcattttattcacctccaacagtcaattcttcaaatctgacttgatcattttatcttcaaaaaacagtcagcacggccgggcgcggtggctcacgcctgtaatcccagcactttgggaggccgaggcgggcggatcacgaggtcaggagatcgagaccatcccggctaaaacggtgaaaccccgtctctactaaaaatacaaaaaaattagccgggcgtagtggtgggcgcctgtagtcccagctacttgggaggctgaggcaggagaatggcgtgaacccgggaggcggagcttgcagtgagccgagatcccgccactgcactccagcctgggtgacagagtgagactccgtctaaaaaaaaaaaataaaaaaaataaataaataaataaataaaaaaacagtcagcacaatactaaaatccattccctgtcttattttcccattgcccctgcattcgttcaaggtgtcttcttttcttacctccatgactacaatatccatctaattgctacaacagctgattgccttccttgcccctccacttcactatccacaccagtccattctctcaactgcccccagagcttttttttctaaatctaaccttagaatctgatctcatcatgaccttgcttgaaacccttccaaggaggcctatccccagaaggatgaagtccaaactcagtagcaggaatggcctacaaggcctttcatgatttggctgcccgactacccttccaacttcattctctgccatttcttcaccacatctcatgttaaacccacactatttgcacatccctgaacagagggtgctcaggcttgtatttttgcatatttcacttctgctattggtatgcttttcctatatcctcctctataccaggttaacagaatttttttttttttttttttttgagacagattctcgctctgtcgcccaggctggagtgcagtggtgcgatctcggctcactgcaagctctgcctcccaggttcacgccattctcctgcctcagtctcccaagcccggctaattttttttgtatttttagtagagacggggtttcaccatgttagccaggatggtctcaatctcctggcctcgtgatcccccgcctcggcctcccaaaatgctgggattaaaggcatgagccaccatgccggccagtaacagaatatttttaaaagacaagtcaactcaaatctcaccttcgccgggcacgttggctcacacctgtaatcccagcactttgggaggccaaggtgagtgaattgcttgagtcaaggagttcgagaccagcctgggtaacatgacaaaactctgtctttacaaaaatataccaaaaattagccaggtgtgcatggtggtacacatctctagttccagccccaggaggctgaggtgggaggatcacctaaacccaggagtttgaggctacagtgagccatgattgcgccactacactccagcctaggtgacacagtgagaccctatctcaaaaagaaaaaaatatatataatccaccttatccattcaggcttctctgattccccaaggagtgccacctactctctcctttatgcttccattgtactttgtgtccatctcaacataacacttaccatgctctgctgccattatttgctacctgtttctctcctcaatcagattgagagcttcttgaaagcagagatcttgtctttgtatatctggtttctaagaatgcatactgagtaaatgaatagaagaaaaaatgaatgaggcaattagtatgtatgccttgaatggcattaaatttaggcctatgccaatcaatgtgtaaaggttgagaaaataaataaggggaagccaaggatagaaaataaaaccatgctcatcagaatagaagaggataggctgggcgcagtggctcacgcctgtaatcccaatcacttggggtcaatagtttgagatgagcctggccaacatagtgaaaccccatctctactaaaaacacaaaattagccaggcttggtggtgcgcacctgtaatcccagctactggggaggctgaggcaagagaatcacttgaacctaggaggcagaggttgcagtgagcctagatcgtgccactgcactccagcctgggctggacagagcaagactccatctctgaaaaataaaataaaataaaataaaacaaaaaaacagaatagaagaagatagctaagaaccacagtggtcaagccagcctggcttcaacagagatgaatggagagaccacggtcagccccattaacagaagaactggggccaggaacggtggctcatgcctataatcccagcactttgggaggccgaggcaggcagatcatgaggtcaggagttcgagaccagcctgaccaatatggtgaaaccccatctctactaaacatacaaaaattagccgggtgtggcagcacatgcctgtcatcccagctactcaggaggctgaggcaggagaaacgcttgaacccaggaggcagaggtagccatgagccgagatcacgccattgcactccagcctggcgacagagcgagactccatctcaaaaaaaagaagaactgagttcaaaatcagttcgaaaggttcaatgttgggtcacaggatcaggcaaaaagcagaggcagaaaggccttaggagtgttccaagaactagcactggaccagctgagagtcagagagagttcaccacgtgggaacaatgcagccagtcatgtgggatggtggcaccatgacagtatctagtcaggacaatgacagccctagggataatgctgatgagttcctgcttcaaaaaaggtcattgtcattcctttagtcctgatacctagaactatacaagattgttccctgcctctccccaagccccataacttgatcttaaaggcattattgtcaattaaagtagtcccaagttctagaagctatttttattcagcctcgtctaatagggctttcattttaaaatagctttattttgaatctatttactgttcccagcccctatcactttgttcttataaacatattcattccacatgcatcactgacaggcactgctaggaaaggaaactaacccatcttggccacctttacacatcaggtacttatactaaggtgatttctatatattacagtattgaatcaccacaacaatccagtgacgtaggtatcattacatattattatccccaattaagacattagggaaatgaaacgtaggaagattcagagaaagcacaggaaggtgaatatgcccaagatttcacattaagtaaatggaatgcaggattcaaatttacccctgtctgaatctaaatctcattctctttccatggcatcattctctctcctctctaggcctttatagaggaaatataggcccaaataaaatatcaaaatctcaggatgggatgacaggcttgattaagaaacccagtcaccaagaccacgcagtaagaaatgaaaaagaaaaaaaataataaaatgctgagaaccatagtctgcaaagtgaaaggaagaatacctgggagagctagagtgacctccacatgcaaatacaccctgcagacaggaacagtcttgatgggaagagcaaactccctaaatggtcggttgtaactttcctactagttgaaaagtcaggaaaagccttgtgtgctaactctctggacaagcgcacaagaatccagggttgtgacttcaaaaaaaaatatgctgacaagtcagagctggcagaacaagaggaggtcgagttgatgagaaaagagagagagagagagagagagagagagagagcgctgtaatcaaggagaaccaactgaagctggagggaagcagaaagaatagccaggctggttcaggaggcagttctggtacctctgaccccattgcccacccccagtaggcagcatgaaatatgccagaggtcaacaattttttttttttttgtattttttagacagagtctcactctgtcacccaggctggagtgcagtggtgcaatctcagctcactgcagcctctgcctcctgggttcaagcaattctcctgcctcagcctcccaagtagctgggaatacgtgcccaccaccaagcccagctaatttttgtattttcagtagagaaggggtttcgccatgtttggccaggctggcctcaaattcctgaactcaggtgatccaccggccaaggcctcccaatgtgctgggattacagttgtgagtcaccgcacccgacccagaggtcaacagcttctgccctagatcagaagtttactcactttgctcactcggtataaatcaaggaccctctcatacctgggaatgagttttgtattccagcctagaagtagagccagtcccagtttgaactttttgcctttctgtactcccagttcttacccttttgctgagcctaggacacatgcaaggcctgcccttcttaatccagatttttgagtcttaatcccaatttttcctatagtttcccatacactccatggcagcttagagtaggctgaaaactgctgaactgtttaagacttaatccttcagagtaacatggcagaagtagcacacttttttaacataaagctgttcaggactctattacagaagaggctatacttccttaattacattctattctacagccacctcaaaataactagtgaacacgttcaaccaggatcattggcaacagccaatgggcacagtgatctggaaatggtctagccaagctgtttgggctgtagaccatggcattcctaagagcaaaataggcaaggagtccattaatatttcacttgacttatgtcaccatggaaacccctggagtagtgaatggctttggggagtggtcagattcaaccaaaaataacagaaatctctgtcccccaggtaaaggattcctactttgtgtgtgtctgtgtgtgcacacaggcacactcgagagacttttggcattctttgaagtcactggaggggcacagagataaacccactcagccttggcctccaagactaacagaacacaacgtttccctgaaagaataaaaaaaaaaatacaggcataagaaaacacacaaacatgggcttagagatttaaatacacacacacacacacacacacacacacacacacaggccctagaaggaacatacaccctgagatacgcactcattctaaaataaactcgggaatacagaaggacacgggcatgtcctttcagagaggcacacttctaggccctaagtaggagaaggaagaggggagaggaagaggcagggagagggacagggaggggggaggagggagggagagagagagagaaacgaagaagggggcggaggaggagatggaggagacactctttattctataggaggagacatcacggaagagaaatcaacactgaggccttggccgggcgcggtggctcacgcctgtaatcccagcactttgggaggccgaggcgggtgcatcacctgaggtcaggagtttccagaccagcctggccaacatggcgaaacccggcctctactaaaaaatacaaaaattagccgggcatggtggcgcggacctgtaatcccagctactcgggaggctgaggcaggagaatctcttgaacccggagacggaggttgcagtgagccgagatcgcgccattgcactccagcctgggcaacagggcgagactccgtctcagaaacaacaacaacaacaacaacaacaacaacatcaacaacaacaacaacaacaacgaacaaaccaaaaaccaatgaggcctgaagataaagacacatgtacaaccacggatgtcagacttccagaggcacggccaaggcaaaagacaaacacatacagactgcagcaggcagacaggccggttccagagtcaggctccggtgaagctccgaagaaacaaacacgcagggagatttcggaggcgtccgaggacaccgtggggcccggctggctccctctgtctctgtgcgcgccccttccccgggtcaccccgcctgcgcccgacctgcgcccgcgcaccgcgccctcggggctccctgggacagcccgcggcctggcccgtgcgcccgggctcccctccccgccggcccggcacttcccagctctgacgcgggagcttctttcacaccaatggggctcgcgcgcggaggggccctgcccctcctccgggaaggtgtgtccctgtttcctcacctgaaacttcctaggagaacccgatccctccctcccgtcgggcggccaggggcgggccgcgggtggggcggccgggcctgcgctggggacggctctggggactgcggccggcgccgggacctggaggggacgctggggccgaagcagcatgtgacaccgaccaggtgggtgccctcctcccgtctcggccctgggctcccggcggctgtggagcccggcggaggtggggcagggacaggaaggaagaggaagccaggcctttcccagggatcagcccccgctgggtccggggcgcaggctccggaaatgggggggctgggcccgcaggcagggctcggggtgtgtggctgaggaccctggtggggaagaggagaggaactagaggaaatgttgttgcctacaagtttgcttccggtcgggtcccgcctaggaaatgggcaccctgcccccagacgttccccgggccaataatcagggctctttcttcaaagtaggcgccctggggaaagctaagccatatcagaaggaataactgagattccctttctaggctgttccttacctggagaggttttatcggctccttttccttaaccaggccggggcctttccttatgtatctccataggtatttgcatactgtgtgagtctatgtgtagcttctctccgtgttaaccaaagctccgtaacctggaacagtgaatcctgccctgcccctcaccccagttccctacatatggggagcctcctaaagcttgatgtgaatcacaacgttgcattcttagcaaggtggaaagaagttatttagagttgggggctgaggtaggcgttggggtgctagaatgcggacgcagagctctagaacccctgagcatcttttgcagttgccttccggcaagactaccggaggagagccagttgtgatactacgtcatttccagatctcagtccctttcttcccttcctggatcttgggttccaaagacagatttgccctcctgtctacctagaagtgaactctggccaggactcttgtctggttgagagagaagggtgtgtcaaacagatgagagagggtggttttcctttcgagcttcctccctagcttgctcccctactgcactccactgtctggccttgcatcttgggcctaatccagaggtcccagctccagctaaaaagctcttgatgtggcctctgtctcagacgtcttgttttatccacatttggagcatgaagaagttcctggcataggccttagcaaaatgggtgtcatttgttaaccaatctgtgggcctaaaagtgaagccatggctagtgaaggagtcctggggagctgggaagatgggatgagggcgtgtcagttctgggtgagactgatatgcaggaggaatgtatgtcatggtcctagtggggaggagagagaaatcaggaggagtgcaaaggaatccctctcatcaacagaatatagtgattctcaatagagagaagagtgttcatatattagaggtcctgagagtgtatcagtgcccttaacgcggtctgtctgaggttccgtggccacgttacacgtggtgtctgtgggatagacaggaatacgtcatttgtggtgtctggagaggtcagtcgctatgtggtatggacaggaatggagtcactcgtagggtcttgggttcaacgggagcagcattactcaagtgtcagtggtgtagacaaacaggtgaccaacagctctagtgtagacaggggctgggtcactcacagtgtctgtggagtaagcaggagccgatcacttatagtgcctgcaaggtagactggaacaaagtcaccctcaaggtctgtgttaatacacaaacacgtcactcacactaatgttatctgtgtgtatgccaccaggaccacagatgagattgtagagtgtaagtcagcattgacactaataatgttcttatataaactatctggtctataaggcagttggtgtgacattttcagacattagagaatagataaatgtgtattacagctttcactggcatggtgggactttcctgcaatggatagaacacacactgtagtagtcagtggtccagaaagctacccctgttttgatatctttgtagtattgagggcagtgatgtcaaacagtgaataaagttatatatctatgtggtgatcttattttaacctcaatattattttagtgatttgtaagtcagaatatttgaaatcaaccttgctagaaaatccaggaagcatggtcctcaaaaatatatatatggcactgagtctcagttcaaagatttggcagtttgattggggaggggttgtatccttgaaatacagtgttgtttctagtgactagaaatagacaagagctaaggtgttggggggggctctagggaagatagtgagctctgtcacacattatgttaaagggatgacttgaagctttgcctctcaagaagtcacacgtgggtgaggttatgtggatgcagaatgtctgtggtctgaagcaaggccgtatccccataatcccatgccctggctttgcctgtacacagataaacagtgattattcaccctcagtggagaaggagatgaggatgtttgcactctaacgtaatgagcattgcaaaaaactctctcctgatgcctttacgtgagtaagaccatgatttacagatttcctttcactttgtcacattttagctttgtcatgcctgattgcaacgggatcactgagataggatcaagtatagggaacgtggggtatgttctccctttgcggtaactggtggctgagcaggtgaccactgatatttccaaatgaaaaaagacagttagaaacggtgtcaatgggcttgcagaggcaggcatgcactgtgccactagattggaacagaaaatgtccaggtagcacatggtatttatagatataccctagatatggcagaaacacacttttatttagaggctacttgttttgaagacgtgatggtgtatatggaggagagggcctgaaccatgcagatgtaagtgaggagagactacaggtttagtcccatggtctccttaggccaagtttcagaaagtgtcttaaagtaagcaagtatattattcgatgtgtggttgagagaacagggccacatcacagaatcacccatagggattatagtattttgtacttaagggctagacatagggagccaatcgcatatggtgtcagttaactggaaaaggacataaaagtccttctgcctgtgtacaattatgtcagacatatctctttgccccatatagatggtatctctgtctctgggatggccagaatcttgtcacatactactctgcagtgtgctagggacctgcctgtttggttatgtcaggctctattgcaagagtttgtaaggatggctcagtgtgtgtgtgtgtgtgtgtgtgtgtgtgtgtgtgtgtgtgtgtacacacacagtggctaagcaggacagtattctgagcaggtgagttttcagtttaagcctggaccagacaagaaaggtgcacggtcaggtgcagcattgggtccatagaattctggggtcttctctggactgatggcctgccagctttctttcagtaggacctctaagtgcttacaggagacttaagtcaagcgactttgcttcaggtttgcccataccatttgcttaggagatttgagcaagggtctagggtctttgacctttagtttcttcatctgtaaattgagcagtttctgtgtgtctctgaaggtccttccggctttatgaatcctgtgtttctctcttacacttattctctgtctctcaggtcaacagtatttaccacagccaccatttctatgacccttaaagatagcagtgtacatttttatgttaccttatttaatctttactagaactgtgaaggaatccttttatctcctttttaaagataagaaaatggatgttcaaataaatttaatggtttctacaattgtcttaaaaccagcaaagataccagagaggcacaaccaaacactgatccacactcttctaactctatattcttccgtcattcattcatacgatacatctttgttgagggccaactaggcttcaggcagagggggttatatggcagtgtttgtcccttcatggtgctcataatctagcctggaaaatagacattaaatatgacatgacaagtgcaaggtgtgtttgaggagaagcaaaggattctctgttgcaaaagaggattccaggcagaggagcagtgtctacaaaggcctacaggtgagagacacagagagaagtgagctaaagacactgaaagccagtgggagaggggggggatgggggcagggacagatggtgacaggtgaataggctgctagagaagaaggcagagccaggttgtgcagggagtataacccatgctgaagatttagatttcatctcaagagcattcagaggctgctgaagaatctaagctagaactggtgcttttgaagctcacttaggtgctgtatggagaaaggactggaatagcgtgaaatgggtggaggccagtgcccaagctgtggccgggtgcagtggcccgggcgagacggtagcagcatgcaccagtggagagggatgggatagaagtggacagtcttaagggatatttagcagacgaggtcaatagcacatggtgattgattagatatggggaatctgggccaggagggaaacaagaattttattttattttaattaattaatttatttatttagagacagagtctcactctgtcacctaggctggagagcagtgatgtgatcttggctcactgcagcctctgcctcctgggctcaagggatcctcccaggatccctctcctgcctcagcctcccgagtagctggaactacaggcacgtgccaccatgctccactaatttttgtattttttgtggagacagggtttcaccaggttgtccaggctggtctcaaactcctagattcaagcaatcaacctgcctcagcctcccagagtgtcaggattatatacataaagtgcattgggaaactcagtttttcatctgtaaaatgggcagaataatggtacccatcttatacgatgactcttagatgtatggcacatacatatttaaagaagcatttcattatttttaatgacatgtatgcaggaaaaccttagtgtttcagaatgaaaaataagaaaaattaatttgttgtgtatagagctctaaatgtttaaagttctgtgtaaactgttaatcatgattttaggaaaaggtgggcatattccattgaagtaaaaggatcacattttattctgacctgaattttattctttatgtgaaaaatatttattaaacactgagtataggccactattaggctaagtatggataattcagcaagtcatagttcttaatctcataaattttactatctattggttgcaatagagggtaactcaaaatacacacatcattatataattataattgtataaatgctacaaaggaaaagtaaagagaattatagttggtaagtgctacaaagaggggtacaatttaacctagttaaaagatcaggggaggccaggtgtggtggcttacgcctataatcacaacacttcgggaggccgaggcgggtggataacgaggtcaggagattgagaccatcctggccagaatggtgaaaccccgtctctactaaaagtacaaaaattagctgggtgtggtggcacacacctatagtcccagctactcgggaggctgaggcaggagaatggcttgaacccggagatggaggttgcaatgacccaagattgcaccacggcactccagcctgggtgacagagcaagactccatctcaaaaaaaaaaaaaaagaaaagaaaaaaaaaaaaagactggaggaaactgaaggggtaaaaccaggaaaatgtaataccacaagtaacaagagagtatttctaacctcagtactgtcaaatactgacaagaaccacccaaaatgaagatccataaggtcttctttggaattaacaacatgtcgattgtagggaatattggcagaatgccgctatcaaagctcagttggaggcaggtgggatgtgagagtatgaagacagcagataagagcaactccttctagtcatttgaaagatgagaagaatgtgggaatgcttccataccccaggggttgttcagcagggatgttgaaggtatgagtgcacagtgttcctggggaagcaggcaagaaatgacagagcatggaaaggagggatacgtcttttcctgactgagggcggaagatagaaagagtggaaatacaggttgctttggatcgcaagaaattgaggtgagagaaacccagttccatcagtttctattttctttgcaaaataggagatgaggtgttctgctggaagtgagaagaaaggcaggaaggtcgaaatcaaaagacaggaaggtcaaaagaattaatgagaagagttcatatggatactgaggccaaggggagagtaaggtgatgcagaaagcacccttctgtggtcttccttcaaggtggtaatgtgtctagttcaacactaatccaataaggctgttatcatcccactttacaacagctgcctctagaattggaaacaaaactgttagttacaatgctgtagtagacactatggaaaacagaaagatgagtaaactccaaaccctctgtaaagaagatgaaaccatagcacctcacacattggctatcatagcctggcctattttaactgatgtccacagcttaagaggaagaccctctcctgacactgcttctctggcctaatagatctgaggtgtgtcccttgctgtgtctgggggttatatgaggatgagtcactcctagtgtccgaagagtagacagggagagacagaagatgacataatggagtctagagagaactgacaactgggagcttctgggcactctctgacaatggtcctctgctataatttaattgttcattatgacctgtttccctcacaagaccacagtctccatgacgacaagatctttatctcattcactactgaatgccccacacttaacagggtcgctaggaaaatatttatgaaataaatacatcaatgacaagttttttagaggctattgcttattttgttgagaacctgttgtctcaaagaatgaccctaaatggaaccaaataaatgcatcactcttcttttttatggtctcttcctctgataggtaaaagcagagttgttagaaacatttgtctttgattcctccttaggattcagccctgatggaggctgaggaggcccagcgtggagcctctcctcccatctctgccatagaggaattcagcattatccctgaggctcccatgaggagcagccaggtctctgccttggggcttgaagctcaagaagatgaggacccatcctataagtggagagaggaacacagactctcagcaactcagcagagtgagttaagggatgtgtgtgactatgcgattgagacgatgccctcttttcccaaggaaggttctgcagatgtggagcccaatcaggaaagccttgtggctgaggcctgtgacactccggaacactgggaggcagtaccccagagcctagcaggccgacaagcaaggactctagctcccccagagctctgggcctgccccattcagagtgagcatctagacatggccccattttccagtgacctgggaagcgaagaagaggaggtggaattttggccaggacttacttctttgacattgggatctggacaggcagaagaagaagaggaaacctcttcagataactctggtcagaccagatattattctccctgcgaagagcatcctgcagagaccaaccagaatgaaggctctgaaagtgggactatcaggcagggggaagagctgccacctgaggagctgcaggaaagtcaagggctcttgcatccccaggaggtccaagttctggaggagcagggacagcaggaagcaggatttcggggggaaggaactctgagggaggatgtttgtgccgatgggctattaggggaggaacagatgatagagcaggttaatgatgaaaagggagaacagaagcaaaaacaggaacaggtacaagatgtgatgcttgggagacaaggagaaagaatggggctcactggggagccagagggtctgaatgacggtgagtgggagcaggaggatatggagaggaaggctcagggtcagggaggtccagaacagggagaagagaggaagagggagctgcaggtgccagaagagaatagggcggactctcaggacgaaaagagtcaaacctttttgggaaaatcagaggaagtaactggaaagcaagaagatcatggtataaaggagaaaggggtgccagtcagcgggcaggaggcgaaagagccagagagttgggatgggggcaggctgggggcagtgggaagagcgaggagcagggaagaggagaatgagcatcatgggccttcaatgcccgctctgatagcccctgaggactctcctcactgtgacctgtttccaggtgcctcatatctcatgactcagattcccgggactcagacagagtccagggctgaggaactgtcccccgcagctctgtctccctcgctagagcccatcaggtgctctcaccagcccatttctctactgggctcctttttgactgaggagtcacctgacaaggaaatagatcaaaacagccagcaagaggaatccaggctgaggaagggaacagtgtccagccaagggactgaggtggtctttgccagtgcatctgtgactcctccaaggacaccagattcagctcctcccagtcctgctgaagcctaccccatcacacctgcctcggtatctgccaggcccccagttgcctttcccaggagggaaacctcttgtgctgcacgtgctccagaaactgccagtgcccctctctcaatggatgacccatctccctgtgggacttctgagatgtgcccggctgccctctatggcttcccctccaccgggaccagccctccgaggcccccagccaactccacaggcaccgtccagcacttacggagtgactccttccctggttctcacaggacagagcagactccagacctggtgggaatgttgctttcctactcccactcagagctgccccagaggccccccaaacctgccatctacagctctgtgaccccaagaagggacagaaggagtggtagggactacagcaccgtttcagcatcccctactgccttatccacgctgaagcaggactctcaagaatccatctcaaatctagagagacccagcagtcctcccagcatccagccctgggtctccccacataatccagcctttgccacagagtctcccgcctacggttcttccccatcctttgtctccatggaggatgtgaggatccacgaacctctgccccctcctcccccacagaggagggacacccatccctccgtggtggagacagatggccatgctcgtgtagtggttcccacgctgaagcagcatagccaccctcctccattggccctaggttcagggctgcatgccccccataaaggcccacttccccaagcctctgaccccgctgtggccaggcagcaccgacctctgccatctaccccagacagctcccaccatgctcaggccacccccaggtggagatacaacaagccgctaccccctacccctgatttgccgcagccccaccttcctcccatttctgctcctggtagctcaaggatctacaggcctctacccccactacccatcatagaccctcccaccgaaccacccccattgcccccaaagtccagggggaggagcaggagcactcggggaggacatatgaactcagggggtcatgccaaaacaagacctgcttgtcaagactggacagtccccctccctgcctctgctggacgcacctcctggcccccggccacagctagatcaacagagtctttcacttccaccagcaggagtaagagcgaagtgtcccctggcatggctttcagcaacatgacaaacttcctatgcccctcttcccctaccactccctggactccggagctccagggacccacctctaaggatgaagcaggggtctcagaacaccctgaggcccctgcgagagaacctttgagaaggacaacccctcagcaaggagccagtggcccagggaggtcacctgtgggccaagcaaggcagccagaaaaacccagccatctgcacctggagaaggcgtccagctggccccacaggcgggactcagggaggccaccaggggacagcagtggacaggctgtggctcctagtgagggggccaacaagcacaagggctggagccggcagggcctgcgcagaccttccatcttgcctgagggctcttcaggtgagcaagaaccgggaccacagtgacacatcagaccaagcttttcccagctcttcccacctcatcccatcttctgtccctagggttcctaacattctctctgctggcttcgctcacatgtgtgcctaacctcaacacagagagagccccgaagtgccctccaagctccttgggatgctcttccttcttcttcccctctatctccctgtctctccctcaaccagcaccttctttggatgtcccaaggttattttggactcccttctactcttcagttacagtccctgcttgctctcctcctggggagtagaaaaggccttctgtacttgtcccagtcccatcctgacccgtggctcgggacgtcactggtactgatctctttcacgctctctgctttgccactttcttccctcccagtttcccaataaagcccattttcccttctggacccctgcatctcctgctctagatcttctttggctctctctatccctctgaaatctcagttatcttccccatttccacttttagattcaagaggtccagccgtggagaaacatccgggaccctcagacactgttgtttttcggtaagtcaccctctcccctaacagccacactgtactctcttcacttgggatactgagagtcccctagtgaggatttcagttgataagggttctgagaccccgaatggctcattcctgtttcttcttggtgtaaggaggagaagagagagatgccgggatgccagcttagggagattgtctttatctacctcattcggtcagccgagcctacgagtcatccatcttcccaagccctatggctgtgaactaaaccccacaaaagctccatgttagcccaagtgggtcaagttgcaactctgtgcctctccgggggatttggtcttgacatcccagcacacatcccagaggctagagactttgtcccccacagtcacctggggtgctctgtgtctaatggccagtaggtaccccagagcccttctttactccacagggagaaaaaaccaaaggaggtgatgggaggcttttcaagacgctgctccaaactcatcaactcctgtgagtaccttgaagtggaactatagaaccaggtgggcattctgcccagcactggagaggggcttgtggatgtcagcagtggggtggggatgtccctagcgagaaggcattgcagaagatctgtttccctgcctccgctcaccgtcccttcttcctgcttctcttccttcccatgcttctttgccctgcagcccagctgctttaccaggagtatagtgatgttgtcctgaataaggagatccagagccagcagcggctggagagcctgtccgagacacccgggcctagctctccgcggcagcctcggaaggccctggtctcctccgagtcgtacctgcagcggctctccatggcctccagcggctccctctggcaggaaatccccgtggtgcgcaacagcaccgtgctgctctccatgacccatgaagaccaaaagctgcaagaggtactgggcaggccacggtggggagggggctacagaaaagatgacaaggtcttgtttgctagcatccttctctcctgctcaccactgccaccaagagtcggctgtccccaccacacaggcgcgtgtacatgccacagctgtgggtcatgtccattctgaagaagttgaattgttttctggatttcaccacctcccctttcatcctcacctcctcatgccataggccacttgctcctacctgatgttggtctgggctatacatggtggccattgcctctgaatttgtgtggaggaatgtggagttaatcccatcatcactgctgtttcagggtagaggaaagcttccctgttcaaccagggtttcaggctacactacagttttcctctttagccaaggcacattccggggctctttgttgggtcccttgaagagggccctttgcagctgtcctgtggtccatcaatctaacaggggccttagagtgatcatcagtccctgcttgattgttactcccaacagcaagactgaactagaggctgtttgtctgattctaagctattaccattagtaagttttacatggagagcgcctcttattaatttgtctgaaatatggggtaaaacctttcttcccagaaagacagtatggaacaatggaatagaataatgtttaagaaattaggttctggaagaaatgacctggatatgaaaaccacttttttttaaaattattaatttattagagacagggtcttgctctgtcactcaggctggagtacagtggtacaatcattgttcactgcagcctcaacctcctgggctcgagcaatcctcccgcctcagcctcccaagtagctaggactacaggtatgtgccactatgcctagctaattttttaattttttgaaaagatggtgtctcactatgttgcccagttgtctcgagctcctgggctgaagcaatactcccgcctcggcctcccaaagtgctggaattacaggcatgagccactgagcccagccccagagcccactttaatatttccaatttacctttggccaaatgacatttgtaaaactgagatacaaacagttactgcaaggatcaagaaacatgaatgcctggtacatagtaatttctcaaaaaatgttgacttttcattttaagtaagccagacctaggtttgaaacatgacttcaccatttgctagcttaggcagccttataacatcactaaatctcagtttcctcacttgcaaattgaggataataatgcctacctttcagggttgctgaatggtttaaatgaaataatgcatatctaatttagcagtaatatttgatgtatagtttgataaatattagtgccgtactctctgcctttcagaggcagggaggagtaaaatttgggccaggaggacttatggacagacaatgcttttaccaagtcagagagagaatacatttttagactttgcaaagttcagacttgagagccctgttgtggctgcaaatttttaagcacagagaagatatttagaaaataactcatcttccccatatttgttgaccaaacagtgggagatgacacgagttctagctctcttttaccaactccagcatgctgggaagtccagcaggactcctattccagccctggtctcatgtttgtgagaagaaagggctttacatttctatctcttaaacacacatattcattttataaagtagtacctctggggttcacaaagtgctttcacaggctccatttctttcaactgttgcatcttccacagtgagatgggggtcactatatccacataaaaggacacgaaaagtgagattcagagaggttaaatgagccacccaaagtcagtcgtgtagtgaatgttagagcaaggatgcaaatgagccttcagtgtccctgttcagggttgttgtatgggagggtcatctggctgtgtcattggtcatccaagtcatcaccagggtgtgtctcctttctcttttctatccaggcatctctcttgaggccacatgcttggatgaaaagcatgaggagcccagctagaggcacggtcatgagtcatagcgccccctgctggaacctccagacaagttctcacatgctgggcatgcattaaaccacagctgcgccatcttgttctcagatatcctgcttctgtctcctgcttctcgcgccatcttgttctcagatatccggcttctgtctcctgcttctcatctgtcctcaaacctcaaactgagctcatcaccttcatcccctaaatctatgccttttcaaagttctctggctcagtaaatgactccatcattcacccaggtgcccgactcaaaaagcttttgctgtgagtacaaaacattagctttgaaccttccttctctttgaggccccatttctagcaaataatccaacccttccaattctacctcataaataattataaaattaatctacttctcttcagctccatggctattcagaccttcatctctcatgtggaattattacaacagtttcttaacatggatggcttttgcttcttttcatcttttcttctcattctgcttagaaataactttatgaaaaacaggctgggcgcagcggctcacacctgtaatcccagcactttgggaagccgaggcgggtggatcaactgaggtcaggagcttgagaacagcctggccagtatggtgaaaccctgtctctactaaaaatacaaaaattagctgggcgtggtggtgcatgcctgtcatcccagctactcaggaggctgaggcaggaaaatggcttgaacctgggatgcggaggttgcagtgggctgagatcgtgccactgcactccagcctgggtgacagagcaagactccatctcaattccaaaaaataaaaaaaaataactttatataaaacaaatgtggtcaagttattctcctatgtaaagcctgttttcattgtcccattgtcttaagtccaaacaattttacattgtttacattacccttcaggcctcctcgactgctgcagcttcatctctggccactactgctgtacacttggttcaaaaaatgctcaatttatttagtttagttagtttgtttgtttgttttgagatggggtttcactctgtcaccaggctgaagtgcagtggtgcaatctgggatcactgcaacctcacctcccaggcacaagcaatccttccgcctcagcctctcaaatagctgggactacatgtgcacgccatcacatccggctaatttttgtattttttgtagagacagggtctctctacgtcgcccagcctggtcctgaactcccagactcaagtgatgcacccacctcagcctcccaaagtgttgggattacaggcgtgagccactgcacccagtctatttagcttttttaatataaatttcattgtgtatattaaagatatacaacatgatgttatgggctacatataaatagtaacagaattaccctagtgaagcaaattaacatatccatctcactttgttactcattttttgttcttgtttttgttatttagatttcttgaaagcatatttttcttttatacctttgaaggcctgtacctgtaccctagattaaatcctactcaaatgctcttcccctccccgcagatcaacttaggttctggtgtgactgtgaaccataaaaggatcttgctcactgctctatccccaaaacattacacagtggctggcatattccagggggtaaataaaatccttaattaatcttcctcatctccaacctcctaggtcaaatttgagctgattgtgtcagaggcctcctacctgcgcagtctaaacatagctgtggatcatttccaactttcaacttcactccgggccacactttccaaccaggagcaccaatggctcttctctcgtttacaggatgtgcgagacgtcagcgccacgtgagactccccttctcctaaataccactcactcagcctcactgttgttaggctttaaatgttccgttatttttttcccctcttagaaaccctttcattttcacagttatgggaagaaattgggcctcagtttcttccatgattcccgatggttataggaagaagaatggcaagaagaggagagggtctgtgggtggatagatccattaatggataagtaaatgagcaatgcttcctgggttgaggttttggattactgtggtcatgcactgcattggagatgaggtggaaaaaccatctaaagatcagaaaacctgaacagggtcaaaagaagaatgagaaatggaatattagaataaaagtgttaaatcaggctcaaactcaggacagttttggagcgaattctagtgcatagcaaggagcacagagcagagagtcaatagaagttattggctaatggagtgaagaagtcaccagctcagtgtacaccaggggccagtcagctgtttagctgaggtccagaagtctcatgagactcgtttaaatcctgtacaggttcctttcagacctggaagagaactttgagaacaatatcttctccttccaagtatgtgacgtagtcctgaaccacgccccagacttccgccgggtctacctgccttatgtcaccaaccagacctatcaggaacgcaccttccagagcctgatgtgagactcatcccccatttaatccccatgtaggccctgaggtgaccatgcaccagtccccagcccagagggctatcccaagagcacactttccccattccgccctctgtattggttaccccagcatcacatctgagcgccctgtacatcagctcccaccgctctttcccagcccacagatactccactgacctcccttccccgcaccttcactgcatcccccattgctccccatatcccccctcccctaaggctcactctccgtgcaggaatagcaacagcaatttccgggaggtcttggagaagctggagagcgaccccgtctgccagcgcctttccctcaagtcctttctgattctgcccttccaacgcatcacccgcctcaaactgctgctccaggtagggcagatgctaccttgatcctctccccttaactcaaagggatgccctcaggaagacccacaacaaaggaccaaccattcttctgccaggtgtccacatcctgtctccctgctgcccactgcctgcttgcttggaaatatttgctgctaaaatgtggtccctgggcttctccattcaccagcccccaatcatttcttcctgtttcccatttcttcctcccatctcactcctgcctactgtctgttcaatagaacattctgaagagaacacagcctggctcctcggaggaggcagaggccacgaaggcacaccacgccctggagcaggtaggcagccaccacctccactctgaccctctgtgtgttcttctcagagaggtctttcccacctaggcccatgactccagggagcatgggaggtgggaccctgttgggagagctcagccacctccctgcatccgccaaacttccaaacatacacaccccacggccacctctcccacgccgagcacactccacatcaagggactgtgccctctccaccatcacccccccattcagtctcacttttactcagttcaggaatgttctgccaagtcatacaaagttgcctaggacttgtgcttgatactgcctgcccaattccagcctgggaaaaatgactgaggctgtcataacctatttccagattgcttgcaagggactcaaaggtcaaagcctctaacacagtgcccttcccctttcctcactctctgcacccctagctgatccgggactgcaataacaatgtccagagtatgcgacggacagaggaactaatctacctgagccagaagattgagtttgagtgcaaagtgagtcggtcccatgcaccccatccctgcccatgaactcccttaacatgtcctgcagatcaccccctaacctggaaccaccttgctcacattatccccagcccctcccctcatttctgcccaccttctattctgtcctatttctgggaggcctacttgggtctccaagacatactgctaagtgaaatgatgaaggtaaagaattgtgtgtatattatatcacctttggtataaaagtgggaggatacaaatctatacaggtgtctgcttgtgtgtgcataaggaaactctggaaggagaacaagaaaaaaaggaacagtggttacctgaggacaaggggggtgcatttgagaaatgggcaaatgagagagaacttttcaggatgagcctttataaaagaatgttttggtgcttgattcatttattactttatcaaatctctttctagtctaatcaaacccacataagattggatccaaatttagagccagcatccctcattgaaatacaaatctaaaatagacattccacattcaaattccaacttagaacagatactatcttttttttttttttgacagagtctcactctgtcgccccaggctagagtgcagtggtgcgatcttggctcactgcaacctccacctcccaggttcaagcgattctcatgccttggcctcccgagtagctgggattccaggtctgcaccaccatgtctggctaattttagtatttttagtagagatggggtttcaccatgttggccaagctgatctccaactcgtagcctcaagtgatccacccacctctgccttccaaagtgctgggattataggcgtgagccaccacgctcgtgcttagaacacatactatctttacactcctgaaaaagaaggaaaatcccttattcacatactaagcatagaccacaccctcatctttaaccaaattccagctccaagacgccccacctagttcttctcacccccatgtttgattccagctgctcacatatctctggtataaaaaatggaattgataccagacctgcctctaatattttattttaacctctaagacacatatagtgttcactgacttgttccatcacataccctgattggactcttccatccctccttcagttcaggcttctagggcagagctgtcccacacactcactatcctgagttggaccataggcatcttctatttacctgagcatacaaccatgggagccacacaccagtggacagtggtagttagagggttcagagagaaagagaatctaagtgatgggttatgagccagaaggcagatgtggaagagatgcttgttcaagtggaacttgcatggaagtggcatggggaggagggtgggactgggagcaaacctcatgcttctcccatctgtgacactgccttctctctcttcctctgccctgtagatattcccgctcatttctcagtcacgctggctggtgaaaagtggggagctgacagccttggagttcagtgcttccccagggctacgaaggaagctgaacacgcgtccagtccacctgcacctcttcaatgactgtctgctgctgtctcggccccgagagtcagtgactggagtggcaggccagggcacaagaggggaaggggatgaggaaagaggggggtctgaaagggagagagaagggtcatgttcctagaagagcccttctcaatggcttaacccatagagcccaggtcatagcctagagaagagaaaaacaagcccaaagcaaaaaggggatcccatcaaactgtatcatgagaccacatagcaggacatgtaatatggtatagacacagagcaaaatgtagcaaattagcttatcacattctcacatgagtctatttgtggcttctttggactggcctcaacctgctattctagagatacttagctaattccagagcttaagtctctggtcttaaggttcttgggaaatgtatataaattccatctcttcacctctttaaagtggtaatgtatccactgcactaggtgtgtggtttgccagactaggacaaatccctgaggaccctggagctaccatcttgggagcaagttaggaccatcttatggtttttgtgggaatttgcaggctgtagatgtagggatttcgaacccaaggttatgagggtaggtgaagtatggaaactctagaatcaggttgaaaagatttgtattttgcaggggtagccgattcctggtatttgaccatgctcccttctcctccattcggggggaaaagtgtgaaatgaagctacatggacctcacaaaaacctgttccgactctttctgcggcagaacactcagggcgcccaggccgagttcctcttccgcacggagactcagtgagatggggctgggcagaggagctgggggtgggggaagatgggcagccgagaaaagaagtgagaccaaggcagaaaatgtgtccagaagacagccacagcctcatttagcccattctggactggggaccaccatagagaaattcagactcctaaaactaatggataacttgcaggagattggggtgggagagggtacaaagtcaccaccgaggcttagcatctattttatactctttactcaagagggacaaggtctgtgtagtatcagaaaggagaaggactggtatggagtgagcaaggaattggaatactggtatctgtgagcacatgcctccatgcctgaggcagaaacccttctatgccccagctggtgggcacagatgtgaataagacaagtgctgggtgacttttactttctgtgctcccatcttccaaaccagtcctctattgaccagaaatccatagtgttgagaatgctgatttgctcatgttttcaataataataaaataaaatacattcacacagacatacatttttgagagtattaatagtacctataaaatctggaacacagtgcctgcaataatgaacatgtaaaagcctgtagctgttattgctattataaaagatatatgaacagtcatttaaaagtttgacgtatctaagtgtttgaggatccctatgttgtagacactttttcagttttgtcccttggaagatacttcagagtgggaccgataacacctgttctcatttattgaacagaaggactagtatcggagtttgtgtgcaaaacagcacataagtcaaataatcaggtgcagatgcatgttgttggtttggtgctttgggcactgtgcctggaacagtaatagtccattcccagttacctaggcacaactgggcacagaggctaacagaatgcagaaaccttcagatgattacaaacctaagcttggattacaccgtgcaacaacaacaaataaaacagtagacatatctccctgatctaattattattatgaaacaatgatcatctctgagatagttagttgaagggagataggcaagcgagtgtcaagaatcatgccaaatgatggagggaatctaaactgaaatgaacacttcgcttagcacaatttccaaaacagaaaatctccagactttatgactaatgaacattacgccccaacttggaagatatgagaagccattaggaggataattctggaaagagaagaggaaaagtaaagtgtgacaagacacattcacatatagttcaagattgtgtcatgtttccaaccaaaaagagtcctatatagtgtttgatagaagtcatggaactagataagtccttcccacagtcttttgccatccccatccttggccctcctcctacacccccacaattgatgctatgaccctgctttgttttctcagaagtgaaaagcttcggtggatctcagccttggccatgccaagagaggagttggaccttctggagtgttacagtgagtgagggtctaagagggagagaaaagaaagcagggtcagatgtcacctttggatacaggagtttaaagggctgggtgggaactctaggctttcatttattgatattccgtaaaatgtcagggtggaagattggcctctagagcttaaaaacctgaaatatatcgcctaaaactgctcatcactatggcagtcccccttccccatacattcccttccttgggcaatagtttgctctttttaaaaatatttgtccccttaagtctaagctgacattattttgcctagattttacctgcttgaaggtcttgttggggtaggggaagaaagcctgacggtggtagaaggtgtgcaggaggatagcaccccagatctatcttgaccacacctaagaggatgacctgaggtcacctaccccaggcttctgggtgcccatggggagccacaggcacacacacattatgtatgtgtctgtgttcacaccaagactggacttcttatgcctctcatgtcagccccacagttgtcctccagcaaagattccctaatttaaatccagagagaatctgacctcaaccctggacctttagtgactgaaaagaacaaacaactacaaggaaccctgggaatgaagtaggagagccgtgtagtaactgaacgctgttaacttgctcactgtgcactccatctgctggcttcagttccccagtgggtgaggagggcaggagcattcttcctccttcattttgaccttgtgaatggcagatggggaggatcttgagaaagcaaatagtaatgcagtattccatttattttacaagagaatcaaggcagtgtagtaacaaaaaagagccataaacccacatatgatggaatactgataggtgaagcattctctgaggcttgttttcttgagcttcagatctatggacatgtctcctggttctcaaaaacatagaaatagagaaatcttgaatgtcctcaagattcatctgatcaaccttgatcaataaccatcttgatcactgatagatgagtaaactgaagctccagggctttcagtctctggcttaggtcaaacctgggacaccactagttaagtctttcttggttccacatctggtactgggaagaaaatgaagaataagacacagactcagattttataatccagttggagaggcaaaacacgtccatgtagcagttaaataagggataaatgccttggcatgaacaagcagtcttaaaagagttcagaacccattgaagactagagtcagggacggtttcagagggaagatgggtcattagctggatctcaggtatttgagatgatcacatgtatttctcaacccgtctcctctggagaagtggaatttttggtccatttcatttctggtatgtctatttctttattaaccattttcaaatttcctcttttgtctgtgactttcaacagcccaaatctgtctctatctcaagtcctcccacgccacccccctccaagtccctgtctgtgttccaatcccctgcctctcctaacctctcttcacactcttctcttccaaagactccccccaggtacagtgccttcgagcctacaagccccgagagaatgatgaattggcactggagaaagccgacgtggtgatggtgactcagcagagcagtgacggtaagcgggagcatgcgtgagcagcaggccaggcactgcaggcagggcagtgctgggagtgtgttcacttcctgcagctgccatgacaaagtaccatggactgggtggcttatggcaacagaaatgcattctctcacagttctggaggcaagaagtcccaaatcaaggtgtgggcagagccacgcgtcttttgaaacctgtagggaagatccttccgtaccttttccagtctggtagccccagctgttccttggcttgtggcagcatccctccaatctctgcctctgtcttcctgtggctagctgccttcctgtgtctgtgtccaagttttcctcctttatttttttattttatgtattattattatttttgagacagagtcttgctctgttgcccaggctggagtgcagtggcgcaatcttggctcactgcaacttccaactcctgggttcaagtgattctcctgtctcagtctcccaagtagctgcgtgagccaccacacctggctaatttttgtatttttagtagagatggggtttcaccatattggtcaggctggtcttgaactcctgacctcaagcagtccacccacctcggcctcccaaagtgctgggattacaggcgtgagccaccacgcccagcccaagttttcctcctttatatagacacctgttatactggattaatggccaccttactccagtatgacatcatcttaactttattaattatatttgtggcaacctcattccccataaggtcacattttgaggtatagaggattagaacatcaacataaatgttaggagggacacgatgcaaccataacagtggtgaaggctcaggaatggacagctgtagacttggccacacccagggccgccatgttaggacacttggaggctgggtttatgctggaggctccccagttcactcagcctgaggattcagaaaactctccaggaaggtgatccagagaagctatcgtgagcctttcccaggtaattcttcccactcaccctgtgcccacaggctggctggagggcgtgaggctctcagacggggagcgaggctggtttcctgtgcagcaggtggagttcatttccaacccagaggtccgtgcacagaacctgaaggaagctcatcgagtcaagactgccaaactacagctggtggaacagcaagcctaagtcttctctgagaggagtttcgtgagctgaagaacaagctgctcatggcaagggctggccccagaaccctgcaagagaggccttctgtggatggagaactaggccttctcaaagctcaaggacaaaatccagctaacccagtccctcggcccaggcctcctttcgtgctttgtgcttggtgggggggatttcgagggactttgcactggactctgggaacctttcatcattaaaaaaagggggaccattggggcctgagccaaggaactttccttctactgccttatagtgcttaaacattctccgcctccagggtgcagattcagagctggccagagtttcagtgatagccgtatgttaaacagaatctcacctcagtctcctggagggagatgtttaagaggggttaacacatcagatgggagggtcagcccggtgacctctaaggtatcttctaacctagaaattcaccataattatggtgcaaggtcagtgtgtctctgagatctatgtctgttggtggcaatgtgagggtgatactctctcactctaataaacttggcacttctccgagtattttcttctcaaactcctcagcactgaaaaaggttcaaaacatggaatcccgagagttcctgcctgttgggtttaggtgtcataaaagtctaaggtggtgcataggtgatggcagttcctgactcctgctttctgacccctgagagtttggacagattttctgcttgttacagcttcaaaggttgtagaaaaagttagaagtaattgataggtgatgaaaaccccatctttgctgtacccataaggtataggtatagactagtttgggtggattgggcaaatccgactcggaccatccatgattttatattgtgacctgaattattgtgaaaatatcttctcagctgctttagctttcttctttgtgaaaggcagaatggaaagaggcctgggatccaagtcacaagacccaaactgcaggccccacactgccacagttcaacccttctgtgtctctgtgccctgaaatgtaaaacatgggcttgaaccaagtaacgtccaaagccctacttaactctaacaaatgtgttattctctagtttctttcaggttgcctgtctcagttgaagaatatgactaaatttttttctcattagcatccatatataacaataccatagtcatcttttatgccatcttttcatctataatagtccttcctttgatactctactactctgtttcatatttaggaggctcaaaagtagaattgcattgcagcctcgtacagaggtaagaatgatgctataaaatttgtcctaggcccacttaacaatgatgtgacatatttgtcgtccttttaataacacacactgttttcaatgtatcctaacatgttagcttgcttaattttttattttttaaatgttttaagtttaattaatttttttgtagagacaggatcttgctatgctgcccaggctggtctcaaactcctggccttaagcaattctcctgacttggcctcccaaagtactgggattacaggtgtgagccactgtgtttggccagtttactttatgttgaaaaaaatcatcaccataaccattaagatgtgggctaggctggatgtggtggctcatgactgtaaccctagcactttggaggccgaggcgggtggatcacctgaggtcaggagttcgagaccagcctagccaacatggtgaaaccctgtctctactaaaaatacaaaaattagctgggcatggtggtgcatgcctgtaatcccagctacccaggaggctgaggcaggagaattgctggaacccaggagtcagaggctgcactgagccaaaattgtgccactgcactccagcctgggcaacagagtgagactccatgtcaaaaaaaaaaaaaaaaagttgtgggctaatattattttatcataaacaagatgacattgctaaaatatccaaaacaggatggttttagagaagttcaattgaggtttttcactcttttcaaaaagccagatttttaaagtaaataacatgtattatttgtatatgctataatttgcatatactaacatataaaataataattgattcatattgattgcaataacaataattataatccaaactatttgtacaaaccagtatttgaatactggccatatggctcaaacagttccatatccagccctatattattttcaaggcaaattctccattattttctcagagaggtacaatagcagcttctgaatgcaaataatttttttgagttgcatggctgctgctttgcttgaagttgttaaggctttctcatccttttgaacataagttctgtaagacttctaactaaaactattctttagatttttaatatgtattcatttaattgggttatactcacctaatctgggatattagaaagcattaggctttacctgtcttttaagtccttggttaaaaaaagaaaaagagaaatttagatatgagtaatgtctcttcggttgaattactgaactatactttaggtttagaaaaattgaatataggttcactcattgtcctctccgtcttcaaatttccagaattgaactcaacttcttcagtgattactggaaccattacatggccatttcttaaaagagattatgaaaacaatcattaaccaagactttttggacagaactgcatttgaagcatgtatgattatacagtattttgttgctttcttaagcaaaacaatgcattgagtagtgtcttcaggagacaaaaatagttctattcatagaaccttttctgaattgtaatatgcttggagcttaaaatcatatagatgtgtgctcaattattttatttgtgcacttgaccacactggacttctgtcatttttgcctaagcacacagcttagaaagctatttttttaagtttatttttactaccaacttttacttaaagttaactatgacctttagcttttagctgtgcactacttgctctgtcttggccatttatagtgattttaataagaccagcctgcaagtatctggaaggcacaccgtttaatatgtgtttattttccctaattttgttttttgtctcaaataacttttatatccatgacagataaaatgaatctgagttctatgactgattttgttttaaattagcctttaggatagaagtggttaaaaagtcttttaaggctgggtacagtggctcacgcctgtaatcccagcactttgggaggctgaggcgggcagatcacgagatcaggagattgagaccatcctggctaaccaggtgaaaccccgtctctactaaaaatacaaaaaattagccgggcatggtggcaggtgcctgtagtcccagctactcgggaggctgaggcaggagaatggtgtgaacccgggaggtggagcttgcagtgagctgagatcacgccactgcgctccagcctgggcaatagtgtgagactccatcccccaaaaaacaacaacaacaacaaaatgtcttttaaaaccctgattacatttgctggttccccttcctttgcacacatatttacccccttaaataaacttgattccctgagggacctcatgttggtctgttctttttttttttttccctgaaatggagtcttgctctgtcacccaagctggagtgcagtggagcggtctcagttcactgcaacctccggcccctgggttcaagcaattctcctgcctcagcctcccgtgtagctgggattacaggcgcatgccacaaaataatttttgtatttttagtagagacggggtttcacaatcttggccaggctggtctcgaactcctgacctcgtgattcacccaccttggcctcccaaagtgctgggattacaggcgtgagccaccgtgcccggcctggtctattcttgatagtctgtgtgctttttaagtatttagtgatgttgcccttatcataaactcctcttgtttatggggtcaaatgagaattccagtgttttgatatagtggcccttcacagacagttattccccacccatcccctcaagacacaccactgagacttgtgcaggtttatacttgttgatgtttcagacttacacgtaaatatcttttgtggtggtaactctgctctatcgctaacacagtccagtgaccccagagccacactggctgtaaacatgactcagaagctgtgtgattacagcagttccaagcctgtagttgagggtaatcttctaactctgaagtcaggtgtgtggaagggccgaaggttatgagtaaatgagctgaagagagacagatgccaaactcagtcgtgattcaaatgcacttcttgcttagatttagaaaacattctctatgcttaatagtctttgacccattttttccaacccgcccattgtaaatgacagtcatggagtggaaatttccctagcttcttccttggaagagcatccattcaccctgcagttcccaaggagcgtcgcaaaaacgaggctaagggcacagacaaaactcgggcagtgaaggtgagtgagtgaggttgttgattctgggtggctgtgagtggggcatctgtgtaggaaaggagccgggttggtgtgcgttacaaactttttccgcgctgctggggtgggggtagctggtgtctgctgctccatgaatgagtcatgggctgagggtagaacttgctctagggaggggctgcgtctggctcacagcattctccaggagcaccaaggggcagatgaatattttctggcagtttacctgagcatttcagagaggcaactagctctgaacaatgcagatggaaacccagaaggagagagggagccagtccacatggtgtgctgagatgggggctctgcatttgctcagaccaaggggctcctgagcaccagggagaacattcagactgttggggaaagggtgggcaagagcaacagaccgtgggatattgtgggagagtcatagcagctcaacaggacagactgtaggctatcccagaagcagacagtctcagggagaaaagggaaatgcagaaagcaaagaaatgatgggccctcagtgggactcagccagcccgttctaaagtactttcttattgagatcaacgtgtggtgcaaatgagaaaattatccactgctggatttgaaagaaccttgaaagtctttgtgtctaacaccctcactggttacagtggagcctggagaggggaagtgatttacctaaggtcatacagtcggttgcttataaaggacagatttgtccagctctatgtccactgctaggatgtaagcaagtgacctgctgagcttgtgctcatcacccaaagggtgaaggtgacctgccatacactgcaaaggttgagtgaacagaaaatgcacaggcagaatatttttgagagagcaggaggaggtggtggtcagacttgtggaattgttaataagcaggtttgggttatggaattgagcttagtcaggcaacatgatccagaaaacacgaatcaaggtggtgttttcaaagcagttcattgtccttgcacaagcagggccttaaagaactgaagagtcctctgtgtgtgtgtgtgtgtgtgtgtgtgtgtgtgtgtgtgtgtgtgtgtgtgtagaggtggctgcttagattcaagggaggagagtacaaacagatctttgggagaaatgggatttatgcagtaagactgggcttcctccccgaaataaaataatacttgtgatgggctcagtggctcacctctgtaatcccaacactttgggaggctaaggtgggcagatcccttgggcccaggagtttaagaccagcttgggcaacatggcaaagccccatctctacaaaaaatttaaaaattagccaggtgtggtggtatgcacctgtagtcccagctactggggaggctgaagtgagaggatagcttgagctcaggaggttgaggctgcagtgagccatgatcacgccactgcattccagcctggacaacacagcaagaccctgtctcaaaaaaatggattaaataaaataatatttgcattaacaaatattaggggaaaaagataaggtgtgttccagttaagaaaccaagagaaatgaatatatatattgagataggatgtcactcttgcccaggctagagtacagtggcataatgtcagcttactgcagttttgacttcctgggctcaagtaattctcccacctcagcctcccagagtagctgggactacaggcatgtgccaccatgcccaactaatttttttgatttctagtagagatgaggtcttgctatgtcacccaggctggtcttgaactcctgaactcaagtgatcctcccaccttggcctcccaaagtgctgggattacaggcatgagccactgcaccctgccaaatgtatatttttttaaagtgtttgacagtcatcttttgaatatggttctgggaacattttttgtttatcgggtatgaaaatatacctgatctcaccaatttaagtaatttataggaagtaatagaaaagtcagactaaaatgaacaatctgttttgtatggggcaatgaagtgaaataatgaaatagtcaaattggaatgcttggaaacattaaatgcttgttgtggttggtagctcagatgaaggggcttttgagaaacagaggattgtatccctggcaggctagatgaatatgggttggggtaagggtgcaggagcttgagaaggggcactttgggtagaattatgtggaaagaatgacataaaaaccaatagaatgaaagtgtaccagaaagcactctagaatctctgtgggtggaaattccattcttagataatgaagctgtggcagtaggaatgtatgtgaggcaacctgccagggtaatgagatgaagaaacaaataaaatgtaaaggctacagaatgaagaagcaagtaaggtgtagatgccacaaccctgggtctgacaccaactcctcccctgggcttgtgtattttgcacatcttactcccagatgcctgggctctgaaacccagagtccgtttgatattctctcctcctcactcatgcagtcaactcattgatttcttcacagcattgatcacattgactgctttcctatttccctactgctgttttggtctcggtcccctcatctctgggtactggaatgacttccccactggtccatctactctcagtcttttcacccacaatctatctggaagagtgttccacagtctcaaatttgactttatattatttacccccctcgttgtctaccaggtaataatgctgggcccaacctagccatccagcgtccatgagccccctctgtttctcacactgctccttaggttacacgttcactaacctcactacctgttcttctcacacatcccaactccctttctagttttggaacattcagcttcctgctccctttgacgactattctctcttgcctcttacatatcacaataatgtgtctatttctttttaaatcaaactaaacagtactgagtatttaagttatttaaacacagacccagggcctgtggaaagatttgattctagctcaaatctagcttatacccactcttttctgacatgtcccacccaatcccagcttttgaccttctttaacacctccttctaaaactatcactagacattgcttattgcagttgacacctcatgaatgggcttaaatcatgtccagaatgtattccttttgcaactttgggcaaataacttcaatctctctgagtctcagattttcagttgtcaaataaagaataccttatacggtggttgtgaaataaaattacctagcagagagctagatacatgatgaatgccaaataaatagctagcatcatcattaatattttgcctaaggaccaatttctggattaagtaagctatttcagctcctgatggttttgtaaaacatacaagcacacaaaattggctatcatttatagccttttacttgttaaggctctttcagttttttcaaagatatattagcattcccaaagcaagactcttctatctgcacttgctgaagtggagaataaaaaactaaaagacttctatctagacttggtcaaggcatttattttaatttcattttcttaaaagataattgtaagataatttttaaaatagagatgggggttgggaggggggggtggtctcgctatattgcccaggctggtcttgaactcctggactcaagtcatcctcccacctcggcctcctaaagtgctggattacaggcatgagccaccacacctgaccttggttaaggcatttttaggtaatcgtttaaacctgtttcttgctctgtgaatttggataattgcatttatattttcacacctgttcaacctccctccccaggacctatggccctgtttgggcttttgatcatttcccaatccagcacctcttggagctctttctacttgtactctcaggctgtccctgacccattatcaatgccactttttcttctgcccagtgctccttcactatgttgttctttccgtaggaaacatagtgagcctgcctaagaccagttttcttcctgctacgtgctgtgcctgcgtgactttctcttgacttgaactagtgttctctatgctgaataggcctaagagctgcctttggtctttttagtccttgtctctgttacagaccctagttctatatttttcttacaacaaagatctgtaagttctaccctatggggggaacttacagaccctactctacccagataaccacttatctaaccagataactacagaaattttatcctcaacatatataaacgaactctccttttccctaaatttgcttcatctctgatatggtctggatgtttgtcccttccaaatcttacgttgaaatgtaattcccaatgttggaggtggggcctggtagaaggtgtttgggtcatgggggaggatccctcatgaatagcttggtgctgccttgcaatcatgactgagttctcgctttgatttcatgccatatatggtcatctggttgtttaaaggagtgtggcaccctcctcctcttcccttgcttgttcctgctctccctttgccttcgccatgaccctgcactttctgagaccctcaccaggcaaatgccgccaccatggttcctgtacagcctgcagaaccgtgagccagttaaacttcttttatttacccagcctagcaatgcaaaaatggcataatacaatctccattattttttctcaattatagcatttcttagttaccaaagtcttattttctttcagttaattatctaccacattatattgattctgacttaaatattcgtcaaagctgggcacagtggctcacacctataatcccggcacttcgggaggctgaggtgggtggatcatctgaggtcaggaggtcgagaccatcctgaccaacatggtgaaaccctgtctgtactaaaaatacaaaattagccaggtgtggtggcgcatacctgtaatcccagctacttcggaggctgaggcaggagaatcgcttgaacctgggaggcggagtttgcagtgaaccaagatagtgccattgcactccagcctgggcaacaaaagtgaaactccatctcaaaatattcctcaagtctgttcgctcttctctcttcaccctgccctactctacacatctctcagtgaggctgtctcagcagccttggattatgtccctgcatctcctctttccttctatcaatctcattctctgttcaactttctttttttttttttttttttttttgagacagagtctcgctctgtcactaggctggagtgcagtggagcaatctcggctcactgcaacctccacctcctgggttcaagcaattctcctgcctcagcctcctgagtagctgggactacaggcacacaccaccatgcccagctattttttgtatttttggtagagacggggtttcaccatgttggccaggatcatctcaatctcttgacctcgtgatcctcccacctcagcctcccaaagtgctgggattacaggcatgagccaccgtgcccggcctgttcaactttctaaaacacaaatgtgggcgagtcatgcccatgagttaaaactgccagtgccactgtttgcccaaagaatacatgcaaacactcagcatcgtgtgaggcctttcccaatctccctgccagcctcatctgccaccccagcccctccactcaaaccctaccactctgagcatctctctcatcctcttaccaatctcagtggtcttatactggctatactttctgcctgaaatatccttccttccttcctctgcttatccagattccactgttccttcacgagctagctttaatgccttagactctagagctttcttacgtggcttttcctccatttgagttcctgccactctttgttcccaggctggcacctcacagcattggccccctgtattgtaactggtcatgtgattgtcagactccccagagagagtggcagttccctgaaagctgagacgagattttgtttatctttgtgctgacccagtactgtctgtgcctgtaaacccccgtcacctgatggaatggatgtctgccctatatctcagggctttgttataaactcaaatgaaaggatatttatgaaagaacagtatgaactaaactacaaacacaagaacgctgaatctcccggactggccctctggactcgaatatcagcacttggggatgaatgaagaaggtgcatcatttccagggaagcagatttgctgttgactaataaagaccatttacttggagtggggccaacaaaagcctaattgtcttttgtagcctgtttctgttttgtgttccatttccgcaaataatatttaaatagacatttaaaattaattctaatgggctatctcataaaattatctgaataactaatataaaagattcagggccaggtgaagtggctcaggcctgtaatcccagaactttgggaagccaaggcaggaggatcacttgagctcagtctgggtaacatagtgagaccccaactttacaaaatatcaaaaatttagccgggcgtggtggtgcttgcctgtagtcctagctgctcgggaggctgaggcgacagggttgcttgagttcaggaggtcaaggctgcagtaagccatgatcataccactacactccagcctgggtaacagagtgagactctgtctcaaaattaaaaaaatattcagcctacaggaacaaaaaatagaatggggatcaaacagttttagaacatgaaaggaaatgatttttttggacagttgcagagcctgtatgagagtcctaatggtgaggggtggggtgaggagttactaaaatgccagcagtgaacccagggctgcctaggcgtctgaacagtaagaaagttgggtaaaacatggaggccaacttcaggattatctgtttgaactgcaaaactaacatggatgtagatgtccttagcaaagtgctacaactaggatttgccaggtttagcaaaaaaaaaaaaaaaaaaaaaaattaaaaatgcaagatatccaaatagtgcagggaacaggcttatgctacaaaattatttgttgtttttctgaaattcgaagttaactgcacatccttttttttatctggaaaaccaagctataacccaaatgacttcaacaactttgagcccgatattattgacaggatggggctctggggcattttggagaaagaattgaggaagattcgcgtggactcttcttgctgtaaacaaccagagtagtttagggccacagtgaaactggtggtagattgccatctagtggaaagatattagtagtgaaagctaaaattggaggactggacagattttttgttttttgttttttggttttttttccggagtttgccaggaaggattccgctctggccaactgcaaagtcctgaggttgcactgttagacgaggaggacatgggtggggggaagggagggtaggaagcagatggaataggagcaaggctgaaatgcgtttacctcgtgttctaagcagagtgcctggaccattgttccattccagcatgcagaaactttgctccctctccacgcaaaaccagagcaaaagctagagcttcctgtaagaagcgcaagattcttccacctgaggatggctcaaagtgatgtggaactatcagaaacaaaattgtaaagatataatcactcatcgttacaaccagcgacaaaggaagtcatccaaaaggtgacagtgtggctggctacacaggcaagctcagatcttgaaaaggttgaaaaaatgcaaaagttaaaagaaagcacacactggaattccaaagacggtatctcaaagtgagaagcctggaagaaactccgctctgcaagcatgctgaagaccaatacgaacagtaacactagcaatgataataataaagccaaacttgggacaggaaggagagagaaaagagaaatgtactcctgcgggcagacatcataatgtcaacatacaatacaaacacagcagatgcacttgagttttatttcagactatcttcccaaagaaatgaaaatattctagaaattaaaagagttgggccgggcgcagtggctcatgcctgtaatcccagcactttgggaggccgaggcaggtggatcacgaggtcaagagattgagaccagcctggccaacatggtgtaaccccatctctactaaaaatacaaaaagtagctgggcgtggtggcacgtgcctgtaatcccagctactcgggagtctgaggcaggagaatcgcctgaacccgggaggcagaggttgcagtgagccgagatcatgcaattgcacttcagcctgggcaacagggtgagactctgtctcaaaaaaaaaaaaaaaagagttggataaaaaaaaaaaataatactaagatggacttaaaaacccaaattggagccttataacttttaaatcatcctatatgttttctagtacaggacaagagagggtttctaagacttactagaggcaaatatcctaatttccaatgacatgatttgttgaaactaaaggacaataaatttaatgtaaaatcttatggaattctatgagattcttgaaaaatggcttatgaacacttaggtaaaaattagccagaaaagacaacaggtgttctaagctaatctgtctcatttgttatatatttaggtttacaagaatgttatattatcagagtgctatacagagaatatgtttttgattttattgaatcatagaggagttttattcctaaatccttgagggagatagtaaaggatggtatgggatgataatacagttaaggaagatttgtagctagtttaaccctctatacaaaaaaagaagtacccattaatggagtattttcaaagaggagtaccaaaatgtcctgtgctgacctatattctgtttactaatttattaatgatttgattataaaatgtgtaaaacatattgatcagatctgcaggcagaacaaaactgcaaaaaaatggctaatattatataagaactccagagcatcttaagctcaatattgggctaaaattaacaaaatgaaactgaacaggccatataaatctctgtatgtttagattagaaatgttaattctccaagtgcaaaatgaggagggtgaactgcctttaaaacagcttctgtttaaatgacctagaggtcatagttttggaccaagaatatgaaccagctgcacaaaaatgctaatgtgttttaatagagacaccatttgtagggtatcctatttaatggagatgacagctgtaccaaaatgttgaccagaccacattcaaagtaggcttcatttctgacaccactcctaaaaggaacatgggcaaactcacatttatttgaaaagaggcatacagggtggcaaagagcctggagcccgagccccatgagggctagcagacagagctcccaccatcacctgtagaaggcaaagcttttataataggaatgatatacagtccttagatttgtgatttattttttgtagtacttggaaaacaaaacccagatcaatcaaacaagatattggtttatttctagtagaagaattttataataaagctcttcaaaaattctgcaggttcttgtgaaagggagttagccccaagcctcgggccctccactgggaaaacaatactgaatgatgccccatcaatggtgggtagaagagattcctgcaagtcaggagcttggattttttctttcacccctaagtttccatgcttctaagaagttttcacgattttctctttgtttagtgtttgtttttaattctcaattcattttatttttagtatactattaaatcaacactttttatctaagagttgcatgtaaggacagatgtcaaagttgatttccgttcgattcttggtgttagatgctgtatttgctccatacaaaggtgctgctaatcattgaatagcgggagcatgaaccaattaagatctggaggagaaaatatccagccaccatgtagggctttgaaagcaacggaatgctctggtgattaatagaaagagcagttacagtcttccatctattttgccctatgtctgtctttaggctgttcatttcatgagcctcatgagacagaatgtgaaaacaaaatgagatatgtaaatatatacttttaaaaactcaattgttatgcatcataaaacatttcataatttaacaaatacatatcctaatccctaaattaagggtactgaaacctggctattacaatctccatcacatatccgccaagtcgaccttctggttttctcctgacttctgcccctctggtggatttctgcattctttcagagacattttctcattggcttgcacttatctattgttttaatcacacctctctaatccctaaacactcctcttctttatctattaggaggacattgatctttataactatttactgactctcccccttttcatattcatcttcctgtcccttcagcttttttttttttttttttttgagatggagtctcgctctgtctcccaggctgaagtgcagtggcgggatctcggctcactgcaagccaagctccacctcccaggttcaccccattctcctgcctcagcctcctgagtagctgggactacaggcacccgccaccacacctggctaatttttttttttttttttggatttttagtagagacggggtttcaccatgttagccaggatggtctcgatctcctgacctcgtgatccacctgcctcggcctcccaaagtgctgggattacaggcgtgagccaccgcgcccggcctttctctgctcgttttccattccactttctgactcctgtgccatctcctgtctctcccgccccctagcctctttcctttgttcccttcctgacctgttctttcctactttagtacctctcaggtccctttcctccaatctccagatctgtgccttaccttttcttttctgtttagatgtattttaggatagatttttcttctgtggttatctttctctttcatcacccagtcaatgttttgctgcttcttatactactgtcttcacccttcattcatctttctggtccttttcagtcccatctcgcccttctcccaggcaccacccacttctctttttatacaaattggttgtttaccctccttctcatgctccctttagcccttaacatactaaagcaggatctcaagcatagaaccaataaggtctaattgatgtttcttccttcattgcctaatttgtcatttgcctaatttggctcaccaccagaggacggaaggaagttattcaagttcaatgtggatgcagaatcactctgtgcaatggaacaggagggtggtacatcctcagtcagtgtccattctttcctgagctcctgaccccttgtgcagacatctagggagcattctccatctttggttaagttctctcttgttccctcctcttcctacatctcaacctataaccaaacctcccgagattagcacccaacctcaaacggtaaccataaacaaatggaggaggtaaaattgcagtctatgggtgagagttaagcatgaaatggttggtgatcattttagggggtgatctctcaaggtgcttagcaaagtgtcttttggtgcctctgcaagctagggtgggagagacagagaacattctggacccttcgtcctggcccagtgaggtctgggccattatagtctggggatgctgtcacatcctcctgtgcgggagagaactgtctacttgctatcctcggagtgctccccagccccgccccccatacacaaaaacaagagctgtgggaaaataagtcctagttcacaatactagagaagtgacttcagatattctcaggcttctcttgtgatcctgtccctatggggcccaacttccagagaaaggcccagactcagatttgctcagagtcagtcatgggtttgggaatagaatatggttaaatgtcaggaccgaaggaaaagcccaagatgcccagttccttctttagtgggagagatgagcccagggaagaggccctccatgtggtcatgcctggtggtgcccacttgagaatggcatccaatgactgctcagccaagtggaataaaaggacgaaaatggagctcttcattagtgtgagtgtggagacacataatggagacacataaccacagagaaaaccgcaggacggactagtttactgcttacggtggacactccagctcatttgtcaagcaaggataggaaacaaacaaaaacacctgatacaacattcagaagtaacacaggccacctgcttccttcaggacccccacacagagtgtgaagaaaagggaagcgccagccctctttcttccttctcatatcaacaagacgagcctacacaggggaaacgtctaactctcccctcagtctacagagtccacactctttcccaaacccccaacccctgtcctctcagcgagcccaatcctatcccacccaagcagcctcttttcactctttgaccccccaactaggggacatggctattcttgtcatcccctctggcctcctccagtgctgagggctgatccagggaagcagctggtggttcctcttttgccttgctgagtaagggcccagtccctggtctggccccttcaggcatccatgagagagctgacgaaggctgcctgcccagagcctgggggcagggagttggaaatagatcaggaaagtagccatcccctcctgggggatgccccagagcttgtgggcagaacggaccagggaagggcagctctggcaaacaggggtcactccaggaggctgtacctgtggggtcggagggtgtaggaattaccagacaggatggagagtatcaactatcattaacagtgttctacaacagatccccccgtgccccaacacacatagacgcagcttaggacctcagtgtaagtctgggtcaaactctagcctcagggtctgtccttaggaccacacaggctccagcactcaaggtcctgtggtttagtaacattgacacaaagtgaaccatggatcaggccaatgctgtttcgtacatgcaacaaggagaccaggaaccacctgatctttcctccccttctgctagaatctagtcttaatatgacagatgtttctgggatttcagaggtccaagtggcccagcagaatattagctgccatctactctaggccaaatattttcactcctattgtatctaatcctcaccaagtccctccctgacatagaactgtgagtcccatttcagagtcccagaaactgagactcaggagagctagtaactggctgagctggacttcaagcctgttttcctgatgccaaactccagagttctctgctaactctcactgtgctctgcagcctctgcagaattcgagggagaagagcttaatagaactaggggcaaacagaaggattcattcaccacccatgacctgcctcagtctaccctccagataacttggctctttgtcccctcccaccttcctcaatctcaaggggaccttctctcccagcctcaactcacctatattcccagcaggtggttgcatcaggatctgtcctgaggaggcacctgggcaatagccctgcgatgtgcccccgctggggccacagggaaacataaagagagagtcttcgggcggtggaagcgtcagtgaactgggcatggagaaggggaaagtggggaggtagggcaacttgggctgaggggactggaaaagcgggggctgtggagcctgggagaactggaagggtcctggctggttgctctgttggtaatcctggggctccagctcctccaaatatgaacaggggggtggcagggtgatgctgcaaggacagaggaacagctggtgaggtgcaggggtgggggagctccccgttcctaccacagtagcggagtccctacctctcgcctcctcctcatctccatggtaagcccagccttgcaaggctgctgcagctgcctcttctccccactcccgctcctagcatcttacccttgtttctgctctattgctgtgatcccctaggtcattccccagatccccttatccctttcatccccatctcctgtaccactctgtgctcctctcagttaaccctctcctctctgtgtctatcttctctccatctacacccccctacccccacccagataactagagtgacctacccccgtaggttccttaccttgtcccccaggacccacaggggccgtccttgtggctgctgtcactgccagcaacatccatcagcagtggcatcagttggggggtgtggacagggccaagggggaaaggaagatcggcccttcgcacaggtggggggctgaagagtgggggggtcaccaccctctgagcaccctcactgggttgggtgggggccaaagtctggtcagaagtcagcagcatggggggctctaggaacagaaggcaaagaggtgctataacggtaaggaaatgggaggcaggtttggcatcgctgaatggtagacacaagccatgcccaggtccccctgaataggccctgctggctgaaacactggaggactccagtcactcccacctccatcaaacaaggcctgtcttcactatctttagttgccattttcccccagctctgaaggtgggaactcacctggaaaggtatccagaggggactcctgagggaaagggtcaggctttggctccatgggcacagcaggtaggatctcagctgcagagctggaggcaggaagaatgaagactgtagctttggtggtctctggatttgcacaggtgcctcattgccaggagagacaccaattcccaaactctgcctcctacagggcattggcaacttcccgatcccatggcagccaaaatccctctaaatcttagctggcaaccctaggactcatgcctagccttccaatggtctccttctagaccctcaggatcccagcttggaccccacttctacccacagggatgatacagaaagaggaagaattctgacctgcattgactgctggcagggccaggggctgcaggattgtccttgctttctttcccattcagtttctccatttttcgccacttggcccggcgattctggaaccacacctatggggggaaaggtgcttgaagaactggagaagaggggcagagactgaggcttaggtcctggctgttgcacaaggagctacaggactttggaaggtcactccagcactctgcttctgagccctccgtcaggctggttttatcaaaagtctctgcagtgccttcctctcctaatgctctcaggctgtggcactctggaaacagtcagggacacagccacgtctgaggcctcaattcagctcctacccaggctaccgctgagcgctcactctgcaattcgagtgtttcaatggtgggccctccgccactccaccctgccaccagtgagccggccccctttaccatgatgcgctggggggtcacccccaccgtctgggcaatctctcggcgtttatcactgtcaggatagtggtcttcttggaatatcttctctagctcctccagctgatctgaaagaagaagaaacttgtgtgaggaggacaaatgccagtgacaggtaggtgaagagaaagagaggtgctcaccaagtatctccaacagatggggccactgcccctaacccaacactttcccaaagcctttttcctattgggctgggccttctcgctcttgggtgctacagcagagagcagtatgtttactttctttactcttctaccctggtcccaacatcattttctttttttcttttttagacggagtctcactctgttgcccaggctggagtgcagtggcgcaatctcagctcattgcaacctctgcctcccaggttcaagcaattcccctgcttcgacctaccaaatagctgggattacaggcacaggccagcatgtctggctaatgtttgtattttcagtagaggcggggtttcaccatgatggccaggctggtctcaaactcctgacttcaggtaatccacctgcctcggcctcccaaagtgctgggattacaggcatgagccactgtgcctggctccagcctcattttctgatgtgataacccaaccttccctctgagggtcagagatagttgcactaccgcggcccaagagagaatccgggacgaagtgacatacaaactaaccccatccctcaggtctcctgggggtagattcttcacacagccccacctttccccaggatgaccccagatctcttcggtttcctctctttagggacttacctgagcggtatagggttcgtgtctttttcctaatttggcaggtcacttccgggggcccctgcttgtggtctctgttttggttgctctgcgccaatgtactgaggagattggccaggtggcagggcccccggcctgacccacagggcactgggttgtgtgtggcacgggctgagttaggggcacccggagatgatgttggggccagacccatggcattaggctttttctgcttcccgggggctggagaataggacctctttcctatcttcacctctcccactgggagggaacaatcttccccctgagtctggggcctggagcgggctagagttctgtctttgtggggagccctggagcgggggggcgggcacagtctcccagcatcagccccggtggcttctccagagactgctggcggcttcttctctcctgagatggtgcaggagggtggcagttcctcactctgagtgtcctgagcatgaggggctgagccccggagcagttcctcctccccgggtcctgcagccaggggcttctctccagctttctggcctgtggggagccaacatccactgaccttagcaccagggagaaggaagaactggaccaagaggaagtgctgcttcctgctttgcaaacggtttgatcttaagctttaatttgtctacctatcaaatggggtaataattccacacttaccttcctagcttgactattgtgaggattaaatcagataacccaacttctttgaaaaatgtagacaaatttatgcaattctgagacggcgttagctcatggtatctcctaatttgggggtactcaccccttgtgagttcccttttcccagacaccaggggtatgagtttgagggactgttcaggtatctctaagggatcatgttggggctgcggatggaccaggaagacaaagagaaacagattgacagagattctgcttctcccaaggcgggatgctgtttctgctgcacaacaggcattattgcttggagaagggacaagaaaggattcgattgtctccagcagccgaggcaagagcatcaaaagagataacagggagaaccatggaactctgtctctgccaactctcctcagctccatacatgcccccccgcccgcaccccccaccccactaccatccagcacatccacttcctccccctccctgcaaagcaggatctcactctctggtaaacctctctttcgagtaaggaaactgggacccagctagaactaaaaaccctaccactcatccctaaagcttgccttcctttctgtgagctgactgatgcattgggagcttatcatgttccaggcatggcgctaagcacctttcaaagattagcacagtgcatatttaatctctgcaagaacggcactgctaatattcccttctaacagatgaagaaatgaggatgagacagcagagtaatatgtccaagatcacacagcaccctgagcacgtactctgtgtacttaatcaccacatggagtccttcctggggccatcaaatgatccccccactttcacctcccaactgactcataactccaagaaccctcagctcagggagctgctttatcatttccaactaaattggaacatttgtaatgaatgctaagtaacgactaagagctactgttactttaatgaaaattgcatgagataggtcttaaggaataacattttttttttttttttttttttttttgagatggagtctcgctccgtcgcccaggctgcagtgacatggtgcaattctggctcactgcaaccttggccccctgggttcaagcgattctcgtgcctctgcctcccaagtagctgggattacaggtgtgtgccaccacacccagctaatttttgtatttttagtagagatggggttttgccatgttggccaggctggtctccaactcctgacctcaggtggtccaccagcctcgccctcccaacgtgctgggattacagacttgagccactgcgcctgaccctaggaatgactttgtaacagagtgtcaaggaaaaaggtcatggtcaagggtgctgttccaagtcctttcctaggacacaggctggacccgacttgcatgagagggtctgggctggtgaagagggtgagcaggcctctatggagtgaagggacaaagctggctggtggtgtggggaagcagggacaaatttgttttacagcattttaggagagcttgtactgtagcaaaaagcctggtacccagcactgtgggtgctccgtaagcacgtgtcctatgggagtgatgtgcgctagtaagaaggggacgggtgtcagacctaagactagaagggtcctggggctcccagggttctctcccctgcgcgctgggagactggaggcgggcagggggcgcgggggagcggggaggggggttgcaatcccaaagcacagggggcagtgaggtcggcctcctcccaccctaccccacccgactccacccggccctcggcctactgaagctcttaggtcggctaacgctgacctggtgatcacaggcctccccccctccccgaacccccaaagcctgaccccctcgcacgacggggtctccacactcacccagcggtccctggcagggattctctgtgggttccatggcctggactcccgccgccgcggccggcccgtgatgcacaggcgcggcctaatgaagcctcgccgggcgggcaggtgtgcagcccgcacgggccgggccgggccgggggagccgtagcccgaggctgcgccccctcacccccacccccacccccagggcgaggccggcccgggaggctcggctggggcagctgcgagggcggggaggacccgggcctgggcgccgcctgctccgctccccccagccaggagcccaggcccaggtgcgggtctccttcaggcggcccctcccgtggcggggctggagggcgaggctggggtgggaggcgggagcgaggctacccggtggtcttcggggggctgggcccagccgtggggctcacccacaccctatggaggactcagtcctggatcgtggctaaagcccttccctgtggactgtggaaggcgatttctagagccactcctcaaaggggaagcgctgggttgcccaactcccatgctagggcccctccaagcctcagtattaaggagcttcaaagtccccttcctgattttgtttgtttttgtttttgagacggagtcttgctctgtcgcccaggctggagtgcagtgggggatctcggctcactgcaacctctgcctcccgggttcaagcgattctcctgcctcagcctcgcgagtagctgggactacaggcgcccgccaccacgcccggctaattttttgtatttttagtagagacggggtttcaccacgttggctaggctgggctagaactcctgacttcaagttatctgcccgcctgggcttcccaaactgctggaattacaggcgtgagccacagcgctcgccccccgtactgatttgagggtctccagagcacaaaggctgcaccggatgatgaagaaggagctgaaagagccacagactccgtagatccggtacagtccacacacaggaaattcaggtacagccaggggcggccctgccagggacggtgtggttactgtgtttccatccatttggtgtttcgattttattctctgagaatggaagggactttcttgggggagatctcacaggggtgcagccttatgattcctggttcacggaatgtttcttactatctttatacaaacaaaatcagaatttaaaaattcttgcctcttctgagcggggaggggtagaaagtcggagggctggtcagatagaaacaggtgcttggagctgggtggggagcggggcggcctggaacagaatccaggtgttttgctttaaggatttaaaagactctggacaccacgtgctttcatgctgaaatcagctgtgggtacattttcctattcctttaattgccttgaggggcttggcctacacatgtggactttggaggattgtgagacctttagttctttctgaaacacaaaaatgtaaactaacttcgaatatgatcaagacttcaggcatctgctgtttcattctgatgccttccataaggcggatagcttctgttttatgaggcgttcagatagatggggcccagtttctgtgctagaaatgaagcattccaggacaagtgagcaagcagttgtggggcactgacattgcttccaggatcatttgatggtgaaaaatcaggaccatttggtggcgacatggtaaatggaacccaggcacgtccttgctcacagaagcttactggtggagggaagatcatcaaatgatcatgtcagggtagtgtggtcagtggtgagttagaagtatgaaaggctactatggagtacggaggagcaggaaccccttctggactaggatggaagcttcttggagaaggtgacacgtgggctatgagctgtggagtttaccacatcacagtcccgcttaaaacctgacagtgacccctgactgccaggatgaacggcaagctctgacatctgggtctttcccctggatcctcagctcccctgtgttgcccacctgggtatttcagtggtggtgtgtgtatgtcttttttggcctaatgtttctcaaagaatgttcttaaaaccccctggatcagaatttcttagggaatttgtttaaaatgggggttccaatccccagaaatcttaattggttggtccaaggaggtacccagaaacatccatttgaatcccctcaggtaatttttgtgcgtttcagagtttgagacacttttagactttgcaaaaactaagtcagttaaaaactatcctggggataggagtaggggcaagggatggtaggggcctgtgtggggaaaggaaatgaccttttgccctttactgaggtgtctgctgcagtgagaagcgggtgcaattaatttcttaacagattatcctgtcacattaaactgaaaataagtcatccttctctgccattgtttatgttgtatttcctctctctagctggctcccctctgccagggtgaaggtcagaaagcaaagatccaaattgcccataggctgtatggcacccttccacaaactgaaagatacagggtctgagtctacaatagatttgcatagggacttagagaatttaaaatattggcatttttccagcggggcacagtggctcatgcctgtaatcccagcacgttgggaggccaaggtgggcagatcacctgaggtcaggagtttgagaccagcctggccaacatggtgaaaccctgtctctactaaaaatacaaaatttagctgggtgtggtggcacacgcctgtaatcccagctacttgggaggctgaggcaggagaattgctggaatccaggaggtggaggttggaataagccaagatcatgccactgcactccaacctgggtgacagagtgagactccgtctcaaaaaagaaaaaaaaaaaattggcatttttccaaacatagaaatgaggtttttttcccccacaaataatatagttggatgttttgtttatttacatgaagaattttattggctgcaagtgaattttatctaagatgtacattgcatgggaaaatgtctggtgagttttgttgggaaggtgttgtgtttttgatatatcttgttaagtcatatcttccatggatcaacttcaagtgaaggaggtttgctatggaagttaaaatacgggctagagcaaagagacggctcaattatatagaggacaacaaggtattgttttaggggaacttggggctgtttcttcctaagtcctgtttggttgcatttcatctttgtgatcagctgactagttcatagcctaactcaactttgtttagaggacagggaggtatttttttttaatttttaattttttttttttggtttcttagttttcagagctagactttacaccattaccaccatgcacttagaaagagtcatttcttccaaaatctttttttcccctcacagatatgagaatgccagaacaaaaagaaaggtgtctgatactaaaaaaaaaagtagttaatttttttcagtctatgaagagtaagtgaaataagtgttcttgatccttctccctctctctctataatgagaaaaataaccagaagaaggcggctgattgagaacattttttgaagcaaaaccacaaggtaatgtgttcttgttctatgggccacaccccagtgtaggcagcatcaggtcattggaacacctaggaccagaaaggcaagaataagttgtgaaagacaggcagaaatctgcagggagattgtagtcacagccagggagatcgtagtcacagcaaggtatgggaggtcagggcccccggaaaaccaccaggaagagatgacctgtccaaagcagagagagcgaagggaagcctgagccaggcacgtgctcagggaccggcactgccagagcccgggcaaatggccagatgattggataaatactggggaccgatgacagggaaaaagtgaatggtcccagagactgggagagacactggcaactgccaaagtatctgcccaggggcttcctttgaaagcccagaaaaggatggtttcaggttgcctgtgaagggaattaggaacacctggctagagtggaaactgccgggcagggccaggacaagttctggcgtgaattagcgttgtaacttctaatgcccttgccccagacactcaggataatctgcgtttaacaagaatggtgactgtgttttaaacattctgctgctgctgccattgtttacaattaatcgccactgctggtgttttgtaatttagaatgtactttcacatccattctaattctcctgatgtgcctgagtctgggatgcactttcttctttctattctattctagtcttctccaggattgcaatcgctgtgctaattatagcatggcattcaaggacccctcaaaacccggccccaaccttcactcaggcttcctctttggccaccaccactcccctgccctgccccaaagtctcccccactcttccaggtttttgttccaagcttttaccctttagaaatcgccatgccttctcagggtcactgatcaagctgtatatcagcatgaaactttttttttttttttttcctggcaaagtcttactcatcctccaaaacccaacccaaatattccctttctggggaagcctggctcagccttccacagccagaattaactgccccctcctaggtcctccccttgtactgtgtttacatgtatattacatcactgcatacaggctgaactgattagcgttttgtgtattctccactggattgggagttcttagatggtaacatgcatctattcaggcccggtgctttcttcttgctttctaagtatcaactcattgaattctaacaacctatgaagttctatcatatgattatccccatcttattgaagaaaatgtagcataaagagtttaatacttctccgaaggtgacagtggccacctcagatttgaacccagttagtctggttcctgcctgcactcctaaacactaggctacactgtttatttgattgtatccatcactgtactggcatagtgaatcccgcatgggggatggatcattgttcagtgacaaaaagttgaccattgccaggagttagggagcaggggagggaagtggctgtgagttcaaaagcgtagtagcagtgatggaaccgttctgaatcttggctatagtggtggttccacaagtctacacacaagataaaactgcacagaactaaatacacaccagtgcatgaaaactggtgaaatctgagtaaggtcacagactgtatcaaagtcaatttcctggtgtggtattgtactggcgtgacagaagatgtaaaacggggaaagtgtatatggaatccctgtattatttcttacaactgcatgtgaatctacaattatctcaaaaagcaggaaaaaagttgatcctagtgttctgaccacaagtttggttctcctggacttggttaaatataattcacagaaataatgttttggtatagtagcattattaacttttgcttaatagtaactttaaaatatagatttaaatgatatctacacctttaacaggggtgtgggtgagcaagcaggagaatttatatctaatttgttctaaaagtaaaacaataacatgtctcataataggaatgcaaatttattagaaaaaagggtaaataccgaacaactgaaaaatgaagaagatgctatttctcatcaaacaacagtatcggttattaacaatttggcacatttcctcacagcattttttccattattgctgttttgtatatgattttcatgattgtaattacactccatatataatttcaggcatgtctcccttaaaatgtactatgaaaagcacagttctgtattgtttcaaagtcttcagaatttattgagtggcagtactgttatttaactatttttcaactgttggagcaatcttttgaacttaaatattatacgttttaaaaaattaaaaaggcaaatttgaaatacagcttgcatatttttcccttaatggcttttaaaaaataaaaacctcttccacttggttattcatctccctctagatttttttaatagtcccaaacccatgagaagccatgaggctgtttatttcacaggaatagacaggctgcctggctggcaagtggatagctaagcgtaacttcaagaaggggtccgggattctaaggtcgtaaacctgacagccagcagggcagctttagtgagaggcaagaaatgtccctgaacaaggtattttttcctcctttggtatcttgggtctgtaccagttctgctggtggcttgatagatttttccaatgtttgagtctagggtcactggctcccaagaggggatgctctaccaagagtcctcagtgtatgggaagacaactctgtcttctgttcagagtgtggtgctcacaattttgctgttgcttccaggacatgagctcaccctcctgggctttgaagccatccttgtctctggtgtcccaggtaccctccaggtctggtgatgttagtgtcaaaaggagagccatgtcatggccagcaggttcctctatccttttggggcaacacactttaagctcactaactttatggtgacaattctagatctgtaaaattgaagatactcgagcttgtctttaaatatctcctttgcttgatgtcaattgagggcaagatcagtagtgtgggttagaagctgggagcagcttcctttgcacggaggagagaatggtgaaatattaggcttgcgtttagtgaggcgtagagattaaacaatgatagcagactagattgattacctgacaaataattaggcctgcaaaacctgtcattccgttgcttggaaggaagcaatcaaactggataggctatgagatccagcctttgttttgcaaagggattctgatcgtttctgttttacaagctgcattgctgtatgctgcacatgttattaaggtggtgcaaggcagtgcaggttgtgagtgggcaacctggagctcagtcaggctctcattcagagcagtcctaaggaaaaggagagcagagcaacagagagggaaaagccatatttggaactagagatgtactagatatcactggatatgcattcttgagtcaggagacctagtttatgatctgagctcttagagatcctgctccaaggtccagttcttcagcttctcggttgatgtgggctcctgagcaagggaaacacatctctcaaacttaacctgattttcaaactgaattcctgattcccacccgcaaacttgtcactcctcctgtcctcccgatctttgtatcctccacccagctggaatcacccttgatttctctctcacacacagcatctatagaaactgccagattattcctgttgccctctttttactcccagcccactgtcacccattttccagagatttgcatgtgaaagtcttaaaatgtaaattaaggccgggtgcggtggctcacgccggtaatctcagcaatttgggaggccaaggcaggaggatcatgcggtcaagagacggagaccatcctggccaacatggtgaaaccctgtctccactaaaaatacaaaaaaattagctgggcatggtggtgcacgcctgttgtctcagctactcaggaggctgaggcaggagaatcacttgaacctgggaggctgagcttgcagtgagccgagatggcgccactgcactctggctacagagcaagattctgtttcaaaaaaaaaagaaaaaaaaaaaaaggtaaattaagccatatatgtttttctcctatttgtatgcttcagtgattttccagtgtacttacaggaaaattaaaacttcttgctgtggtcctgtgtgatccggctccggtttaccaccccagcttcatctcaggtgactcttctgatccttcaagcacttgaaatagatcaaattttcccatttcaaggtgttcacatatgctgttcctgtgcttggccaaactattctctttgttcttgtgattagttcatagtcaggattgagtttaaatggtatccctcaatgtcaagtccttcagccacattatctgcttaacatctgcctcctgatactttctgtttccattacaactcctaacacaacatataattatatgtttatttgtttacaatctatctcttttactatattttaagtttcatgggtacagaaactatcccagtttgtttcaacaatgtatacctgtgtataggacatatctagcacagtggctgggctctaagtgttaactgtttgttgaatgaataaatgaactaataatgtggaccttttagttggaaaaaagagaaaattatcagatttatggcacaaatggcagttttgggaaattcacaatttgatacattacaggtatttggtaagcagattaagttacaatgcttcctgaaaatatggattggccattttgagaactgaagaatccagaaactagggataaaatgtggcattttaatgtccattctagagaatataatgagacttgcattacactttggtaaagtccatagtcaccagaggccattgcttttcagaggctgagaagaaaagcaatagtcagagctacagcccattaaggctgttacagtcttcaaagatgggcacagacaacaaaaaatggctttgtaggcaacatatagttgaatcttgctttttaaaattcagtctgacaatctctgccttttgattagggcatttagaccacatataaaagttgttgagcctgtaattccagtactttgggaggccgaagtgggtggatcacaaggtcaagagatcaagaccatcctggccaacatggtgaaaccccgtctctactaaaaatacaaaaattagctgggcgtggtggtgtgagtctgtagttccagctactcaggaggcagagtcagaagaattgcttgaacccaggaagtggaggttgcagtaagctgagatcgctccactgcactccagcctggcgacagagcaagattctgtctcaaaaaaaaaaaaaattattgatatagttgagtttaaatttatgatcttagtgctctttttctatttgtcacacctgttcttatttcctgttttctccttatttttgagtcattgaatatttttatgacttaattttatctcatttgttggcttattgagtatattattgatttataaaattcattgattttttttttagtgattgcattgggacttaaaagatatatgtttaatttatcagaatgtgccttaaagtgacattaaatcacttcattgaaatataagaaccttacaacattagacttcttctttttttttttttttttttttgaggcagagtctcgctctgtcgcccaggctgaagtgcagttgcgccatctcagctcactgcaacctccgcctcctgggttcaagtgattctcccagctcagcctcccgagtagctgggattacaggtgtgtaccaccacacctggctaatttttgtattttcagtagagacaatatttcactatgttggccaggctggtcttgaactcctgaccttaggtgatctgcccgccttggcctcccaaagtgctgggattacagacaacattagacttctgtgtctcccctctcagcctttgtgctatcattatacagttttcttctatgtgttataaaccccacaacacattgttattttttatttcaatggtcagttatctttaaaaatattttcaaaataaggaaaaagagtattctgtatttacttacatatttatcatttccagtgctctatccttcggatatatccaaaggatatcattttccatgttaaagcaatgtcttcaagatttcctgtagtaaaaatctggtgacaatttctttcagcttttatatttgtgaatggtgtttattttgtcttcatttctgaaagctgggtatagaattctatgctgatatgttttgttgtttcttgaatactactatgaagatgttggtccattttcttctaccttatataatgtcactaaagaaaaagctgctatcacaattcttatctttgtttctctgcacaggtgactttttgtctttagctgattttaatattttctctttatcactaattttaaatagtttatgatgtgccttagtgtagttttctgtatgtgtcttgtgtttgggattcatttagcttcttgaatttgtgagtttatagtttccatcaaattaggagatttttttcattgattatttcttcaaatatttttttccatccttctctctctccctttctttggggccaccaattttacagatattagccttttgaagttgccttatggttccctaaggcaactgtttttttgtctctgtgtttcattttggagagtttctattgctatatcttcaagttttgtatttttttcttcttcagtgtctgtagttattatatccagtttgtcatctcagacattaatttttttcatccctagacatttgatttgggtgttttatatcttcaatgtctaaacatgcaaatattctcctttatcttcctgaatagatgaaataaaattatgtaactgctttaacgcccttgtctactatttttatatctatttctatcaatacttttgtctagattatggctcatttttttctgctgctttgcgtagctggaagtgttttattagatgctagacattgtaacattgtgaattttaccttaccggatttactgtgtgagagggtgtgtgtatatgtaagtgtgtgtgtgtgcttgtgtgcttgttctgtatcctgttacttggaagtactatcaccttttcaagacttacttttaagttttttaagatagagagggattccaactaaggctaattttccctgccaaagcaatatcttctaaatactccacccaatgccccatgaattacaatgtccttccactctggctggtagaaatccaaactattcctggccctgtgtgaacttcactggttattttaccttttctttttcattggttctttcctcgctagggtagtttcctcacacacatgtagtaattagtacccagctgagggttctctttctccatccttctctccttcagctcctctctgggtggtgctctccttcccagtacccaccttcgtcttcccaaattctcaattctgtatcctcaactcagctagaccaccctctggcctgaaatctggaactttcctctagacaataagccacagtaattgtgggctcatcttgtttcctttttctcaagaatgattgtctcgtactggctgttgtgcaatatctgaaaaccattgttttacatattttgtaaagtgttctaattgtttgggatggtagggtaaatctggtttctgtttgcccattttggctggaagatgaagtgcccacaaactgtacatattgactagttctccactgtgtacaggataaagttcgaactcattagtttagcatacttagtacattacaagcagacttcatgacaatctcctacccacacctcacccacttctagtaactcaagacggcatgccacctcttgaccatatccatactttttcatgtcttagtgcattgcacatgctcttgtctttgtctaggatgactttattcccctgtatcttccatctttccaaatcccgcttgttcctcaagacccaactcaattaccagttcttctgttaaattttaccagacctgagtgttagttgctacaggatatgattttattatgttcttataacactattatagagtgtctttatttgacttacacacctgatggagatgtcttcatctcctcaagggcagtaacctcgacatcttattcacattttcatctctcagcctagcttagtgcctgacttaggttcttggcaaatgtctacttctgaatgaatgccctgtcatagtgcataatcttgctttctgaaaatagtattggcttgcttatttggaggcatgtgggaatgattaaaaaaataaaataaaacttggactggaatagccaccatggtctagcaggtgttctgtgttatgttaatcacagaggatgctgggcaggtgctggttcccttctaagcctttatctcagcattaaaacaattcatagccaatagctgggatttttctctcacagatggtggagttctgtgacttatgtctgggagaggtaagtgcaggaagagttgttccttggaagttccataaagggaatataatcacttccaaagcatcagcttcaactgaaagagctggaatcagctacttctggcctgaccaaagccagtatcttagacagctatgtctcaggtatgccctgaactgcctggggcatgtgtctcaggataatgtatattaaggattcaagattcttaactgttcttgaaggctaacaatttaggaaagagcaaacattttagaagcccacctccttattcaagatggagaagagtaatcagatatgtctctgaataaaacaaagtccaccagaatgttaaacacacacacacacacacacacacactcacacactcacacactcttactcttactctctctctctcttctgagtttgtttacttgcctgccagacaaaggagtatacactgtcaacaaaattcactgaatacttaatgggagggggtcagggtgaggaacaaaaggctttattcactagaaaagggcttcaaggtggttatactaagtagtgattgaaaactccctctctgaatggaaaaaaatgagttcttgtccatacatgtttggcttaatcatgtcccattttagaaagtaatctgtactttggtacactgaggttctgacataccagattactcacaattctgagtcctttatcagcttgagatgttggcttgctgaaagttcatggctgttcagtgacttcatctgattggaaacagttttgatgaacccaacactcagttttgacttcttctatgcacatgtagctataagtgtaaaattgtccttttatagatgtgatcatgtaatttatcccacgttgaatttgggcagggggcatacctgatttagcttggagaagggcacaacatgaactgtatattggtgggcgaaaattaatgatatttgatatatataagactctaaaaaatataatttatcaaatgctgaagaaaagaatttgggctttgcagtaaggaagacttagttttgcattgcatttctgaacatattcatcttaatctgtttttttcatataaaacaaaatatcagtcttatcagctaatgggaagattaaatgagatgatgtatgtaagcaactcccacagtgtcctactgtgtccggaatcggtgggttcttggtctcactgacttcaaaattgaagccgcggaccctcgcagtgagtgttacagttcttaaaggcggcgtgtccggagtttgttccttctaaggttcggatgtgttcggagtttcttccttctggtgggttcgtggtctcgatggcttcaggagtgaagctgtagaccttcgcggtgagtgttacagctcataaaggcagtgtggacccaaagagtgagcagtagcaagatttattgcaaagagcgaaagaacaaagcttctgcagtgtggaaggggactcgagcaggttgccactgctggctctgccagcctgcttttattctcttatctggccccacccacatcctgctgattggtccattttgcagagagccaattggtctgttttacagagagctgattagtccgttttgacaaggtgctgattggtgcgcttacaatccctgagctagacacaaaagttctccacatccccactagattagctagatacagagtgtcaattggtgtatttacaaaccctgcgctagacacagagtgctgattggtgcatttacaaaccttgagctagatacagagtgccgattggtgcattcaaaatcccttagctaggcataaagattctccaagtccccaccagactaactagatacagagtgctgattggtgcattcacaaaccctgagctagacacagagtgctgattggtgcatttacaaaccttgagctagatacagagtgctgattggtgtatttacaatcccttagctagacataaagattctccaagtccccaccagactcaggagcccagctggcttcacgcagtggatcccgcaccagggccgcaggtggagctgcctgccagtcccgcgctgtgtgcccgcactcctcagcccttgggtggttgatgggactgggcaccgtggagtagggggtggtgcttgtcggggaggcttgggctgtgcaggagcccacggcggggtggggggctcaggcatggcaggctgcaggtcccgagccctgccccacggggaggcagctaaggcccagcgagaagttgagcacagcatctgctggcccaggtgctaagcccctcactgcccgagtgtggggcccgccgagcccacgcccacctggaactcatgctggcccgcaagcgccatgcgcagccctggttcccgcctgcatctctccctccatacctccctgcaagctgagggagctggctccggccttgtccagcccagaaagaggctcccacagtgcagtggcaggctgaagggctcctcaagcacggccagagtgggcaccaaggctgaggaggcactgagagcgagcgagggctgtgagggctgccagcaggctgtcacctctcaatcccccctctaaacaggacaccccaactgctgttgggaatttggccgatgaccgctctagctacttcctgctggataggggcaaagaaggggccctgcagttgtagtgtcctccagaggggaactctctaggccagtggaagtgccagtggatcggtccaggggtccttggtagaagttgttagttgaactcatttggggttccatttgtaagaccatctgtagcttgatggcttcgatcctagaggaaacaaatttgacaagaaggttaaaaatacagggcccaaaggcgagtaacagcaagatggctgccatgggacctagaaatgggagaagccatgttgcccaactccagaggttggtataagagtttgaaaggcattgtctgatatcagaagccctttcctgtaaatgccaggtggcatctcgtactatccctgactggttagtgtaaaaacaacactcttcccctaagaaggtgcagagtcctcctttctcagcagtgaggaggtgtgggcctcggcggttttggagagtcattgctgccaaagagtctaattgggattgtaaagtaagaatagatttcattatttcttgcaaactgtctgagaaattctttgagagtgtatggtagtaggataatgaagtagataaaccggctattccagttcctgtagcagtagccattcctaaccctataaatagggatattagttgtatggctctgcactgacggactttagctttgacaggtaccaatagggtctgatttcctggggcaatgttaatgttgggacttagaaagactaaggttcaggtgcctgtccagttagtggggaggcagatataggttgatgttccacataagaagaatatgccttggctaggtagacagaaatttaccctggcttttaaaggaatagggtatactgttttttctttactacttctttctctcttcaagttcttctttgtttcttcctctctttttttctttctctgactttctctttttttctttacttcttgctggtctttccctacttctgccagccacttttgctgctgttttcccctctccttccccattttgatggctttggcagtgtaagactgccacctccttgtgtttttgcattgggtgcaataactctataatttccttgtggtatttaatggtggttgccccagaggttaggaactccctctctttccatattgcagcataggcatgtaggattagataagcatacttgctatctgtatacacatttattctttttccctttcccagttctaaggctcgggtaggtgccactagttctgctaactgggcactggtccctgggggaagaggcttactttcaagtatggttacatcactaactatggtgtaacctgcccttcgtatcccattctccacaaatgaacttccattgatatataggttaaggtcaggattagctaaggggacttctaagagatcatcttgggtggcataagtctggactataatttgttggcaggcatgctcgattggtttcccatcctctgggagaaaagtggcagggttgagggccatgcacatgcatatttgaagcaccggtccctcaaggagtagcgcctggtatctaagtaggcagttatctgatagccataaacttcctttggcacctagtatgccatttacatcatgagtagtccagacagtgagatcctttccttgtattattttgatagcctctgacattaagacggccactgctgcaactacccttaaacagtgaggccagccttttgctactacatcagtttccttacttaggtatgccactggttgtggggttgtcccacaagtcagtgtaaggactccaagggctatcccagcaatctctgtgatgtagaaagagaagttttgtcctgtgggagggcttaaagctggagcttgtactagggcctgctttaaggttttgaaggctgtttctgcctctggttcccattctactagatgagtatttgccctctgggtttccttgattaaagtatagaggggcctggctatctcactgtatccagggatccatagtcggcaaaaggcagtaattccaaggaacccccgcaactgttttaatgtcttagggtgaggataagccagtataggctgtattcattccttgctgagggccctggtccctctggaaaagattaggcctagatatttgacctgctgtaggcaaagctgggccttcgacctagacaccttgtacccttgattagctagaaagttcaagagatctacagtagcctgctgggacgaggcttctgaactggtagccaagagtaaatcatccacatattgaaggaccagagtgcctggacttcagaagtggcctagatcttgggccagtgcctgaccaaacatatgagggctatccctaaacccttggcacaagaccatccacataagttgggacgtgtggtctgtgggatcctcaaaggcaaagagaaactgggagtcagagtgcaggggaatacagaagaaggcatccttgaggtccagaaccatgaaccattctgcttcctctggtatttgagagagcagggtataggggttgggtacaactggatatagaggaattactgcctcattgatgagtctaagatcttgcactagtccccactgaccattcggtttttgtactcctagaattggggtgttgcagggactgctgcatttccttactaagccttgagctttcaaatgtttaacaatattctgtaatcctttatgagcttcaggccttaagggatattgcctttgataaggaaaagtggtgggatcttttaacctgatttggactgggcgggcatttttctcccttccaaattgtcattccaatgcccagacctcagggttgattccctcctcaagtaggggacaacaaatgggtaacttgttccccatattcatgtagataatagctccggccttggctaatatatccctccctaataagggtgtgggactttcaggcataacaagaaaggcatgtgaaaagagcaaagtctcccaattacaactgaggaggtgggagaaatacctggttacaggctgtctcagaattcctcggatggtaacggaccttgaggatagtcatccaggacaggagattaacactgagaaggtcatgccagtgtccaggaggaagtcaatttcctggccctcaatagataaacatacccagggctcagtgagggtgatgacatgagctggcgcttgccccaggcaccctcagtcctgttgttggatcatctggttgggggcttctgacccagggaaccttcatcctctggggcagtgcaccttccagtgattgcctcggcattgtggacatggatgagggggcagcttgtttctcattggacaatcttttttaaagtgtcctagtaaaccacactgataacaagccctaccaggtgattgacctgccccattttctgtcctctctgaaccaccagggtttgtttgtctgagggccatgactaaggctgtggctttcctctgatctcgcttttccttttgggcctgttcctcttggtccctattatagaacaccaaggttgccaggtttaataatgcctctaagattttgttcagggcccagggcttgcttttggagctttctcctgatatctgcagctgattgggtaataaacttatcttttagaatcaattgaccctcgagtgattcgggtgacaggggagtatattttcttaaggcctctcatagccgctcgaggaaggaaggattttcttcctttccctgagttatggtggacatcattgaataattcatgggcttttttctaattctccttagtccttctagaacacagatcaacagatgtttatgactccattccccatgatctgagtcaaggtcccagtggggatccatactggggatggcttgctgaccagtagggaatttgtcccttttttcagctgtcattctatcatttactgactaagataccaggtatctccaaactctcaggctgcagctaaagctgcgttcttttcattaaaggccagggtttgaactaacagtagcatgacatctttccaagcgaggtctaaggtttgccctagaccctgtaggacatctatgtacctatcaggatcatctgaaaacttccccatgtctgccttgacctgctttaaatcagagagggagaaggggacatgtacccgggttgggccaaattcccctcctcctgcagcttgaaggggacataaccgataacctgggggtctttgtggtcctttggagatttctttgcttatttccttctgggcaggggagattagaggaggattatcattagtaggaaggggagctattgggaggctgggatatgggggtaagctgagaggtcctcctgtgggatgtaaattgtaagctttgcatagttgtgtattctccctcaatgaaaagaaagcttggatgtaaggtatttcactcgatttgccttccctcttacagagaaggtcaagctgcaggatagtattgtaatttgtacttccctcaggtggccatttttccccatcagagagaatattggggccaagccatagtgcagaaaaaaatgagccacctctttttcagggtttatgggtcaaattggtcccaatagcttaggatgcatttcaagggtgagcctgttgatgcctgagtgtttcccatctgaaagacaaaactgcccatggttttgatttgttttgtttctccccctgcccaagaacccacaacagtccctggaccctgctgatcggaatagttgtgctcaccgacgcagcagcagaaacactagttttcctcccagaccacatggaggaccaaggaaggttggatttagtggcctttaccaatgcattctcaaaaacctgcatccttgcctgtcctcctagaccacaaggaggactgaccaagaaaaatcggatttagtggcccttaccgacacattctcgaaaacctgctagagtcctaagcattctcctgttagtattgggacgttacccctgtcctataaagatgttatgccccaaaaatgaagtggagggctatgcccttagggagggaagggatctccagggttggaatagcgacaccttttgtcctcacttatatgaataggaaggatacaatttctgaggctccccatattctagcttcaggaataggttttgttaggcctgttagtctgaggagggatcctaaaattccaagtagtccccaggacaatggggctttgggcaaaaattatgtctttctgattggtgagcccaggtgcctaaagaaggtaacaaagtcctggagtttatactagaaatcatttttatagaagaaactagaaaagcaccagagacaggtagcaatttttagaagcgggactaaccttggagaagagaggcaagaggaagtttgtctggcaggcattaggacccagggggcaagggtcaggatagataggagagatgggcgagtcttgcttgggcaacatgcctttgagagttccactcatggccgcagggtcaaccaacttgttgtcgggaccccggagctgcatggctttcctctctgtcaaccctaggctcagcccagaagtacaagaaaagtggaagctggttcgaggcacaccaacgctcccaactccaaagagtcgggggttgttagagagccctatcccagaaaacctgacacccatgtctttagtctggcggccacgctagtcgcttttaactggccgacaggtacccggtatttagccccggaattctaaggaaaaataggacagaatagcaagcgaaaggggtccaatggtactcactgcttggcaataggcgattgtcttgccgctcagcaataggtgatggtctcaccgcccacgcctctccctccacacctccctgcaagctgagggagccagctccagccttggccagcccagaaaggggctcccacagtgcagcggcgggctgaagagctcctcaagtgtggctagagtgggcgccaaggccgaggaggcaccgagagcgagtgagggctgcaagggctgccagcacgctgtcacctctcactacctgcttctcatgggataaacagtgaatagctgatagcttttctgtggtgcaaacccccacctacatgtaccccacatatgtgcgtgcctccactgtccttgcataccctcctgcactctttgcctccttctgacaatgtcccttccacttctatacttgcaccccccttttcatgtataacttatttcttgtttctccctaaaaacacactatttgcagatctaaaatattaccttaattcatagtcttcattaaaattagattctattgtaacttcagtacactgttcctgtttattataagattctgaatgcttggtgttggaaataagactgccctgaggaaggcaaatcatcaaatgcatctgcaaaacagttttagatttgggaacatcagagaactagcatcttagatgttcagaaccagtgagtattactcccttcatcctctattcccaatacggggccctacatggcctatggcataattctaattttactcaaatggcaaaggccttctttgatacactgagaacactgtggaatatttggtacttgttgaccaagactgggagatctgtccttctttctgtgcacaggagaaaacagtcatatttgagatcaaggaatttgtgcaattataaaccaacaaatgctcaacttcccataaaacaagatggagaactgggtgccctatttcattaaaaaaaaaaaaaaagcatatcctttgagaatatataagaatcctggatatctggccctgaaatctgagggactttcttcaccattttctcaccaaatctagtttaaagctttctctagtgcatttgaaaggagtgacaaaagtacatggtacaaagtggcttagagtgactgcaatgttgttttgcaacattttaggcaagattgggactgtaatattcattattgtttgatatagtttgactctgtgtccccacccaaatctcaccttgaattgtattcccataattcccacatgctgtgggagggaccaggtggaagatgattgaatcatgggggtggattctcccatactgttctcgtggtagtgaataagtctcatgagagctgatgattttatcaggggtttccactttcatgtcttgctcattctctctttgcctgctgccatccatgtaagatgtgacttgctcttccttgccttccaccatgattgtgaggcttcccgaaccacatggaactgtaaccaattaaacctctttcttttgtaaattacccagacttgggtatgtctttatcagcagtgtgaaaacaaactaatacactgtttgttcaaaaagagccatccattaaagatgtgtacagtgtgaaacttatcaaagagggaaaagaagactgcagtgtgactgggacaggatacgttatgctgcaatttaaaaaaatgaatcctcaaattccagagtcttgaaacaacaccactcatttgtcactcatagtacatgtccatcactggtcagcagggcattctgctgcatgtacacaaaggcccaagctgaccatcttacagctccttcatctggaaagcacatcttcctcctcagccctgccagcaggagaaatgaaggcctttcaactgcctcagcttcttctatctctccattcttcctgaaaacttactatccatgggtccaaaagatgatctttattcatattcctcattgggagaatggaaattgaagactgaccccctcctttctgctcatattttgttagcctgaagtagtctatggtcatgattaattggaagggaaccaggaaatgtgtgagaaaaatggaatggaatatttgggacaacagtattgtctttgcctcagcctgctcttttgatcactgaatgtctatttaccccccatattagtccatttttgcactgctagtaaagacatacccaagagtgggcaatttacaaaataaagaggtttaatggacttaacagttccacatggctggggaggtttcacaatcatggtggacggcaaggaggagcaagttacatcttacgtggatggtggcaggcagagagcttgtgcagggaaactccccttttaaaaaccatcagatctcatgagacttattcactatcaagagatcagcatgggaaaggcctgcccccatgattcaattacctcccaccgggtccctcccacaacaggtgggaatttgagatgagatttgggtggagacacagccaaaccatatcatttagtccctggcccctcccaaatctcatgtcctcacatttcaaaaccaatcatgccttcccaacagtcccttaaagtcttaacttatttaagcattaactcaaaagtccacagtccaaagtcttatctgagacaaggtaagatccttttgcttatgagcctgtaaaatcaaaagcaagttagttactccctagaaacaatgggggtacaggcattgagtaatttcagccattccaaatgggagaaattggccagaacaaagtggctacaggcctcatgcaagtccaaaacccaaaatgatctcctttgactccatgtctcacatccaggtcacactgatgcaagaggtggcttttcatggtctttggcagctctgcccctgtggcttggcagggtacagcctctctcctggctgctttcacaggctggtgttgagtgtctgtggcttttctgggcccatggtgcacgctgtcagtggatctaccattcattctggggtctggaggatggtggccctcttctcacagctccactaggcggtgccccagtggggactctgtttgggcgctctgaccccacatttcccttctgtactgccctagcagaagttctctttgagagccccgcccctgcagcaaacttctgcctgggcatccaggcatttccatacatcttctgaaatctaggtggaggttcccaaaccccatttcttgacttctgtgtatttgcaggctcaacaccatgtggaaactgccaaggcttggggcttgcaccctctgaagccacaggcaagttctaccttggcccctttcagccatggctggagcagctgcaatgtagggcaccaagtccctaggctgcacacagcacaaggaccgtgggcccagcccatgaaaccattttttcctcctaggcctccaggcctgtgatgggaggggctgcccagaagacctctgatatgccctggagacgttttccctattgtcttggggattaacatttggctccttgttacttaagcagatttctgcagctggctttaacttctcctcagaaaattggattttcttttctattgtattgtcaggctgcacattttccaaacttttatgttctccttcccttataaaactgaatgcttttaacagcacccaagttacctcttgaatgctttgctgcttagaaatttcttccaccagacatcctaaatcatctctctcaagttcaaagttctacaaatctctagggccggggcaaaatgccaccagtctctttgctaaaacataacaagagttacctttgctccagttcccaacaagttcctcatctccttctgagaccacctcagcctggactttgttgtcctattgctatcaacattttgggcaaagccattcaacaagtctctaggaagttccaaactttcccacattttcctgtcttcttctgagcccttcaaattgttccaacctctacctgttacccagttccaaattcgcttccatatttttgggtatattttcagcaacactccactctggtaccaattttctacattagtccgtcttcatgctgctgataaagatttacccaagactgggcaatttacaaagatagaggtttaattggatttacagttccatgcagctgaggaggcctcacaatcatgggggaaagcaaagagaagcaagtcacatcttatgtggatggcagcaggcaaagagagagagagcttgtgcagagaaactcccctttttaaaaccatcagatctcgtgagacttattcactatcacgtgatcagcatggaaaagacctgctcccaagattcagttaccttccactgggtctctcctacaacctgtgggaatttgagatgagatttgggtggggacacagccaaaccatgtcacttccttattctcaatttccatagacaaccaaaaagttcaatttgatcaatgcatctggcacccattccaggatcactgagtgctatacaatagtcactatatcagattaggacctggctcttcttggtctgcagatctaagagctaagaagacaagttttctgctgcccatataactagtacccagtggaagaacaagaacagattaacatcaataaacacattctggaaatccaagaatggaagttatgagccttcactcttctgctttattggcctcttctcactagaaagaaggagctcttcttccactttctggcttttttctgctgtctgaaagggatctcatagttctaattataatctatcccactgcataattagtgtaaatgatgttaaagtgtctggtggggaggagagaggcgagtatctttgaaaggggcaaagacatttcccaaggaggaagaggtcatggtgggaacccaggtactgctttggcaaagttttatgcggagggagaggaaccccacagggttggcttagtttgtatctcaggacacccaggggaactgccattccacctgtttttcctttttcaaggctcagtctttcctttcttcttccctgcctcccttacataattctggagcacacgctgtgtgcagacagcccttggaagtggcctgtggatttttcagggaatacgtgatagttcttaccctgttggcaccaacagtctactgggagaaataattataatattgtatgataattcttaaaatagaaatattatcaatgtaatctgggaggagagaaaaggaaatggccagccctagaacatcggtttcttcagtgaactctttattaatttctgtggtattgtgctctcctgaatccttatctcaagaaattatctgactctttgttttttgaatgtgctttctctgtctcatatctttgtagttctttttaatatccagaggaatttatcatgggtctgtttttgtcctctagggttcttcaaatcttataaactgatgcagtatgggaatttatggaaaaatatataagtagctcatagattctagcagcagtgaaaaacaagacttggaaaatggcttagcagaagagaagttcctactccagtaagattctgggtagggcattaccgtgggaaccttgacactagagtggtggttgctgggacatctctcaactctttctgctttgagtctccaattcaacacaccaagtcctgagtggaagcatctaattgacctcaccttgatgtgtgtttacatcctggtcactagagggtagggggagggaataactgacttctttgctcccatagtgaggggtggggccctgctcccaccaagatccacacagtaaaggttcttccaaaataggagagtgtttggatattgaatatatagacaagcaacttctccctgtgtcattgcctgcctccattttatcagaaaattctgattcatcccggttctataacaacagctctgaccatctactcctgtttttccaaatgcattcggggcatcctcttgggtgctccatggcatctaaactcacataggataatgaccaggcacatcattcttcttccccttctcagactgtttctttgagaatcacctgagaaatgagttaaaaatgcagatttcctagacttcctctccctcctctgcaatgctgatttttgagcttctggaggaaagccgaggaatctgccattttcagcaggtagcccgggagattttcagactaataatggctatgctctttgggaaacagggttttcacctattacaaatttttgccaatgttttctctgctgtatctctcaagtcttcccactctattccctaaaacagtatgtcttctctattgcaaagactactttcacgccatctttattattggctttatactgtatatgtcccaccatcaccagtacagaacttctcataggcctctctacctattctgtggcgatagcatcagggagagccagggaaactaccttctactttctgcatcccttggaatttgtctggatttccagaaattgagttttgtgtggctgtttcggttgatacagtatgagataactggaggccgggcttggtggctcatgcctgtaatcccagcactttgggaggctgaggcgggaggatcacttgagcctaggagttcaagaccagcctgagaaacatggtgagaccccatctctataaaaaataagaaaattacccgggtgcaatggtgcatgcctgtggtccaagctactggggagactgaagtgggaagatcacttgagtccaggaggttgaggctgcagtgagccatgttcatgccactgcactccagcctgggtgacagagtgagaacctgtctcaagaaaaaaaaaaaaaaagataactagaaaggcacaggtactgaccatttagaatggatactgaatagaagcaataggtgactgatgcaaaagtggcctgaatcctcatcatagtaaacagtaactctttgactagacttctgtttctgcaacccaacaggttttcactaaggcagatttgcacaagtcatgccataagtcaaattatttgtccatgtgacctggccctgctcaagggatgttctgtatgacctgcggtgaatattcactctctcgtttgggcacagtatgggcacattatgatccagcccttatgatctcctttggatctttcttttcaggcatgatggtttaaaggattgttttgtaccatggaactatccatagaaaattattttcagggttcttctattgttcactagcctggcttaaaagtatagctttactttctgtctttacagtaagcgagaggttagaaggatatgcttgaataaggagactgccttcctctacactgccagtattttattaagagtattagaacattttctttgtcttgtattttatatattgatatgattttatgtcttctctcaccttgaaactttcattgtagattttaatttaaaaggtgaagaggtaggcctcaatttccttgattcttcgaactctgagttggaagatgatggtagtaaatcattggaggcttagaggtgagagagtaccatttgttctgggaggattctacgtcgtaaatttgtacttagatgtacaagaatgttaaacaccaaagaaagaagcctacatgatctctattctcgaccttgagcaaggattagcattgtcctgggcagcctgtaggaacacacagtatcactgctcccttgcgtttgtacactaaagctttgctcttcctggtcagtcagagcagtacaaccaacagctgaataatatgggaacttatcctgagagcttccaatctatttaacaacatacatattaatctaggttcacatattcatattatgtgagaaatactatctttccttttttttttttttttttttttcgagacggagtttcactcctgttgcccagggtggagtgcaatggtacgatctcagctcactgcaacctctgcctcctgggttcaggtgatcctcctgactcagcctcctatgtagctgggattacaggcatgcaccaccacacccggctaattttgtacttttagtagagacagggtttctccatgttggtcgggctggtctcgaactcccgacctcaggtgatccatctgccttggcctcccaaagtgctgaggttacaggctactatctttctttatgttctccaagtcagtctaattttgactttgtaggctatatctctccaggctggcaagaaattgggcatgtcatgctgagtgtttctttgggtcctgggccttatacagaagagactgcctgcttgtctgttatttgtccttatagatcgtcagagacatctgctctccttgtctacacattctctttaggtctgagatctctctgcttaggaaaacaagatattctgggccgggcacgatggctaacgcctgtaatcccagcactttgggaggccgaagcaggcggatcatgaggtcaggagatcgagaccatcctggctaacacggtgaaaccctgtctctactaaaaatacaaaagaaaaattagccgggcgtggtggcccgtgcctgtagtcccagttgcttgggaggctgaggcaggagaattgcttgaacccaggaggcggagcttgcagtgagccgagattgtgccactgcactccagccagggtgacagagcgagactccatccccccctcaaaaaaaaaaagaaaaagaaaaagatatctgtaaactgtaatctgtaaactggttcagtggttctatctctgtagaagcagcacagtcctcttctctgaggtcttgcttctcctcactgacactccccacctcctcagcccagggacagatctttcttttatgaagctccttcctgctgtctgctttcccactccattctacaatttccctcaaaccttgttcttacactgaatcattaacgacaaaaatttagtttctctttccttgagaacacaaggacaaaggctcagaaattgaggggtctatttgcatcttatccttctagtgtagcaaagaaaaaaagaaggctgaaactagaagtctcatatcctaacaaccaggcatttgttgagttcctactatgtataacactcaatacgcattccttcttgtgaattggtgctgatggtagctcaggcactctgttaagcattgaaggcatatggttgtccttgcctacatcaggtggggttcagggtgcagtcaaaaaaatcaattcttgcaaatttaagcaaaaggggctgggtgcatcaaagaagtccccactctccctccaccgccaaaaaaacaaaacaaaaaacaaaaaaaaccatgatgtggagttagccagatgaatgagagaaaacacttaagaaatatgtagaggccaggtactggaaatgaagaaaggcaaataacaatgaataatctaggctctgccctcaaagggctttacagcttggtgaggaaatggacctttatactcataatacaaggcaatgaatgaaaggaggcaaagctagtcacggttcggcttggaaattgcagcatcagggcttttagaagaaaagttggtcttgagcagcatataacctttaaatactaacacagtggtggagctgatgttcaaattgtctggacagatcaaatctgtctggacaagggagaagagagtaggctgccttgcgtaaacagtagaacattctaaatggagaagccattttaaaattctcttccttgaaaccttgtctggtcagtggcaaaatgtcatagctgagtttggaagattacataccatttgcattgattaaattatttttgttaatcagggcagttaatattaacagtgtaatgctacatgctggatggatgtgttgttatgtactattgctacttataaaatagcaacacctgatcaatttggaagaataacttatattaaggtgttcatctgtattttagcatcattgctataaacaaatcagaaagaatggaagctcttatttctttgtggacaactcaatcctctcaccccacacgtcaacattttctttacctaacaagcagaaatttgaacccaagaccagggatggtgacagtggggtctttgctgtccctagagcagatttagaggagtgcactccctcaaatctttgaatcatggtgtggaggaaaaaggtaagggctttgaagaggctgatgggccaaacctggaggatagtttatctgcaatgagaaaaggggtaagttcatgacaccatttctttctctcgttttttgttgttagtttttatctcatgatcataaacttaaccctgcaatccagctagatgtggaagagaataaggaaaatatggaacccaaagaattatagcaagagcacaacgattataggatgctgagagcaaatagggtagaggggtgctctcctgagctacaaaaggaatggtctggtagctaaggtaaaacacaaagcaaatttattagatttgtccacagtcagcagtgatgatcttcttgctggtcttgccattcctagaacagaagcactccatggcttccacaatattcatgccatcttttaccctgccaaagaccacatccctgccatccagccactcagttttggcagtgcagatgaagaactgggaatcatttgtgttgtgtccagcatttgccatggacaagatgccaggacccataggcctcaggatgaggttctcatcatcagacttctccctgcagatggacttgccaccagtgcccttatggtgtgtgaattcaccaccctgacacataaaccctggaatcattctgtgaaagcaagaacccttataaccaaatcctttttctcaagttcttagaacaagactgttttctgaggtctttggaactttgtctgcaaacagctcagaggagatgctgcccaggggcttgctatggcgatgatgaagaacactgtgaggttgaacgtggctagtggcaaggggctctgggtagcatgggtggcatacgcaaatctcccctcatgactatttcatgtgtgtatgtatgtgcatgtgtgtttgtaatctgtgaatggtaaagatccatgccccatttacacattacttcttatttggttaatagaattctgtctgatgtgtgaatgcttggggtggggataggagatgaactctgagatccatgctcttgaggcttatcaagaaggattgctaggcctaagcttagaataatgaaatacaccacctatctgtgaatgaatgatgtgggctcagacagtaagcatctcagcagcagtctgcactaaagattcttatgccccaaacattactgagtttgagtttctcaacatgctggtgcatgagagctaaagatcacatttaatttgattcaggtgttattaccaataaaataatctataaaaaagttgcaagactgcttgcaagggtatgttaaaatgaagaagccaagtttttttttttttttttttttttttcgagatggagtcttgctttgtcacccaggctggagtgcagtggtgcaatctcggctcactgcaacctctgcctcctggattcaagtgattctcgtgcctcagcctccagagtagctgggattacaggcatgcgccaccatgcccagctaatttttgtgtttttaatagagacagggttttgccacattggccatgctggttttgaactcccgacctcaggtgatctgcccaccttggcctcccaaagtgctgggattgcaggcgtgagccaccgtgcctggccagaagccaagttctaattttgaattctgtaaatacttagagctttctgatgtggctatggaatagactggtgtccaatagaactttctgtgatgatggaaatgttttagatctgcactattcagcccagtagccactatatgtggctatttaaacttttaattaaaattaaatacaattttaattcccaagtcacactaaccacatttcatgtgcttggtagacacatatggtagtggcttccatattggataattctggaatcaaaagagtcttctgtatgggtgatctttatagctggtatttgggaaatagttttcaacttttctgctaactctgatagatttatcaaccagaagggtctgcttgaagcattgtgtgggaaggacttgcaatcatatttagatacactgagagagaatgttgtggtagatggtaatctgagtgtgagaatgaggtacagtgctatggtttaattatttaccttttctcattttcaacttttcctcacatcagagagaccgtgtgtgttgagcaaacctttcaaaacctcgcttcccgtgtgatcctgcttcccatccgtttggttcagctgtctcgagacatctgtttctactcttcgttaagggtggggacagtgacagtgagtgcgcccccgtccctatccccacaaatcatatacagttacacacagagtgtactatagttgatcagcaaacttgcctgtgctgttctctcttgcagacttatatgtcggatcctcagagaagactcaggcaaatggaaactgggcaggcaagccttgattacaaggaggagtaaatggtgaaggaaagaaccgctttttctgtcctcattcccctataaaatttacatttttcccccactaagaacaacagtaacatctctgctaatattatgctaccatgaactaacatcttcctttctttccctattttgaacccttgggtgatttgtctggccatcacacatcgtgatttttgaaagaattaagtacattgacctctcgctgttagcatttctgtagtttgctcaaggagtttatttggggaaggggagaggaaaggttcataggaataatttctttttattttactcccttattgtgtatgagtcaattttttccccaatagctatgaccttcttacaataagggaccatcctgcaagtaaggatgtaaagtatgagtctatttttgccccagtagctatgaccttcttacagtggtgtctagaagagaggttgacaaaagccaacatgcaatataggatttattgaactgaggtgcctgggatttaatggaaagccttgtattttaggactatgtcaaggatacactatctgattttctcaacttccatggctaaatgaagattatcagagacaggaacccaattcaggctggactgccaacagctacccgagtcgctgttaagccctggtaccctaataatgccactggtatcaatcccccattttttcagtactttatcattaggatactgttcatagggtttgcagatggtgggcccactgaactgagctgaaaatatagatgtctacctggccaacaagtagtggaaatagacacactacttgtatgtatgtggaatatacaaatcatagtttagtaaggtttgactgccacctggtgggggaaattctgcagtatgttcatttcaatgtcaaaggcataaataagactcaagtcattagtcacctaactgtaggcttggatgcctaagatattccaaaatagttcagttgccttaaaggaattaaagacttataattgtggttgtgttagggcatgtgcctgctatctgcaaatatgattgctcattaatcaagtaaaactcaggcaccagattcattgtcttcgagggttctttccagctctgaggttgtgtcagtcttcacctagactttgagaataaacttgaggccagaattattaagattcttattgccagctggagctaacatacatcctaccaattccaagccgggtgtgaaatctcctagaaaccacccactcttagatctcatggaacaaattagaacaggaaggaatcctcatctctctttatcagaaaatagccctgtaagcaaggagcatgtaaagaagtagaatggaaaagcaggcaagttaagttttaacaatgctaagcacctgatagattttccttaagttgattcttttttttttttttttttaccaatgtctgaaaaaaaaaaaaaaactacacaaaacaaggaaaatgatctactttctttgggttgtggaacaatctagggtataaggaagacatctttatcttgtagaatgaccagtataacaatatgttgtatcagatttatacccttcccagatttccttgctcccttttcctgggccactggctgctggctccatgaagagtcccatcacttctgtcccctcatggaacatcactgtccaccttgtcttcctccaatgatgaaggcccagtttaatgggcctagtcaggtcaggtgtgggcaccaacgccgctgcagcttccactgtgccaggttcagtgagagccatgctggagcctaccttcccctgggagaggccaagggagatgtcactgaagtgcctggactcagcttcctcactggctgcctggaagaaccagtgacaaccctagtgaaagtgcagtggtaggcgctgggtcataggcagagggatttgcttgtgcaaaggacttgggagagcaaagagagttcagagaactgcccattgtcggcgtggctggagtgtgatgagcagatgggagaggaaggcagacagatgacacaaggctttgcaggatgaccttgaaccttagcccatgtcattggtaagctatgtaagcaaaagagtattgcaagcaggtttgtggtttaagatctggctgcatggtagggacatgattagagggagacagagcttgagaaagggagataaggagatggttgggggaatggagactggagatgatgggggcactacgtggtggcaattgacttgtagtcaggtgaccaaaagtcctgttctggctctgtcactaactttggttgaattatttaagtcttctgctgttccatgttctcatctatgagtcagagttaaaactacctcagctgggttcagtggctcacatctgtatcccagcactttgggaggccgaggcatgcaaatcacctgggctcaggagtttgagaccagcctggccgacatggtgaaaccctgtctctactaaaatacaaaaattagccaggcgtggtggcacgcacctgtaatcccagctacttgggaggctgaggcaggagaatcacttgaaccctggaggcagaggttgcaatgagctgaaatcacaccattgtactccatcctgggccaaaagagcgaaactccatctcaaaaaagcaaaacaaaagaaaacaaaaactacctcattcctagtcttgaaaattaaataatttgaatgcacttactaataggtgcttcataaatacgatttgggtgtgaaaggtgtgaggatggagtggcctcccctgagttagcacagctgtcaggccagctgagcacagccaccaccaagacctcactaaagtaggccctaggttttctcaagataacaagtgatttacttggatgtaaggagcgttatctgtaaatactgtctccacaggattaagggggcagaacgattgccggtgatagaaatgtcaacagcaaaaggccagtaggacactagaaacagcagtgtcaggatgtgccagctggcatttgctgcacgctgtgctatgagtgtgtgagcacacagataaacattgtaattaaccatcctggggtgatagtatgttcatacagtcaaaacaggtgatagattcgaaatgcaatttgaacttaatcatttgggtggggtgatttcagagtcaagtaatttagcaaaccatttttaaagggtgctaattaaaaattgcctggggttatcaatttgctgccagaactgcagaaaaatgggcatggaaaaatttcagtccagctaattattggctaaagcataagacttgattaccatgtcaggggaattttttaaatggggatattttcattcaaagcttttaattttttaatttaggggaagaattattgagacaatagaattagatatattgagagactatactcccggggtgagaaagacacagtatcttatttgctttattttgttcatcattaattatatctagtgtcattaaggcaaataaatttttgtgtactggattgaggaaccttggagtcctagtttgcagacgcttaattgtctgagataccactgaaccctaaaacacaagtgcacagttatggtgtttatttcagtcagcagagtctcagagtttgatgagagcatttagtgtgctgtgagggtggctgatgcaattcttcttggtgcttttccactttcctatagatattttaaaagttaggtgtccaggaaatctcaataagaatcagactgtgaagtttaaaggggacagacagcatgatggtcttattctgtgctcaactcccagtgcctggcatatgggaaattctcagcaggcgtttgctgaatgaaggaatgcacctgccctgttgctctagagccttgggaaacatctgtgaaaacaacaaaagtcgctgccctcatggagattacattctagcaaggggaagagaggtaatataataagtaaattatgtgggatgctaggtgacgaattctttggaaaaaataaaattaacactaagtaaggggcattgaaagtgccagggatacggtggggtggagttgggttagtgggcctatttctttattcaatacgaagctccaaggaggccttgttgagaaagtgaggtttgaaaaatgatatgaaaatggcaagggctctggctagacagacatatggggaggtgcattctaggcagagggaacagctagtgccaaggctgcaagggttgtgtctgaggagtaaggaggcctgtgaagcttgagcagagtgagcagagggagagcaaaaaataagattagagaagtaatgaggggagtcagtcaggctatctaggacatttcagtccattgtaaagactttgcctttcttcctaatcctaagcaggattttaagtagagaaatggcatgaccggctgtggccactgtgctaacagtcaggaaggagctcagggtagaagcaggaaccattgggaggctactgcagtcattcacaagagagaccacatggcctgaaccagagtgatcatgacagagacagcaagaaggagtcaaaatccattttgaaagcagaactagcaagtgcaagagaaagaggaaatcagaatgactccatggctttgggcttgaaaacgagaaggatgggattaccagcaattgagatggggaggtaggagatgacacaggcttttaggagaagagtactggtttagtcttcgacatgctgagtgcgaaaagtccatcagatatcagagtggagatgacaagtagaagattcagtatgtgactttccatgcatacgttgttggagaccgtatgtactaggtgtgaccactaagagtgagacacaatgaaaaataaaagaacgaggccttacctaggagccgtcctacattaaaaagctggaggaaaagatgaggaaccagtgaagggtacagaagactgaccagtgagatagatgtaacaccaggagagtggagagtttagtgtcctgggagtcaagggtagaatgtgataattgtattaaatattgatgagctatgtcaagtccattgaggactgaggcttgaccactgactttagcaatatggatgtcaccagcgcccagttgttttggtggaatggggaggacaacgcatccttggagtgggtttaagagagaaacaggaggggaattggaactagagtgcacttagacaacatttaaaagtatactgcgaaggagaataaagaaatgagttggtggctgataaaggaagcagggccaataaaacaatttaagatagtactttttatgccaattggaatgatccaggggaaaggaggacaaaacccatgatgtaggaaagagaggggcagattgcaggatgaccctgaagggaccagaaaggagaactgtgcacaagtggatggccagctttgatgggaacggtggatggttcactatggtaacagaaggaaaggcggcaggggcagatgctggtgggtggagaatgggatggagtctgagttcttttttgattgctacaattttctcagagaagttggaagctaggtcaccaaatggaagtgaggagttggggaagacgtactgaaagtctgaggaagaggagcagccatgaaagagaaacaaagaaaatgggagaatgaatggattggggacatgcagtagaattgccaggcatcattgaagacccacttaaaaaaggtgtatctggatgtgtgcatgcaattttaagtgaggtcagtcgtcacagttgtcatgttttgtttttgtatttttttttttttttgagacagagtttcgctctttttgcccaggctggaatgcagtgccgtgatctcagctcactgcaaactctgcctcctgggttcaagtgattctcctgtctcagcctcccgagtagctcggattacagggatgtgccaccacgcccggctaattttgtatttttagttgagacgaggtttctccatgttggtcaggctggtctccaactcccgacctcagatgatccacccgcctcggcctcccaaagtgctgggattacaggtgtgagccaccgcgcccgggcccttgtttttttttccttattccccccagcaattttcaggtgcaggagagggagagggtgggattgtgattgggtttcgcctggtgagcctgagtccacgggataagcaatagcatgattctaactgaaatggagtttgcacagatgcttaatgattgtctgttgaatgaataaatgatttaaggaaaagctgaaactttataaaaaagaaaaaacatgtgcatgggaataataagtgccatctcaatgtctgagaaattgcagaatgagtcagacgatgagggtcttcgtgctggctgctgttctgtgtgccctgtcagcctctgcctattcctctgtcctccttccgtggcctgtctacacgtttctattcatgaggaccttggagaattagattgtgtctgcctctatgggccttgttgagcctctctgtttctgtgaatgtcttcataatgtttgaataataatttactgagaaggtttatttttttcttacatatattttaaatattttaaatcatatacaccagtttttaaaaattctgatttataaacatacatgtaacctatttttacaaaatatagaaaaatgtagatagatttataatgaaaaagtttacctacaatatcatcattcaaagtcaaccatgttaaaaattaaatatattctcttccagtattggctattatttacataaatgtaatcaaaattacatatgcactgtatcctttatgctcttagtattagtctattataaatttctcacaaacattctttttactggatacataaaatcccatcttccacttctatagtaacttcggtgttaataatttaaggtaggccaggcacggtggctcacgcctgtaatctcagcacttttggaggccaaggtgggtagatcacctgaggtcaggaattcaagaccagcctggccaacatggtgaaacctcatctctaataaaaatacaaaaagttagccaggcatggtggcaagtacctcaggaggctgaggcaggagaattgcttgaacttgggaggtagaggttgcagtaagctgagatcgcgccactgaactccagcctgggaaacaacagcaaaacttcctctcaaaacaaagcaaaacaataatttaaggtaattctgtcattccgagtggtttagagaagggaagcaaactttccactctcttcttctttccctatctcctgtgcccacagtgaatgctccactttagcactatctgcagtcttccccatctgtgttcccatgtacttctgcctctttttcttcctcttcccatgtctctttgactcctggctcctttctctcatttgtctcctattcatttaccataatgtaagttctgtgagggcatccttataccctaatgtctgtcttacagtaggtactaaaatttgcatgtaaggacaatgatatgtcaacctggaatatcccatttaactggactgtggtttattgaaagttaacttctaatgaaatggccagggttagtttcctgccggggactgtggaactccatctacccagggaaactcatttttatctacattcttgcatccatagtcttacagagagcaaactcttcagtcataaatcttctacttagaaacctgaccagtagatgcagtattggtaaattttcaatgaggccataagaatgcatttacaaaaagtacaaagttaaggttgcttgtgatgattttagctaatcagcacaattttagcaggaagcagatacatctgtcctttccctcaaacttcatatagctataaaatattcaatttcctgaaggagttactcaacacacaaacttggagattaatttagaggccagatccccacaagcatttgtctagccttagactgaacaacttctgttgccgggagcttgccatgtctagtgggaatgggtctgttctgtagttgttggatggaaaaattgttagcagagtcttttttatgttaagatgaaaagtgcctcccacagagtcaacaaaaaggttctggtgtgtggaattttttaaggatgctaaagtatgaataattggaaactttagtaatttgaggcttctgtgatttctctaattctttgtagtcaatccatttatccgatcccctttaatgctaacattatttacttgattttagttctgtgaagctttggctcttataaatgacacatctaaccaagggaatggttaagccttagagcaacttgtggaaagttttcattcctcaaaacaggaatgaataacaatggcctcgatatgactaacattattaatgtatttatatgggtacataattactagcaatatctagagcattatgaaaatgatttgcatagccacttcttaaaatttagggcagggaggccgaggcgggcggatcacaaggtcaggagatcaagaccatcctggctaacacggtgaaaccccatctctactaaaaatacaaaaagttagccaggcatggtggcacgtgcctgtagtcccagctacttgggaggctgaggcaggagaatcacttgaacccggggggcggaggttgcagtgagccaagatcatgccactgcactccagcctgggcaacagagcaagactccgtctcaaaaaaagaaaaaaaaaatctctatcctatatctctcaagccttgaaaataatatattggcttcttcatgatttaatccagggcttcctcatgaaacttattgctcaatgccactggaatgcaaatattccaactgaccatgctgctcagttccttgcaatagaattgaataaaaacttggattaaaaggtcaactttaaaatatgcctaataaattcactgactaaaagctatcccaacaactttctgcatcatttctcttcatctcattattcatgtaggcttccctgaattttaaggaatgcaaataaaagagcagaatgtgtggagcactggggcctaggacattcttttcatgaatatggaactaaaggtagagtgaaaggtatttcttaaataaattacgttgatatggtggagagagtattgatggatgcttatgtattttctatagcacaaaaaagtaaaactcatatattattctaagaatcccttattttatgtccttcatatatttggtcccatagctataatattgggagcctcattacttcaaaatgattatttttaaaatttcctaacctatgatactaaaattattggggttattcagcaagttgtcgtgggacaaagcatgggaatttctataagggagaggtgagcagaatgtcataatattacataaaaagctttctcatgcattctacaaatagttgctgagtaaccacgtgttaataaaaaaagtgatataaaggtaacacttttggaaggaatgagatcatgtccttttcagggacctggatggagctggaagccatcatcctcagcaaactaacataggaatagaaaaccaaacactgcatgttctctctcataagtgggagttaacagtgagaacacatggacacagggaggggaacatcacacaccagggcctgctgggggttggtgggcaatgggagggagaccattagggcaattacctaatgcatacagggcttaaagcctagatgacaggttgatgggtgcagcaaaccaccatggcacatgtatacctatgtaacaaacctgcacgttctgcacgtgtatcccaaaacttaaaaaaaaaagaataactataaaataagaattctaactcaaaaacaaacaaaaaagaattattatgaaataaagaagaattctaactcaaaaacaaaacaaaagataactttttcgggaggctgaggcaggcagatcgcttgaacttaggagttcaggaccagcctgggcaacatggagagaccccatctctacaaaaaaaaaaaaaaaaaaaattagccaggcatggaggctcatgcctgtagtcccagctacttgggagactgaggcatgagaatcatttgaacccaggagatggatgttgcagtgagctgagatcgcaccaccgcactccagcctgggtgacagtgagaccactgtataaaaaaaaaaaaaaagagcccataatcccagcactttgggaggctgaggcaggcggatcacctgaggtcagcagttcgagatcagcctggccaacatggtgaaaccctgtctctactaaggatacaaaaattagctgggtgtgctgccaggtgcctgtaatcccagctactcgggaggctgaggcaggagaatctcttgaaccctggaggtggaggctgcagtgagctgagatcgcaccactgcactgcagcctgggggacaagagcatctgagactttgtctcaaaaaaaaaaaaaaaaaaaagaaagaaaagaaaaagagaaagaaaaaaaacattagctgggcatggtgccaggtgcctgtaatcccagctactcggaaggctgaggcaggagaatcgcttgaatctgggaggcacaggttgcgttgagccgagatcccgccactgcactccagcctgggcaacaagagtgagactctgtctcaaaacaaaacaaaacaaaacaaaaaagcactgaatccaaatcacaaataatgagatttagcatagggaattcagttgcagacagcatagcgtttattttttatggttttagactcctcaggctaatttcatatgcatgttaaaggtttaatttgtagaataagtaaatttaaacacaagtaaaatattagaattgaatgccaaggtctcatagtatttgaaaatcacatgtactcttgtctggaatccacctcaactcttgacagccatggtcatgtcttgaacttccaaatcgagaaaccactccagctacaagatttctaactgaaaattttctcttaaccttttacttcttctatttttcctgttaaatgaggtcaattaaacatgctcttcacttgctgggcgtggtggcacatggctgtaatcctagttacttgggagactgaggcaagagcatcccttgagtccaggagtttgaatccaattggggcaacacaggaagaacccgtatattaaaaaaataaaaaaataaatgtcttcatatttactttgactttgactcttttagcttacactaatattctaagcctatgatgattacttgtctcatggctttcatgttcccatgaacatgctagccattttgagcaactgaaaattgcttggccttttgattttcctttgttactagctgaatgttttgccctggccttggccttggaacatcactttcttcttcagatatgtgaacaaggacggatacaaccagatctaaccagactaggtttaggatatgtatctttcagattgaggaacccactcaagggcaacattaacatacagaggcttcttgacttatgatgtggttacatcccaataaacccatcataagttgaaaatatcataaggcaaaaatgcgcttagtacagctaacctaccaaacatcatagcttagcctagcctaccttgaacatgctcagaacacttacattatcctacagttgggcaaaatcatctaaccccaaacctatcataataaagttattttaaagaattttacatcaaaagtcaaaattcgaagtaaggtttctactgaattctagcttttacactactgtaaagttggaaaatcctaagtcacaccattgtgagtcagggactgtctgtatctactttaaatcttggttagttagggaacaaggaaagaaaagaacaatagttgtcagggactagagaagcggtacagtatgttccctcagcacggatacaagcagggacttcggttactgcactagtggtgctgcacaaatattactgctcacttgctacagacaaggccctactctaggaataggacatacagcagatgacagtcaaggacctcaaggggttcatattctagtagaaggttcatactgtttaatggttaacaaaattatgccattcagataaaactgctcaattcttgcataattttattctcatcatttcccatgtttattgttcaaaaatacaatgggctattaaatattcactattctttaggttttaaaaatataagggttatggtatgatttgccatcctacatttatcagttcctttgactattagttaaaaacacttttctacctctggactctgtatacatctcagatttcttggttctcgggcaccagctatgggtccattgtgagaaatttcctacttttcaactgtgagcgctctcggggccttgcttacatttttcaagttatctgcagggatggaattagtttttatttgttgtgtacaaagtccttgctttcggtggtagaatgaaatacttagagaacagtccatggatctatttacttcccatgacctgtgaagaggagtgatgttgccaggacctctttcctgggttgtacccagagctgttttctgcacgctctgagcctccagggatgccatcccaatggaggctaattgatcaaggctgcctggagaattgttttgagatagattctgaggcttaggctggggatcatcagaaaagaaaattatgattgataagtgaaatctgctgtgggcaaggaagggtaaacttgtactttacatgccaggaattttcgaatctgtatgtgactcccaagaaaggcttgaccttgtagcttcgattttaatctccgcaggtataaggataattcattttatgttgaatagactgctctaaagacaatttaaataatctaatacccctgcccatttcctaagagagttgtgttgactgttttattcccaaataggatcaaattcaacctgctgtcattggtagatcattcttcttaacacacatgtaagaataaaaactattattagtttggtgataaaggcagtgaaacaaacaccgagaataggagtagaaaaatgttctgtgtgaccttggttaaattatgaggcaaataagttgaaatatctccagatacattctcgctcaaatatgccagttttcaataatttattgaaatcatataaattctgaaacagatttttaaaatactttaataatgggatatcttaattatttgatgggaagtattttttaaaattacactcctattgtcctaaatttatgaaaaaaaatgaatgttcaatgcagaacacttgcataaatacacacactttttaaaaaaggtacctttatgcattttgctctgcccttaggcactctttttccaatctagaatatatttctggatgtttttcaattgacaataaaattactggagtacacgcatgttttattgtgtttgtgtgtgtctatggactggatcacaaggtataccagatgtatttctagtgggccatggtaaatatagtctgaaagtcaccattctgaccatacccctctcaaaatcacagagccttggagaagagaagaacagtttcttgctgcgtactgacttggcacataccatcagtcgcaatcaggccagatctatgtgctgctttattttcacagttcaagtaaagctgtggaaaaagtctgagcagcagtagtaggcaaggtctgtgccacacacggaagcagaacgcaaaatgcattccacacacatagaagtgtgacacaaaagtttgagcatttacctgtatgaatgccccagtctgtgtccaccgcttctttgctctgagtgatgctcacccatgcccccctagtcccaattccttgaaccacacatataacttattacatgtcatggtcatgtgtgactccaaccaggttgcaatagctgcagtgattttcagattttccctgctttctaaagagaagtgagatcatagcatgttttcactaatcagtgatttaggtagacagatgacatttgggggtgacaataactagatttataaatgctacaaatccgacccatagaaataagaaagtgactggagtcagaaggtcaaggagcacctgtcactttcccagcagggcccaacctgcagtctcttttatggctacaagctggaggtcaggatctgaactgaacaggagtaagagaagagggacttcccaggggggctcagatagttcactgggtgtacctgagatctcactatctgcagacttgtattgttataaaaataagtgaatacttaactgccacggtgggatagcacataaagagaaaaacatacttaggtagttttaaggaatgggaaggggtgaaatatagtcatcccctgatatctgcaaggactggttccaggacaacttctccaacccccaacctgcagataccaaaatctgtggatggtatacttaagtccctgatataaaatgatgtggtatttgcatataacctatgtacatcctcccgtatatgttacatcatctttagattacttaaaatccccaatacaatataaatgctaagtaaacagttgttgtactgtatcgtttaggaaataatgacaagaaaaatgtctgtctgtgttcagtacagatgcaaccattcttttctttacaaatattttcaatccatgattgattgactgaatgtatggatgtggaacccactgatacagagggctgactgtaataaaaccagcacctagcgctgtatgaaaggttagcactccccttgacaagaatggaagaggccctcgggcctgacaacacacatatggttaaaactagcacctaactcctcagtagcctggcaggaactgggaatggtggcctatgttttaagagaaccccttctgtgggcccccaatggctacagcctgatactcaggtgatggtgtgagataagcctcagtgcttttttttatcccctgtcccccaatatttactaagcttcaggaaactatattcttttttgataagtatccatttattaacactggtaacattttcagggcacacagaacatgcattctttggtagcaaaattttaaaatcacagatatatttcttttatatattatgaatatatttctagtaaggaatatataactagtcttcagaaactgaagatggaaacatagctaagcctcaacttccggtcaagcagaaagtaatgaaaagtgccgaaaatgccacagtcacatgggccactgctccttaaatgccacaatcacgcgggccactgctcctttcattctctacagacaacctgagtctcacactgtcatagcaccaagaagaaaacagttactttcacttttcttatagcaacatagggatttgtgtacataaaacatgttggacaggttctccttcaatcatggtttgtatgtcaacagttggtttcataaaacagagaaaggtggaaagaagatagaagatggtctctttacaaaagaaaggtgaatacatttcgatgcaccaggttgtttaggctaagtcagtaactgtgtgtattatcagccctatgactgctaagtgtcaatatttagaatttcagtgtgggaaagaacctcagacaccatcagtccaaccgcttccattttacagctaaggaaaagggtccggaaacttaggtgaatatcagactgggatgagaacgcaggctttggagttaggctccttagtatatgaagttcatgtatccccatagacaaactcattttctggtaatatgaatacacttctggatgaaccaacagtttttcagtctaaggtatgtcagaaacgaattcaatttttatgcttaagtttcctctgcacagctttctccatttaggttgtgatgatgatgcagactgttaccccctctagacttttgcattcttacttttgaatttgggggttaatgtgtgagtagggctccacgaatcatcatttatctttcacatcatttctctttccacctattgctaactacctatttttaaatttaacaattaggtcaatgattcttgatttatttaagacaataccaaagacagtaataaggtcagagtgacctggtgcacttctaacaccccaatctgaaaggaattttttttcagtataagataatatatatcatatacagaaaactaatactaaaaggtactcagaggtagcccttgttgttagacatttaaggatgttctagactccaagaggaacctcaacagttttctctgattcaaattaaaaacaattttctaggataaatggaatgattaataatgtaagaagaataatcagtactgaattgtatagtggaatgattcccattaggttccaaccgaatataatagagcttatttgctttcttagcatgtatctttcccactactataaaattgagatctgtcatttataatgttacctgtattatctaaacactaacatctttaaacccagtgggcttcccctagagaggtttagattcttgcaaacccaggtgaatcgttcttgttgagcaatgaactgttgagaaatgagataaggcagaggcacacttatggatgccagtcaacaggttagcttttgatggccatggtccagaggagtgggtggtcagtttccacagtcacaacaccagacccgtcgtaggtattggaagtactgaccaatgttccaaaagcaagcacatcatttgctgtaagaaaataagggaaaaaaattagtaactattttttttcttcctccagtgtagattaactttgtcacttaccaaaaagcaagtacacactttgataaaaatatatataaatgtgggataggtgaaatatatgatgtatggctttaaaatgggtaagttctataacttgctgtaaacattcttcctggaattggttattgaccattttgggttatatatcattctcaatattaaattttattagaatcttttctttttctttactaattataaaaccaaaacctgtatttgtaatgtgctacttacttccttccctgggtacaattttagtttctcttgataattcagaattaaaatttaatatgttattacactctacagaatgtagttttagcttcaagtagaaatgatatgagacagatagaaaattacctaaaaaaatgcatgtgattttggttactgttttctcataaagtaagaaaagccaaagtgaatacagcttacattctgtaaaattaatagaaactcaaaggtcaaagccgactttcaaatgtgtaatcttgagcaagtcacttaagctcagccataaagtgaaggcaagagatgataagataatcctttaaactacttatcaaagtaaaaggcttatgaattaagattagaattcatatatttatacatttcataaatatatagctataaatatattttttattttctaacaagttaatgcctaagcacagattggtaacgtcaacctctctttgctgatacaggagcaattcacttcatcaacatgactctaaactcacagctgtcctataagcatcccttggtaaccaatattattttctttaccaaaattcagagagaaaaatgaacaaatgttatggagcccaaactatcagagtcagaagaggccccttttccttcaaacaacacctatgaagttatacacactgctttgggggaaatcaatcaattacaatgctcacttcccactagagggagcctcctatctttctgaggaaatcttgaaaaggcaatttaaaaattcaggaacagtactgcaagataatctattgtcagtattaccagttcacacagcttatttattaaaactcaaattatttttcatagttctttatgtttttactagtgcaaacacaaaagtaaaactacacagtaatacagagtgaatctcatgtgaatattgccctgatacgaacttcaatataggaagctcttaactcttgagtcatttgggacttgggacttctgtgagatgatgtttctgaacactggtgatatacacaaaaatatgtatcgatctagacactgttacatagttggtagatcagggtggtgatctttgagggattcacagcaaagtcaattgaaatctctacctctcctgaatagtggtcttgcctggaacctgggtgcttaccaagtagcttactgagacctatcccaggcctacggtttcaaggttttcccaatagccaagagggaggcaatcagggagcacttcacaccacttcattgcgaaggcaatttagagtgcttcagcaggcctgccaactttaaagtggaaactccctcgtgaagacccatgcatgcacaaccgacttggatttgacacacacattatatgattcgagaaaatggattaaaatcctagtttttacttaggcccaaagaacaggagtacaaaattgtgcttcaagtttatagctgcatataaattcctttctgatttttgaagccagactatggatttcagaatttcaggggtaaatacctggattatacatactgggtttggaagacactgttgtagcctaattaattttcaaatgggaaaataatcaaagtggtttatttgggcataagaagatgaaatttttttttggaaggaaatatttctttgagttaagcaaggccactgttagccatacttgtaaattatgtttttattttattttataatatttaaagttccaacaagaccagttatatagttacaattaattaaagataacaattggttttgattatctctaactttatggaaagtacaataaaaatgatagaaaactaagatgaataagttgagagacaaagtcatgaattttaatttactatgtcattacaattattttggaatatattttcttcaagtcacagaatcatatttttggacaaaaccttagaaaaataaaaaaattttaaggaaaatatttggaattatgatgaacttcctctaccccaaatatctgaaggccaatcatgacataagtacatgaaactagtaaagagacagctgtgtacagatagtagaaaaacaaattacctcttcgtttctaccctagaggatttgtccaacactttagctggctgaattatagaaaatctgacttggatttttccccccattgtttgcagagtagactacagccaaccgtagttgctcaaagacaaccagtcatcagatcaagacccgtttttaacaaaaggcaaaaataaaagttacagatctatgtgcaagcttataagcaacgatattttgtgtgataaacacattaacatagattttacaattttcatccattatctcaggctgttttatttcccaaaggtaaggacgagaattagcactccgtgttctattgttttcagtgatgtcctcccagcttttctctaaagctggaaaaacaggggactacaaagcaagagctggcaaatcggtggaaaccaattattcaactcttttcagttagtggggccatttgtccctggtttcttgcccatctttcctccacaagctacattagtgaactgtggctccttggttggagctggaagcatgaaggagtactctgcaaggccttggatgcttttggcactgaaaagcaacagtgggaggcattcattctctgtgtacctgcatgacttttctgatcaggtgcttttatagaaaaggcatctctctatcaaagagcatgactccatcatgatgaagttaataagttagatctaggttcaaaccctggctctaccattcaccagctttacaaactcagttatttaaactctttggccttgtgtcatcaacagtaaatatgtagaaagtatctacttcacagggaagttgtatggattatgtggccaatcttacatatgatacatattcaagtaatttccatcttctttgctttctcctgttatcctgctgataaaacagatcaggtttttcttttaaaattaacaaaaagagagatgtcatgagctgaacaattagcaaaggcctgaattcaagtgattagtttatagccagctgagaagtagaatgaggtacactcgtaacttttccaggctagcttttgtgaaatacttaacatcatttcaggtgattccttggcctgcatgtatgtatgcatttatttaatagatattaaagcctcattctgtgccaggcactagggtttaaggatgagtatctctgccctcactaaaatgaggactcacattttagtaaaagggaaagatatacaatcaaacccagcagacaggagagaagcatgaggtgggccaaggagggcagaggtgccttcctggcagccaagatgggttgtgtattcaagagggaggtgaagcctttgacagtggggggctactggcatccctagaggcctgcccgctggcctggcttcccaagaatctgtagatcgacgctggttcttttgtaaaaataaatacattatttaaaaaggcaatggaaacatttctaaaatcaataaatcctgagggcaaaatggaggtgctatttgagatgggcataatccttattcattcaagacgtgatctgagtccttacagtacaccagccactcaaggcatagccaggttttatcttccatttagagatgaggaaaatgaagctcagagaggctaaaatcacaggctatgatgataataaaagttgtcagacactaacaagttagtaagggaggttaaggcgatgctttgaagagctctaaagaagagaactgttgctggtctgttctcctgaagtacagagctgtcttttggcagcctgatggagacttaaggagatgcattagtgagagcctaaaaatcactctaagacttaatgaatactttacatctcatatagacaaatgcttaatgaacccattatgatgaatcttaaggctccctaccattctggaacattaggttaagttcggagagttaagttagacatattagacatcactaactatttaaaacataatgggaccactgtctacactcaccatttactctctgaggattcttagcctatgtggagaaatggcaacacattaagaaaatatgactcagatttcattaccaggaaaagaaaactatactgtctgtaacatcagttcactattataggtctttacaattttaatttttgacaaatatattttttaaaaaaaggtcttttatgtacacacatgaggcaaaagattatattttaaaaattgccaatttatactgtaaaatatgaattctgggaagggttattagtgaatttgtttcttataaaatggcatttatacttatggttgctcttgaaaattttcaaaaataaaatcaatatgttgtgttttcactttcttgaagtaaaaaactcaaagtagtcctaatgtaaagctgtggagtacatgtcttttgtgtacttatatttctattagaatcttagaaaatacaagtttgagaccatctataaaataaatatatttatttatctcagcactgccaaataaaaataagtgatcacaaatctaaattttctaatagccaccttaaaaaagtaaaaataggaaaaatgttaatatcttttttatttagcccaatatatccaaaatcattttaacataatcaatatataaaatttggggtcttttacattcctttttcatactaagtctctgaaatccatttacagcatgtcttaacttggacaaggctcattttaagtattcagtggccatacgtagctagtggttactatatagattgaacagtgcagttctaggttgttgaagcaggaactatatttatgattcaattatctgcttttttcagaagaacattattttttggtttgattatatagatagtaattttcatttcatatgtagctatgcggtcacagagtccgaggttataaagagaacattaaattcaaagtgtgcatatacaatcattttgagtgatttgaacttacgatgtgagtggatcaacaaacacttaaatacttaacatgtgttcagcagcaagacagactcagtcctctgcccttcaacttgaaggctgagaactatctagcaggaactgtagaaaggacaaccaaaaatccaaaatccaagcaaacctaatgtgaaattaccaagagaatatatactacattctataaggtatagaataaataaatgcctgcttggacatgtggcaaataatcttccttttttttgaaggggggagggagttatttatttttattttattttatttattcatttatttccataggtttttggggaacaggtggtgtttggttacatgagtaagttctttagtagtgatctgtgagattttggtgtacccaacacccaaacagtgtacactgtacccaatttgaagtcttttatccctcactcacctcccaccctttcccccaagaccctcaagtccccaaagtccactgtatcattcttatgcatttgtatcctcatagtgtggctcccacttataagtgagaacatatgatgttcggttttccatttctgagttacttcacttagaataatgatctccaattccactattgggtatctactcagaggaaaagaagtcattatacaaaaaagatacttacaatcttctaattgtacctgcaaataatcttctaatttttcttctaataattgcaaataatcttctaattgtactcttttctcccaattattaccttctcttcccactcctctaacacttgtgaaagaataactggaggaccctaattgcctataatgaaatgttcaaaacaaacacattccctcttcccggcccaaacatcctggcatggcacttaaggccctttgttatctggctacttcctacctgcttgccagccactctctgctacttgctgttccttgaatagatcaggaatttcctgcttctacgaaaatttttgacgtgttccctccgagaacaaattgacttttctctgcatattttatccttcaagtctaaactcaatgtcacttgctaccctgtaccgctctttgattctccaactgctacaggacaaattaaaaattctcttttctatttacaaaggacttgattgcttccctggaacacactttgtatttaaagctgactgtttagatgcctcgtctcaagcaggcaaagtacagagtgagcttgaaacatcttgctccagaaagcaagagggtgctcaaaaacagatgtagacctgtgaaaaggacacaacgactggaactaatttggggcattagaaaagaatcctgagagagagaggcattataatatattgaataatgaattgccaaaagcaggtggagagaagaaaacctattatttacagaagaatgccaactactaaaggaaggaatggcagaattagagaattagaaaggcaccatttgcagccaccagtgtaataactagtttaggcaagaaccatcaatggatggatgcttaaactactggataaaatgtggagaagaaggatagcacccagttccaaagcagtactccacgtattgcttttaacttcaaaggaaaaaaaggtagcagagtgatctcatgagtccgatcttagctaaatgatcaaccttagcatcaccaataaaaggccatactgatatcatgtgcctcctgctatgatgctagggatgaatacaatatcacccattaatacttttggccaaaaatgcctgacctgaattgaatcatggggaaaccgtagacaaatgcagaatgggggcagatgacaggttagtgggcctgaactcttaaaagctgtcagtgtcatgaaagaccaaaaaagtgaagggacttttctagattaaaacagactaggctgggcgcggtggctcacgcctgtaatcccagcactttgggaggccgaggcgggcggatcacgaggtcaggagatcgagaccatcctggctaacacggtgaaaccccgtctctactaaaaatacaaaaaattagccgggcgtggtagcgggcgcctgtagtcccagctactcgggaggctgaggcaggagaatggcgtgaacccgggaggcggagcttgcagtgagccgagatcgcgccactgcactccagcctgggcgacagagcgagactccgtctcaaaaaaaaaaaaaaaaaaaaaaacagactaaacagatatgacaactaaatacaatgcatgtttttttagtagactccagattttagaaagttataaagagcactactgggacacttggggagtaagcatatggactgtacactattattccatcaatgttacattttgggggtagatattagcactgtagttatgcaagagaatgacctcgttcctaggagatacaagctgaggaatttcaggtgtttattattatcatgccttcaacttattttcaaatagttcagaatgtaatgcacatacactcatactcacatattatattgtttggagatttgtccctgcccaaatctcatgttgaattgtaatctctgatgctggaggaagggcctggtgggaggtgtttgggttatgagggtggatccctcgtggcttggtgctgtctttgagatagtgagttctctcaagatctggtcatttaaaagtgcatggcaccttccccacaatctctctcttgctcctgatttccctgtggtgagtgcctgcttctgccttgccttctgccatgggtaaaagcttcccgaggccttcccagaagcagatgctgacatgatgcttcctgtaccgcctgcagaaccataagcccaattcaacctcttttctttgtaaattacccagcctcagcaatgcaagaatggcctagtacacatacaaagaaataaatgcaaatgtagaaaaaaaatgttagcacttggtgaatctcagtgaaaggtatacagattttgctgtactgtcccttcagtttttttgtaggtttgaagttattcaacattaaaattccacaatacaatttggggaaaaaatttgggaagaaaggctagcaacttaggaagggaagtgtttccctcttggttcacctttggtttccctgaaagctgaagtaatgccattgcaaagcattaagaaatgtttattgatttaacgtgcatcaaaataaatccaagttgaaaaaaagtgtgccaaatttaggaagaaattatctagtctatgatatatctgcattgcagcttcttggaaaagtatagagagagatgctgagcacacagactgtgtgtggtgaggccccttcctttgtcaactcattgaagctcaccaaggacagcctttacttccactcattgatgcaggaggccctggaaattaacttgcagtgtctaccagaacttcttagtgcttgtgaaaatggtaagagcaagacttattgttatgcatgtctctgataacaagccatcagctgtgctttctttttgagccttatctctcaaaaccctgatctactaagactcttcccaaggtgaacactcatcacctccctctcctgacaactaatccttccttgaactcaaatgtccaaggaagggctattataattctatttgaaactggctgcatttatcttcttctctctcagaagtcacatttcccttgcccttggatgaggactggaatgcattagaaggcttctgatgttcaattattcttccttctccacattttctgtgttatgactcggcctgttgatcgaaaaacaattaggccaggaaaatgctgctgcttggaggaatcaaaactaattatgccagttagaaaatgtttacaaagatcatcagtttcaaacatttagccctttctaaaataaacaaaatcgttatttttatttgttaaagagaattccctaatgtattatgtcatcagcatgttctactcataaaaggccccatgttccagttaaagagccaatcagagctgctttaagaaaaaagaaaagcttactgggcttataaaataagaaccacagtccaaatccacaaaatgtgacctttttgcattaattattagtggtaaagtgaatgaactgtgtagaactctgtgaaaattttcagtgtggaaaatcagtatcagatttaaacgtttgttcaaagagaaaggctgtccacaggctgttctgaactgatttattttgctctgttgccttcaaatcctgtgtcttggtgttgcctcctgtggacactggcctgccccaaaaccatcccacaggggtgagaattatgacctgcagatgccaaagatgactgagtcgcagccatcctaatctcttgctgcccggctgtagagcaaggcaagtcattttgtactgctgggcctcagtgccatccctgaaaacagagagttgatcttttcactgtaatattttatgacttttgttaaaagtccctcaggtgacctcagcatccatttgtaaaatgccaataatacttgtccccagttacctctaatactgctatcgtgaagatgaatgagttaatgtctgtgaagagctttgacttctccagaaaagtgttgaaaatgtgttgtattattatcatcatttcatctgcactgaggaagctttaaagtggcatttgcttctatccttcaaatgtcaacagagattattacaggtacatcaaacaaacagaaatgtcatagaaaagtgaaaaaagagaggaacatgtgcagtagcatggtatgattacttaacatcaatctcaaacctgcaggtggtatttatacaaataagctaaagagacataatccaggcccttttagaatttaccagtcaagagggtctctgtgaatctgctgtgattctgggggctgccggatttgcaaatcgttcactgctcaattgaactcttttaaatttaattcggctgaagtttttcttttatcagatggtgtcagaagtgggatccaaaatggagcttctagcatcccccagcagtgctgagtgaatatgcaaggtacctgcaggacccacttgtgtccactcatctcttagagctgctggggatcatgggtaagctccttcttggatttcggagctccgctgatctctcacagccactggggatcatgggtaagctccctcttggatttccgagctccactgatctctcacagccactggggatcatggttaagctccctcttggatttcccagctccacagatttgtgttttgagctctctgagtttctttgagcaaatttctgatccaaactgggtttggagttgtgacagaaactggactgggtacaggaatggatttgatctgggaattaactggcttggatccagttagaagcctcttacatctgactgggtcagaaaggaactggtagtaagcagtaatattgcaggagttataaaatttggcttttgaaaaatcagatttttgtgttatacccctttgtttcatttttcttacacttgggtaggaaaaaaaaatcactggctaagttaatcaagagaagctgagcgtaaggccaatattttaggtaaaaatgggatccttagtttctggaaaactgagttctttctggcttacacttcaggcctgggaggcagcgaagtcttacagaaacagcaaaatgttactaaagataacacagtggaatgttccgaatgaacaacaatgcatttgaagtacatttttaaaatgagggctctaagtaaagtcccttttgtctaagaatgggtttggcactacagcatgtcaactgctattctctttggaataatctgccttgcactctttgctgacaactgtgggtgacaggattaggcatgtacaggatcgtgggacatggggagctttttcctccctaaaaggggaaacttgagagatgatgggcctgctggaaaagatcccttcgctacctagaagcagccgcctgaacttttttttcagtgtcgctgcaatgggtgggtctttctctggcctcccagatcatttcaccttccccaccctgcctcaggcaatgcttttctctttctcctttctctttcttatcttttctattactcagggcaaccatcttgcccagagaccacaggttgaaactcctggttggaggttggattaatgatgatggagcccaaccaggtgcaaatttgagccttgccagtttgatactgggtgctaatcagagcagctaatgtctatgtttttgtcacatgtattttactctggccagaacagaaaaagataattttcttttctgatgtggctttgccccagcgcgatggtgtggcaagctcagtcatggaggccgctcaggcaaagagaacccagaagcctggcatgccggcaaaagggtaagaatttcttaccagtcagacttctggcttctctctttctgtgcaaatggttgactgaatggtaaaaatcactgtttatctccatcttgttttatgtccttgggagcttgaccttgttaccacgtggcagtactttctcttggtctcctccttccagggaacaggaattttagggtttatgtcataattagctctaaaaattatcttgagtagttaaaagcctgtgtaagctcacaattaactattctagatgctttctgggaagaacagtgaagactgccctatgctgtagctcagttgctaaggctttgccctttcttactggtggtctggtttcgattccctgcttgtgaaataaaagccttttcatttaatttctgcatgaccttgtctagtctcttctccttcatgtactatcttaaattttcctttcgctgagcacctgggaggttacctttggtaaagttcaaaagccggaaatatcggagtgaaggttaggtactattagaagtcaattttccatttatttgtgcttgggaagatctagtcaaattaaccagatgactgaatccttgaatttacagaaagcccttgaagttctgaaagatttgccatgtaaatccctctaagattctggctcaatcttgatcaattcagccagaccaactggtccactcaggccacctcttgctggtgaaattcccgctcctctcacaaaggcatcttccctgctgcctgtgtccctacgcggtgccctgctttcctctttggctccactgcccactcgagattccctgttacagtgagtacctgccactctagctcctccagatctcctgccaccctcctgcaccagcccctccccgacccctgctttaccctacgagggccaccggcatgacttgacctctgctcctttaataatagatggttctttcttatatctcagcctgaaactgtgacagtcccgaaaatgaaatctcagtggtcatggtggcttttcattgtcttgtggaaaaatatttacaacacagaaataggggatgagtgtttaccatcaagcagaatccattcaatcatatggctgtttttagaatagaatttcatttagtgagagtctgaccgctgccttttggggaaaacatcatttgatttaagttcagatggtctaatattaacagatatgatttgttatagcaaaggtaatgaagcaatgtcttagactttgtccataaacctataaatatacaagcttgctcctaatatatttcatcatgacctattttcatttttaatttccccttgctgatatacaataacattatttcaatttaggaatagctgtcatcttcttatatgaatattctaacaagtctgaaaatattagccattcttagaaacaagctactttaattcacaattaatatattctctttctcgttctcgttataataatcaattttttaatactcataccatggactttttcctgatgacaggctgaacttctctttttttgatgaaccttctttgcattaactatctgcatgcaaagttgcatattatcccagcctcaaatttataaccttctacttagcattttactatatcattgtggagtgctgacatgtgtaacactatcttacacattaaatgttcaagtatttttttctaccaattagattataagctccttgtgggcagaaatatgacttggtctaacttcctttattatagaatgtctaatctgcaagaaaccttatctattatttagttcagtggtttaatacagataaaagtgaggctgctcctactttaaccaatttaaagtgctaggctcaaagttctcttcacttgactttacctcataaccaaaccaagttggccttagggaactggctaggtcttcagtgcttcagagaatgtatttaaagagccactgatataatatccaaacactttatttcaagacagggaaacgaattaaagataccttattgacctaggatgcccagcactgaaattcaagtctgttgacttgtagctcagtgtattctctcttataacaaaatcaaactatgggccagccacagtgcctcctgtctataatcctagcactttggaggctgaggtgggaggatcacttgaggccgggagtttgaggccagcctggcaacatagtgagaccccatctctatatatataaaaaaataataaattttaaaaacccaaagtcaaattacgggctttaacaaattggttggctcctcagaagtatttttggattagctaagcaaagttaaatgattaaaactacatactgaatatctgaattgcttgaacatgtggctatgttacctattttttcctaaagcttagtgattcatgtagattgactaaagtcacaggcttcaagccggtggcaaaatggattcagaagtttctcatccttgatttttgtgtaagctacagaccacaggacacaatgtacttaactgaaacactctgtactgcattttcttatttagaaaatgcaccaattccatttataaaccactatctatagaagtgtttcttttgttgtgtcagccattatttaattaagtagtattaacagtctagacaaggaggaatgaggaaatggtcacacaggcttagctgctaagacatggttcaatatttggcttttagtaaaaacattttgctgtatctgtagtaaacacattagataaaaattaaaggtgaaatttcagttaatccactttcactgctgatatggcaagattattagaagaaaggctaactacagagcctttatttatgatttaggaaaatagacctatattgttagagaagaaaaaaattcacttgttataaatggctgtatttgcaactgaaagaatatcaatatatcagacatcaattacaccaaagataagatgattacaaaccttctatgtagaaaaaacattcattttgaagtatttggagacagggatggagagtggcaattttgtttttgtactaaaaaaatcattcctcaaaagctgagttatgaagtttgtacaaactaagattatattatatcaaagctgcaggttaggaagtcatatttacttggtatgtatagacaaatttacaactctaatcaatttggtagaaagtctactaaaattgaactaattttttaaaaagcctgtcaaatcacaactagtatgtatgtgtagaaatggcctgagatagcttttctgtattcttaattaagaaataaacaatcccatatattccttgcaagtatctagcctggaaggcatgaaagaaccctggctcctccctgttcctttgatgccatcagtggtatctagttgttgggggtttcggggcaacctctgattcagacccttgtggcaccttgttgatgaccaggatcttacctactcattgtggtccaatcaatattgggtggaaccctcttgatggctaccattttgacctctcacctttcttcttaatccatgacactctttgcaaaaagcaatctaggaaagcagatatcctcccccttattcttcctaaaacatcagcgccatcggagaaatgtgatgaataattaccaatatgcctttttagtgttgtgcctgctgagtgttggtgaacctcttcctccagagatgatggacatagttgtgatgtctcactgttctatactttgcttggaggtaactacagactggcctctacttgggcacttgaggccatctgatgtgtctggagtaacagctgcctctgatcttaggcttggggcagcttcacttatgagtactggctgtgagcctctgaggcttcattctgttagtgctggggtatctcattttccactcattgatggagtggcagtgatgtgtgtctcctcttctctgagtcaaagaggcatctcctacaggacatgctgcaggcctgtggattggtgctgaggtgttgtaggtatttttgttctaagcattaacaggactgacactatctattttggcccttattccatagaggtcttttccttccaaagaaatccaaaggcatacacaacctatcccatatttcatttccctgttgagggatgaagaaatcatctcagcagattgtttctttccttctcatctaagagatatgtttatatgtgtacatggcaacagggatgaggaacctccagattcttggcatgatttcaggcatctggacacagccctgcctctggtatagggcctgctgtactttcttccttgtatcctcccaggcacttcactggagagtgactgatctcttcttgagtcaagatttaaatatacttcaacatactaatgacttttatttactagatttgccatttaagcagtctttatcttctgctgttgccctagtatttataatatctgaatcaaagaggaatagattcttgaaaaactgtgccacacactctagcctgggtgacagaatgagactccatctcaaacaaaacaaaacaaacaaaaaactgtgctacaaattcagactgcttttttaaacagtagtcttatatgggtcttttaatgtgcaatgcaagaatagtgctgtgttttagcatgagatgacgttgcttatataaatgattttatatctcacgaaaaaaatctataaaatcaaagtaaaaagttatctttactcttttaaaaaagaggctcatatattaaacatattgaaccttattagacagatatctaccaggcttagtgatgtaagctcatgactctcaaatgcaaaactttaaggcaccactgaattaatatactggcacattctgcaggcaaaagcattaaatttttaacagtacaattgactgtatgtggttcaaccttcaaacatgttgcttgtgaataattgcaaaagatacactctggtatgtgatatgtgttactcatttctaaaatgcaaagatagaaggatctactttctgttttgatttagccacaaatccagtgtacaaagaatttactcagcctggaaaatagttaagaggataataagaaaatagaaaagtaacagactaacttcaggcctaggttcctccagtatagctaatttatgacatttgaggcttaagagatgataataattaccatgagaaagaaaaatattacattttaaaatcctgtctcattttcaaagactacagaaaatttctacttggtgctttaattgccattttaggatgcttgaaatctctgtccctttctactccctggaaatgttttaacactttgtaaatacgatgaaaaaggccaagtttctataatctacaaagacattcaaatgctttattatgtacaagagtaattcttaagagtagggagttgtatatatagtttgaaaaaaaatcctaaaattataattgtgttactttctaagtacgaaatttattgtgaacattctgatattacgtgtgatcttacgtttagtaaaaaagaaaaaaaagattcatgggtttaataaaggtaagaaacattggaataagcaagcattcaataagaatgctaaaatgtgctaccccaatcattttggtactaattcattatggtaacagatttgccaagttccatagttcaagactttggcattataacaactaccagcagggctcctaggcagaattaagggttcagtgtgtgtgtgcaaaattagggccttggtgttattagtaaagaactgtattaaaaagaatgagggcaactgcaattctgttctaccaaataaaacattttgtttagagattaaaaaaacaaaaaacaatgaaggctatgttacagttatgcaaggggtgttctcaattagtagaaaacagtatgccaatttgagaaattccattaaaaacagagaattccataaaggtagcaccctagttattacattaaacaaaagtattaatattgagtattattgctacagtttgttcattactcagaatcatgtgagcccaggagagaccaggtttgctctgttctctattattcctgtatatttagcatactcaaagaaaatatcctaattatagattacaattactacatagcagacttactgtaaatatttattgaatgaataagtgtgtatccaaataaagatgtctgctctgcaaaccttcatccaggccctgggtctacatctcagataattcacccagacagccaagacataaaaaaacccaaactcctttggtatttattctccctaagctccctggtcaagggtctctaaatgacttcaaaggaggcccctttcctagaactcagcatttccttaactggtgattgctgattgaagcacaccactcccaggctttccagaattatttaatattgcttctagggcaccttatatgggtgtgttcagaagcactggggggaaaaggaacactgggttcaatggctagatccttgtttcccacttgttcccttttcataggtctccctgccctttgagatcatgagcaacttcagattacctctcacccttagaatacaatgcatccatggatggagctttggaaaatgctactgtgtttctgataaactaagtgcttgttaagctttcactttagcacaactttaatgtggaagtaatgactctttccagctgatatcaaggtatttcccacactttgggaaagatgcaaaaaccactttctatatggctcagtggttttattactgatggaagcatcccattaaattttcttatcaggctgtaaggaaaaaagaaattcattatgtgaagagagacaaggtaagggtttactatataatcaatcaatggtaatacacccttgtttctcttatcaggtaaattgcccctcaaatattttatagtaacgggaatttctccaatctcaacatagaatcctaaaaatatgcacactctgacataccattaatcctaacatttatcatcccttatggttaaacatttataaggttacattctccttaaactttcttaagcctgtaaacagctacaatgaacaacaggtaagtttattatggttttagacagctctgtggagtaattaatgaagcgtttaggtcgatgttttgcattactcaaactttccaattccaaatttgataaagaaattttcaacatgattgatgtaatggttacttctcaggtcaatgaaaatgaatgagcactgggttcaagtccaagcccaagcaagtcacttatttcttaagtctctatcttctagtccattggtctgagagatctggcctgaagttccactttcaagtatattggtccattctcacattgctataaagaactacctgagactgggtagtttataaagaaaagaggtttaattgactcaaagttctgcaggatatataggaaacatggctgggaggcctcaggaaatgtacaatcatggcagaagggcaaacgggaagcaagcacctttgtcacatggcagtaacagagagaacaaagggggaagtgctacacactttcaaacaaccagatcttgtgagaactctatgtggagaacactaagggggaagttcgcccccatgattcaatcacctcccaccaggcccctcccctgatacgtggggttacaaatttacaggagatttggatggggacacagagccaaaccatatcacatagcttgggtttaccttgaccaaggctcaaaacaaggtgatgcagtttcttaaatttttcctttactgcgcaggttaaaattacatgttaatttcttgaatggtattcccacaaattcccttacttccattccattactgattatttcctgagtctcatctgtctctcagattctatattcttttaactaaaggaacaagggtttctaaacagaaggtcatttcaagtttcaataataataataaaagtggtaggaaactttatctggacaattttatatgatcttgccaaatggacaatggcaagatcatataaaaaatagaattctgaccccaaaactgtagaaacgtgcccaggaaaccaatcccttatctacaacaactagcctgggaaatcagcccacgataagtcagacttgcagggattcagaacacagaaaaccaaacaataatttctgcaacaatttgccccaaatggccatgacttaactgaaagctgacaacttccctaatttttggctccactgctaactttagcaccaaccagagaaagccaaatatgctcctctaacctatcgcgtaggatgcttgcttccagtcagcctgcctgcagcttctttgggccaacagactccaattagggtacatcagaagccatccctttctccactacacagcattcccatttctttccctgcctttgaatctccgctgaaatgagttactctgcaagaaactgaataaatagccttgatttattctcttttggtttgtctttatttatcaccactgtgcgtataaaaaaggatacagagagtgcactcagcttcatctagatccacagttgggtcaatctttctgctttcctagttaattattaagttcttgctagctactatttaaaaacctacacactaaaacctcctacctttccaaatgcctaatgcctatctactttgagcatatgactttaccccatcttctcagggaaaacaagcccaataagaacttgctccacatcttctcagcattcacgccagtatctacagcctcatccagtcaattcctcccttcttgtggttgtaatagaaatgtagacatctcctctgtccagggttctggatctcacttcccttactgtctcacagctttgatctacagattatcatcactctctcctgttccttcaaacagttctcatcatcttatttatttctatgaacacttagatgtgttcaaggctgttccattttactctctctcccactccaagtccctttcagttatcaatctctctctcttccccacttcagagcccaaacactggaattacttatctacccttcaatttccattcatttcataacctgctgcagtgtaggttccacctctattactgcactaaaactactaagatcatcagtgacttcattttccctcagtgcaatgtgtattctcagtgcctacaactgtgactgatatggagtagagcctcacttctctggatttcctaattttaaaaatagttctgcattggcttatagctttacctgaattacgtcatctattacaacaacctgataaagtaggtattattaatgtgattcatatttggaaactggagctcacagaggttaaatctccccctgaaggacagacatctgttctgccacctaagattcatccttgcttcttccctctgaaataataatagtattagataggaaagtatcctgaaaaatccttagcagatttcctggtataagaaaaagagttcaatatatgttgagtattatcatttttctaccacctaaaccagtgcctggcacatgaaatatactccataaatactgactgattaaatgtgcccagagaggtcataacagtgatgcccaaataattatttttgctggtaactgtggcctagctggggctttaaagcaggtaggggcatttttcctagatctgaaggcctctagagggctttacctcgtcatactaactgtagggaagaataagaaaaaaatatttttacttcctctttctcaaaaatgttcactcatccatttctgaaaaggtaaaattatagacaatgttacttggtaatccctatcacctttttcagaaaaggatttgcctttatcttattatagcaaatattagtttgtaggtgtgaattgagagggagagcagttaagtcctttttcctattacgtacatgtataaatattgaaattcatgagatttaaatttgaaaatctgctgctttacaaaaatgaagtataattatagagttgaacagaacaaaaggggaagtaaaagcatagatgcactgatttactatcttgccttctctcccactggaatcaatttatgctggaaagaggagctaaagacagctggaggaacaataggttgttaacacaaattataaggaaaggaactccctttaatttttgggaactgagccaagggagaaaattgaagtgagatactgtatttatactacactataacagtactcatgtaattttctgagctcctcaaaaatctctactaaaataaaagcattagtatctatttctcattatgcctaaatattggtaaatgcataggaaaaaatccccagaaggtagctgccagtttgccaacatatcctattaaaaacttttttaccaactaggagacatctttccttagtgtaagaacagagatacaacaggatgcatggacactgcgttactttaatgatgttgcctttaagaaaagataattatgctggaatgcaagatgcaaaaagagactacataggaaacaaagagttcactaagtgcagactcagttgggtttctggcttgaaatgcaatacaagtaaaatatttggcaagaaacctgtaaactacataaaagaggcttaaaaatcaaatttggaagttaaagaaaaaaatcacccagataaactataaaatgcaggtaacatagatggatgtgatatatttctggttgtcacaatgaggtcatgaggatattctggcattctcatgaaggctagctcagagcactcccaaccaatgaggtcctctattaccaacaaagagcatgttaaaattccaaacaacagggttctacattttataacagatgaaatattgctattacatagtcagaactctgaggacgggctcaccattggaaaatagaaatggaagggtttccttagttcaagtgaatatgttaaaagatgggaaaaacaggaaagctaaagatctggaaggtcaaagtatcaaaatgtgccaaattcaataacaaaaaggggcttcaaagctatgctggaagcaaaggcgttgatttctgcctgaagaagatgctgtgacatcaactccaggacacttacttggcactcacattctccatcacagaaaatgatctcacgtgttgtacactggaagttgaactcaagatacgtgatatgatattaaagttctgtttactcggccaggcacggtggctcacatctgtaatcccagcactttgggaggctgaggcgggtggatcatgaggtcaggagttcaagaccatcctggccaagattatgaaaccccatctctactaaaaacacacaaaaaattagccgggcatggtggcaggtgcctgtaatcccagctactcgggaggctgaggcagagaattgcttgaacctgggaggcagaggttgcagtgagccaaggaggttgcagtgggccgagattgcaccactgcactccagcctgggtgacagagcaagactccatctcaaaaataaataaagttctgtttcctcaactcagattactgaaaataatttccagctattactctcgagtgatgatatgcctttcagagactattttgtatattaccaagaataacacggtgaagtatgggctaaatgattatacagacatatgaattttgagatatcaaatacctttcctaaagagtactcgttagtggctctttggaatggccttgaatggggcaagagtctgtccttagactacctcattcaactacctatcactgtctcggaagaacaccagtaaagttaatctgatcttcaatagaaaaacactggggagggtcgggggtagggagagcatcaagaaaaacagctaacgcatgctgggcttcctacctaggtgatgagttgataggtgcagcaaaccaccatggcacacatttacctatgtaacaagcctgcacatcctgtacatgtaccctggaacttaaaaaaaaaaaagtactaggagagagaaactaaacaaagaatcaagattcaagtattgtacactttaaaagaaataattttatggtttctgaattatgtcttaataaagctgttatatatttttaaaaagtaacaggagaatgtttaactggaaaatgtaaagcctcatatatttgagttaaaaaatgtactgagcagagaaagcttccctgttgataggctgaggcctgcagtagactgtgggctcaggagcaggtgacagtctgctggagtcttggcttcctcagcagcagcctccccctagaccctcagtacctgacatcatgtctgccacaaaggaatgcatagtaaatacctgctgaataattatgctccttaaaaacaaaacaacaaagaaaagccaagaacacaaacttaaacgttatgaaattaaaaataggagtttcttctctaagaaatctaacatatatagagaaaaaagactggactaaacaccaaaatactagcagtagttgtctttgggtcagaagattttgggcaaattatgatcatttaatttcatatttctgtctattttcctgtgtgttccaattttgtaggatagagaaaagtatatcctctgttacccctcatccctaccccaagtctgtttgaatgacaatgagtatgctgaaacattgagctgcttgaaaactatttttatatatgttactttgaattatttatatttgtatgtcttttctttccacttgaactgtagatactcagattgcagcagtgatatgttattatccttgtatatagtctgatgctaaggatggcagcaaattcaaccaccttctcttgcaaacgttattacaactgaaccgggaaaaagactagaattttatccacatggctgctctaatgtcatcctaatatgatataatttctctaagaaaaggcacttgactcaaactaaaacaaaagttaacactgtgactcaaagtttaggctagatgacaattctgaagatctttttatttcttggtggtgaagaaaaaaaaacactcagatattaccttttttttcagcgcatgggatcggcagtaatttatctgacattatcccaatactcctgatggaggactgtcatttcaagttctacttcgcaggaggattttatcgccctctcaatcaatgttaggagtcattagagcaataacagagaagaaaaatcaaggccacctatttaggcagggtgcttgccacaaggtagtgaaacacaaaccctaagatctttatgtctgtacaaacgtacaagggagttggccatttagctcccatagttgtggggagcactaggccagactgcctggatggggcaattccctggggcctcagaaattagtattggtaacagcttatatttctaccacttctcatgaaagaaacccagaaattagcaactacccttgaataccctgtagaagtttgcaggcttgtctagaaaggcattaaaaataatcacaaaataacacaaatccacaaccaagcaatcaaccctattcactttccaagccccatttcatctctctaatttttccattatttaagaccgcagccagaaaaacttcagtgggagaaggagaggtgaatccaatgcaacatgaaccaaatctctatcatcttcgtgtcaccaacagaaatgttttagctaaacaaatttgatcgtttgtgatatgtgcacaaattgatttagattatcttgacaagtccagttagtccatccaaccaaatcaactcagaaaaaggaatctaaggagtcaaaatagataattcaaatcaggttgcatgcacaggcacagccacaatgcatcttagcccaaatgacctgaatctcattactaataattcttaattattcagtactgaaaatacaaaatgtttagtcagaacatggtttgggatttaaaaacagagaaaaataagtgaataccaatttttggtatgtggagctgagctacagaaagctataacaaattaatttgaataattatcaataaatttaagaaagtaaatgtgccctaaaattctttcagataatttgtttatccaaatagtttaaatgacctattgtttatcctgctatacaaatcctttttctttagataatataagatttaatgaataaacacacattacaagttagtgacatttacataaagaatcattaatcataccaccttcaaatatatttgcataaatattagcagttaccaagtcctttatcatgtacggcctccatgacttagtctagatgagaataccaccttttgcaattatgggtaatacattctttttcaatctacttttgaatttgaggattggaaccaaagtttatcgtaagcaacggtgacttactcaagtttgtctatacatctgactgtcacatatgtaatcttcccaattttttttcttgcctctggctattctagtctttccctaaaacctactaaaagttactcattttaaagcaattgctatttactgtgtactactaactgctttctgtgaaaaatgtgtattcttggatgttgaaatacagggagaagagatgctccaccaatagctttgtaaacttttcccattaaagtagtattccacaacatgcattcaaatgtcaccacgaatactgatgatcctgtaaagtggcactgtctttcaagagacaagattgatgaggatagaaagaaccagataaagaagtctttgaattctagactattaagcagtagagagtcactgcataacatttttataaggagtggttggattaaacaatattttgggaatattcaacaaatatgatacagcatactagtaggaattgaaataaaatgctttttgcatcgagcattcaataggctgttgccctactaagatgataactactaatcctttgctagtgaaaacccagactttaaattttttttttgaaagcatttaactatttatgttggttgatgaagtcaactgctcaagtgagactgataccttggaaatgtctagctggtgttaatggttcagtttgggagctcttggttgggaaagcactgagctcagctcttgtgactaagatagcttgattcactcatgtctccaacaaatattttcaaatatctacagctatatgtgaaagctgacaaatttaagaaaagaataaaagtaatgtggtttccacaagttgatcactttttgagtataaaaattagggaatggagtgtagagggtaaaagctagaatatccattccttcggttgagatttctgatgcattattattgaagtttattgaagacctagagtttcaagaatttcacttaaataagaatatcaatttaactatattatccttctttcgtggaggctttcttaggtacaacgttaggtccaatttctcaggagttctctttgtgagcagcgtgtactcctctgtctcttgatgtggggccggccatatgactgatttgggtatatgaccaaagaggatagattgccaggtcagaagccaggcctttggggactttgtatgtttctgcttgctgtcttaagtgtttgccactgccttgagaagaagttagctccaagtccaaacagagacttaaagagcatggccagtcagacacccaaacatctattttaagaggcagagcaatgacgcaccaggtgctgtgtacagaagttcagctttagatgaaccaaatcttacctgcactgccctgcagtcaagtaaatgactgttatggaccacagagctttgaggaagtatgaaacacagtatctttgtagcaacagctaatggatacagtggcaaaacagggattagaactgaggcttggaggctcttatttgaatgtagattttatctatcacttttttttcctgttgcactaggcatgacaccgtcatatgtagaacttaatctgttctatttttgtgccctttccattgcctttttcagtaaccttttaactaccttgcctttccattttttgttttgttttgtttttcttctttgtttttttgagacagagttttggcctgttgcccaggctacagtccagtggcacagtctcggctcactgctgggctcaagtgatcctcccacctcagcctccggggtagctgggactataggtgtgcaccaccacacccagctaatttttgtagagatggagttttgccatgttgtccaggctggtcttgaactcctgagctcaagtgatccaactgtcttggcctcccaaagtgctgggattacaggcgtgagccactgtgcctggcctgttttgttaatatgtatgtatttccctgtgctttggaaccaatttttccactttactgacattttgttttctttccttggaaacttaagtctttcaaataatggccagtttctctaacatttctttccaccttaagatccttacagactttgaaaagaaaaaaaaaatacactcataataatcattcttattatcttattatcatttttaccttagtttaatcttatccaaactaggtcgtgacaatttagggaatacttccgaagacttgctctggtattttattttttaaagagaagtccatatattggaatgcatgaacaagaaatgcaaagttagaaacatatcccatgaagcactgtgaacactctgacagctgcaatttatcaacataaattactgtgcttagctgcaaagcttttgtcacagggagacagggcacttcctaaatggcttgctgccctctttaataataatcttagtttttacaatccagacaacctagggcaagagacagcctgatgcacatagaaacagaaaaattcaggtttttatgtacatcaccgggagcactgacatgctactctattcatttttagattagagtcttttcccccttctgtctacatgtggcaatagatgacttagaaaagaaaatgtgggcaggagagccaggataggaagcttagcagtaaacaagtcagcctgtctgctgtctcactttccttttaatcaaggaaaaggcctaacagaattcactgtcatcgtcttagtggtggcttctaacagcactggatagggagaatccttttatttccagcatcacatgaacaaattgatttttaaattcatgcatctaacatgtgttcctaaagccattaccatttagtaaacagcataactaaatgtctttaaactactttagacattttaagcactaatttttctcattttaaaaaagtttcaatctgtgtgttagagatattcgagatatgctactacataaagttttgtacctattcatgaaaatctaattttggggggatgtggttgaattctgtatctcaatattggacttttctaatacggtggatgagctgaaacctgttccctggtccccttaactccaaagcctctgctcactctactgtacatgctgcctttacagaaagcccctgtccgtaagctccattttaagaaaaggagttttaagactgctatccataatgccaaatttctaagctgctttcttctagtattggaaaaacagaaacgtctagtttagccattataatcaggaatcaataacatgcatatctgctaatttccctgcctttatggtctgtgctcctatccaaaaagggttgtaaaggcaagaacaaagttacctatagtctctctctctttttgagtactttcaaattcatcatttgtcaacagatgtactgcagtccctagcttcagtacaacaggacaccagtaaagtcacctgtggtacacagaataagagctgcccaaagatgtctaccttctaatccctggaacccgtgaatatatatgttacatggcacatggggaattaaggttgcagatgaaattaagtttcctaatcagctgaccttaaaatagggagagtatcctggactatccaggtgggcccaatgtaatcagaagggtccttaaaagtcaaagagggaggcagaagaggaagtgagagtgatgtaatatgacaaatacttggcccaacattgctggcttccaagatagaggagaagaaccaaaagccaagaaatgtgggtggcctagaggctggaaaacgctgggaaacagattgtcccctagagcctccagaaaggatcaaaggtctgctgacatcttgttttagcccagcaagacccatttcagacttctgaactacagaactgtaggaggagaaatttgtgttgttttaagccactaagtttgtggtaatttgttgtagcagccacaggaaacgaatacatcatttatttttaagacaggttaccaggaaggctatctacattacagataactgggagacaatttgacaaatatttgacaaattatcagaaatgtttttgttgtttaatggcaaaagtaaaagaataatatgcttttgttttcttttaatttatttttccttgctgaattgtgtcctttaatttataactacaattgctttggctgttatttggcactccaaatggatcagaagtaaattgagactgataaataatttttgtaattaaatacaatattatagcaaagaagaatttaaaatataaacagcatcttacttcaataaaaatgtgttataaaagaatagaaaatcacaagtaactaaataaaaaaataaataaatttgactttatcacaagtaaaaacttctgtgcatcaaaggacaatatcaaatatgtgaaaagacagtccacattaaaaaattttgaaatcatatgtctgataaaggtctagtatctagaacatacaaagaactcttggaagccaacaatacaaaaggcaaataacctacttttaaaaagggcaaagaatatgggtaggtatttttccaaaaaacctcaaaacaattgaccaataagcacgtgaaaagacgctcaacatcattaatcattagggaagtgcaaatcaaaaccactatgagatactaattcacactcattatgatggctatttaaaaaaaaggaaaatggtgaggatgtagagaaaatggaactataatacataactagtgggaatgtaaaatgacacagcccctgtggagaacaatttggcaattccttgaaaagttaaatatagaatttccatatgaccccgcaattccactcctaggtatacacctaagagcactgaaaacatgctcatgcaaaaacctgtacacaaatgttcctagcagaattattcgtaatagccaaagagtgaaaacaccaccaatgtccataaattgatacatgaatagacaaagtgtagtatgtctatacaatggaatattatacagccagaaaaaggaatgcataggtgaaccttgaaaattttatgctaagtggcaacagccagacacaaaaggccacatattccatttgtatgatatgttcagaatagtcaaatccatagagacagaaaaattatttcattgacacataaatgagggatatgaaatctattcacaataggaactcatggtaggtatcatttatatagctgagaaagctctcaggcaatcacacacaggaaaatgtgtcaaaaatatctgcagaaaatgttatgtgaatgtcttcatacatccattatatccttattcctccctctgttccaaatttgagctttactgaatagagtgtgagcacctgcaggcaggggctaaatcttatttatctttgcattctcagtgctgaacataataggcacacaataaatttgttctataatgggatgaagagatcaaagcaaagagtaatggccctcagtaatggctcctgacaataagaaagcccttgtagttaggaaatattcttaaatccctcaaatgcttatttaagatacagagagtgaagtattaccttatgtaggaatgttcagtgaccaaaatgggaaaattacaaatatctgttgctttaaattctttaatttttggcaaattgaatattatgcactttttgtatttttattataaataatttgtttcagtactatgacttatttcagtataaatgaaataagttgaggagggttatttaaaatggtaaacatttaaccatctaatggttaattaaaatgaggaattcaagtttgaacataaccattaaagtctttttttttttttttttttttgacagagtctcgctctgtcaccaggctggagtgcagtggtgcgatcttggctcactgcaacctctgcctcccaggttcaagtgattctcctgcctcagcctcctgagtagcttggatgacaggcaggtaccaccatgcctggccaagttttgtatttttagtagagacgggatttcagcatgttggtcaggctggtctcgaactcctgacctcgtgatctacctgcctcggcctcccaaagtgctgggattacaggcatgagccactgcgcctggccccattaaagtcttttaattcaatgaagggttcactcagccttatttgaaaacatatttgcttacagataattctattgtaatattttaatcctccaatatgtgcttataaggaaattacaaaataacaatacatcattttaattttatctttactaaaagtaatgtagagattaaggccttctgcttctctgtcaaaaaataaaaaagatcaaacaataccggctgtgataagcatacaacttgtgattatattgtgctaataggtccaaggatctatggagataaaatctgattaatatatttatcatctttttatgtttgttttataaaagaggattcatgtttctatttcataaagagacatttaacttcttcatcgggtcattctaaagttacctttaaaacctaagaagcaccttctacctcttaaccaaagaaaagtcaaatatacgcagaatacagagggatacagaaccagctaagtgtcgcaaagtcacaagccttctttcccccaggaaaataaagatcagaatgctatgctagagtacatgttcaggtttttgaaagggatgtaaggatatgcaggtaatgagcaaggcctcatttcttttctgcatatatattagcatggattttagcctatttatataaaaaagtcagaaatataaagcagaggagtttttactggaactatgatgactccatgtttcgtatttgattttctctgctgttcacatatgttttcttgattccttgagaattgtctttttaaaaaatttgtgagtgtatcatttacatgaactaaatgaccaacactacttgccctgcctaataaggagtaatctctgattcactcaggatacgtggaggccttaaagtttgggagtccttaattgcgtttatggctatatcttgctatttggcacctgagtgtgtttatcacactgtcttacgtatggtaggtgcttaaccaatcatgactagttttagatatgtttacttggtgtcccaaatagattctaagtaccttgagtgcagacattatgtattacatgtttttagagtatttcacaacctttagcttggtgctgagcacatgggaggtgccagttagccaaggtagtgtagacccttcttttcattcttgttatgagaagagtatagatgatattgggactccttaactccttacccatttaccaagacacatacacatgcgcacgtgtgcgtgtgcacacacaatctgtatttgatgaagcagatgcagattaatggagacacatttgatcacagggagttttatttttactctctgtgtcatcagcagtttttgcatattacctctagaaaatgttcagaaaagttgtactggtaaatagaattccaattctttgtgatggaaaaagtacttgagcaatagcgagcctatggagacagctaaatcagcagctggcagggccctctctccattctcccctctacggatcagcagtccttggtattcagaaagtagattgtaagcaaatatttttttctagtgaggccggaagatttactgtgtagtattttacagaaaatataaagtctttgataaaatgtaaaagtcagttgttgagataaaatatgactacaatgaagaccactataaatttgagtagatttttcaaagtagcattataattaagacctaatttctctctcctagcagtgtagaaggtggagaggaaagagtattatgtgacaggtaaggaaacggaggcagataaagtctacatgatttactattgattgggagccagaagccagaactcaggattcctggctaaatcaatcaaaaaattattaatgacttctactacttataagatattatactaaaactttctttttgagataactgtagaagagttaaaaagacaatatataaagatgtggtaagttaaattacaacagaagcattatagatttccaaagtaaatgatacctataccaaagggggaaaaaagaacagaaaaaagacacctcaggagattgttttgggctgtggtgttttgtagatagtaatttcccactctaagttttttctccttccatattgaacactgggactggaagataaaaccatattgattttctgtccttcaccatcttgcccaaacttctgttttttaatctttcttttagatattggaggaaaacgtttgttgtttctcatctagagttaatcccttttcttacgttccatggctcctcattgcccatttattctatgcccttactcctcagagtgcaatctgtgagccagcagcagcagcatccctggggagcttgttagaaaggcaggatctcagtcctcaccacagctctagagaggagaatctgcattttaacaagacacattccagtgggagacctgctgatctcggccattctttcaaaaatcagcccctccatttctagcaccattagtctctctttttccctcactatctccttttcccttcttgaacaatccaggggtctttattaagaaacaaaccaagaaacatccctccctactccccatctccaatgactgatatccctttcagctttcagagcacctcacttctgtttctgtggttaccacgttcctggaatgaattttatgcccctgctctctttatttttaattcagtcagtttcttcttaaaacttggaaactttcactctgaagcagtttgaacacataggccacatgaactcacacacgtgcacgtagaggcacacacatgggtgcacccacatgcacacacacacgtgcacgtagaggcacacacatgggtgcacccacatgcacacacacacgtgcacgtggaggcacacacatgggtgcacccacatgcacacacacacgtgcacgtggaggcacacacatgggtgcacccacatgcacacacacacgtgcacgtggaggcacacacatgggtgcacccacatgcacacacacacgtgcacgtggaggcacacacatgggtgcacccacatgcacacacacacgtgcacgtggaggcacacacatgggtgcacccacatgcacacacacacgtgcacgtggaggcacacacatgggtgcacccacatgcacacacacagatgcagatgattaactctgatgaggttagatcaacttttaaaatgaccatagttcctatactgatgggaacattaattatctgagccacatttggttcctgatgattttggtgtgcccactcctatcatgaatctattcaggatcatctacttgtctgtgatcctgcttaggtggctggactgacctacaccaggccaaatttactgaatgcccctgcggtacaactgtcccaatcttgaaagggaaatcttgtatctctgcataaatatcccagcagtatacacagatgcaggttcacgaaagtgaaacaaaatgagaccttgtacttaaggcctatctaagttaggttttcttcctgaatccttctgctgggtaaatcctagacgacagaggtccatctgtagtcttgtgttagacgtgaagaaaaggaggaggttgccaatagattccccaccatcaagtgtcataggaaaaagcttataccaatgaggaaccaaaaaataaaaacaatcttcttcttaattccaatgactttctgaagtcatttcatacaacaaggttggaaggttgagatgttttaaaatttactgggtaccatcacccactcaccttctacgggttttgagcaatctgctcactagtgattggatgttgtgttattcatcaggcctggctcttatgaagaaaaatgaagagcataaaagaaaagaaccaccacagtgaaaatggggctgtgctgaaaggttaatgtgctcttcagcctaggacttcagacagaacacggagcggccacacaatctgtttatctgatgcatgcagacagtactgtcatgcttcacctttggaaatgggccattacttctggtgacagattatgaattgtggaatatggctggcacgtggccagacaatggagagttcataaatcagactcaaaatggaaatacctgagtaaaattcttgagttatttgaggggttggaaaaggatatgtaatgagagaattcgttaaacccatgtgcgtggatgtgtaggtgggcacgctgtgtatgtgtatgtgtgtatggggcaggtgttgatttttaaaagtcctttgttaaggttctacaaagaagtattttttgttttgttattttctggttggctgaagaattttgcttcagcatggaatagagtggtagttggggatcagggtaaaggatggttgggataaagattttggtttttaacaggaaattggtttgagccttccaaaaaaaagagagaatcaatcaactctgaacaaaaggagtaaatagttggtctacagggattaatgtttctttattttacaaataatctgaaaaacaggcccatagatctggaaaacagccacaactgcgtagataatactacacaaattggtaaacggatgagagtaaattaaaatacaggtttataagcatgtgaaaatagccagaaaaatatcaactaaaataaagtgttgatgcataaatgcccttgaggaaaaataacctaaactccttgtaagaagacgggctctaaagttttgttttgtgatgaaggaatgaaacctaaaagtgatttttaaaactactatctgaaaatatgctccaatgtgtccccaaagaccagcacaggtaggtaatcctctagaaaggtactagtaacacacaaaaggtaggattccaatattggcaactcatgctaggttgattaagtgcttatgaccaaggagttgagagtggttgtttagttttcctcgtactcaacctcagacaacagccatcaggctgagggtaattcttcatcaggataggaccacaagagcttgttctttcttgagaagaaaaacaaggataggtaaatatatagatcattactataatgtcaccagcaaatttttaagtagttctatttgaaaaaaaaatcactatttaggcatttaaaaaatgtaatatataataccatgtacaaaaagtagagaaaacttttataagaataaaagctataatcaagacttttagtaccatctctaattatatacttagtaccacctctaatattatactttgtaccatctctaataatatatactctgtttatctaaaggctacctcatggatttttagagttctgataaatgtatcaattattttcagctacgaagtactatcctttttttttttttttttctgtttattacgaatatcaacgacttaagttctctggccaaattagtttctccagtgtggaactaacttctatagaaaccctctagtctttttgtacagttgtgacattgactaacatttttacatcagtggccagactaatcctcaggcctggagtcccacattttaggccaccagcaaactccctgtcaggtgctgcctttgcttgttgctggcaggagagtccagtgcaaccggtaggaaaagatccttcattagcaggtgctaaaatgacgggaagccccttacagagataacacatcctacctttctactttctttttctgcttaaaatgtgccttcaatcttccttttaaatggatttcctcagtttagagatgtgtaatacgaaggcatgcatcttacctatgtggcttctgatccctctgggcacctgtgtctggatacagacctgtgcccacctgcatcccaacccctgacgaggcacatctctgctggtgggggcctgtgtcaaccctgaacagctccccaaggaagctgcttttctgggtgtctgtctagccagctaacctatcatgttcatttttctggcccttagttaaaaatgctctattaggcagggcacagtaagtcacacctgtaatcccagaactttaggagacaggcaggtggatcacttgaaaccaggagttcgagaccagcctggccaacatggcaaaaccctgtctctactaaaaatacaaaaaattaggcgtggtggcacctgcctgtaatcccagctacttggaagacagaggcaccagaattgcttgaactcaggaagtggaggtttcagtgagccaagatcacaccaccgtactccagcctgggtagcagagtgaaactctgtctcaaacaaaacaaaacaaaacaaaacaaaaaaaaacaaaaaaacaaaactgctttattatccaagtgttaaaaaaaggtataggctttctttgtcaagatactttctcgaagtcaaagtcttttatcagtcttctactgtttttcagtagggtcccggtttattcctctgtcaggagcaatatacattccagtatcacacacaccaaaactttaaatacgttggtcaattttaggttatatacattatctatgtgaagtgaataatgtgcattttttctatgtttcattgcacctggtacaagtttaaagcataataatacatttccaggccgggcgtggtggctcatgcctgtaatcccagcactttgggaggccgaggtgggccgatcacgaggtcaggagattgagaccatcctggctaacacggtgaaacccagtctctacttaaaaaaaaaaaaaaaaaaaaaaaaattagccgggcgcgatgatgggcgcctgtagtcccagctacctgggaggctgaggctggagaatggcgtgaacccgggagacggagcttgcagtgagccgggattgcgccactgcactccagcctgggcgacagagcgagactacgtctcgaaaataataataataatacatttcgggctactttgtatttattctgttgaaagagaatgttaacagtctgtcttgccctgatttttcattctgatattatttcactatttccttctaacatgtctccaaaagaaattactgccagacatgtgtcttagagaaatagtgattcaataattatcagtaaattgccagataatctttaaactagccaggagtattacaagcaatatttatgctaaaaatcaatttccctacctcagaagaataattgtattttaaggtttctgatggaaaccagtctttgaacatccaagcattagacccagttccttaccctctgcataaggcatcctgttaggggctctaaagaaaatcctcaagaggtatgaaatttatatagaaggtgacacaagcttaacttcatagtaagtttaactgcattcaataagtaattcaatataaatatataaagaatggtaggagttagcatgctttccaaatgaattatagaaagaataattgctacaaaatttactacactggcactgtatagaaaagttggatgtagaaagagagataaaagttgcctttcaaataaatgggtagcctttgattaagaagtaaggaggaaagcattttgagtacaaaagctccatttgttaattcctctaaatcttcaacaaacagagtacaaagacagagaaaatgctcttcaattactttttttgatgtgagctaatacagcattaataacaaagcctgtaaaacctggttatttaagataactttaataaatacgaagtaactggtgataaatttgacaaaagatgtgcaggagctataaactaagaattataaaacatcgctgaaagaaattaagtcccagggaaatggaacaatattgtgttcatgggccagaagattcaatattgtgaaaaagatcaaaactagaggatttacactatctgatgtcaagacttattataaagctacagtaaccaagacgccgtggtattaggatatgaatagtcatacaacaatggcacagaaagtctagaaatacacatacacatatatgaacaattttaacaaaaatttcaaggcaattcggtaggcaagggaaaaaatttcaacaaatgctgttgcaactataatatatccacatgcaaaaacatggacttcaaaccttaactcatcatttataaaaataaattcaagatgtatcatggatctacatgtaagagcaaaaactataacatttccagaagaaacataagaaaaaaagggctggccacagtggctcaagcctgtaatctcagcactttgagaggctgaggcaagaggattgcttgagtccagaagtttgagaccagcttgggcaacacagtgagaacccatctcttaaaaaaaaaaaaaaaaaaaagtaaaaatacataaaaaaggaatatacaagatgatgttttagagaccttgtgttagacaaagatttctgaaataacacacaaaaagcatgaattatgaaagaagaaagtcagcaaattaaatttgatcaaaattgaaaccttttgctctttaaaggaaactattaagaaaatgaaaaggtagcctgggaaaaatatttgcaaaacatattttaaaaggcacttgtatccagagtatataaagaactcttacaactcatcaacaatccaataaaaatgggcaaaatatttgaaccatggtttttcaactatgctatcagagacactggggatggataattttttcattgtggggaggctgtcctgtgaactgcaggttgtttagcagcctcccaacatccacccagagatgccagtaggatctgaagtagtgacatcaaaaaatgccttgagatatttgccaaaggtcccatgggaagcaaaattgcctcagatgagaactactgatttggataacatgttaatcagagaggaggtacagatgacaaacctacagaacctatgataatcaactagaaactatggaaaacaacacagtttgataaagttatttaatatgcaaatattagcaagatgaaaatgcaatactgtttttatgcctgtactgtgccgtttaaattactagagctttgtagtaaatgttttcaaatcagtaattgtgatgcctctagctttgttctttttgctcaacattattttggttattcagggtcttttgtggttccatatgaattttaggaatgttttttctatttctgtgggaaaaaaaagtcattgcatttcgatagggactgcattgtttctgtagattgctttgggtgggatggaccttttagcaatattaattcttccaatacgttaacatgaatatctttccatttatttgtgttgtatccaatttctttaatcagtgtcttatatttttcagtgtatagatctttcctccttggttaaatttgttcctaaatattttattatttttttgtagctattgtaaatgggattgtttccttgatttctttttcaaacactttgttattagggtgcagaaatgctactgattttcatatgttgattttgtatcctgcaactttactgaattcatttattttaacagttttttggaggagtttttatgttttctatttataaaaaacataaaacattaaattgtctatacagatgacatggtcttataatgagatcaatttaatttcagagacaatttaatttcttctcttctgatttggatgtcatttatttcattctcttgcctaactacactggctaggacttccagtactatgctgaacagaagtgttaagagtgggcaaccttgtattgttcctgatcttagaggaagcttttagcttttcaccactgagtatgatgttagttgtgggtttttcatatatggcctttattgtgttgaggtacatactttctatacctaatttgttgagagtttttataatgaaaggatgtcaaattttgtgaaataccttttctgcatctattgacaggattacatggtttttgtccttcattctgttaatgtggcatatcataattactgatttacttagcttgaattatctttgcatcccagggatagatcccacttgatcatggtgaataatccttttaatgtgctggtgaaatcagtttgctatgttttttcatggaggatttttgtatctatgctcattggtgatattggcctgtagttttcttttcttgaagtgtccttatctggctttggtatcaatgtattacatgtttcatttatttaagttaaataaaaggactagaaacaaaaacaagaaattgctaactctgaatgatagaaatataaatgagaactatattatttttctaaacttggcatttcaagaaattatcaaaagaattcaaagtttctagaaggtaaaataaataagcacgtgtttaccatgtcagaagacaaagtacaaattcatttacaatacatacagttcaataaatgatagaaaagaatttgttcaataaatgggaagatgaatgagcctactgaaaaatgagcaaagacaaagagtggtcaattgaaaaacacaaatttacaaagcctataacaattaagtaattatattaacaattaaattgcaaggaaattttctacactagattgaccaaaaaaactaagtttgaggatatatatatatcttcacctccaccccatgatccagctgtcctacatctggacattgggtcctcttgactatttatattaaatacaagtacaagtgcaaggattttgattgcaacactgtaataaaaaacctagataatccatatagaaatcatattggaactagttaaataagtcaccgtagctctatacaacataattctatgcacatattaaatgaattagttagatctcatttgtaagataagactgtatatttaaaagacagaaaatatgttcttaagtggaaaaagcaagtgtggaagattatgttcattattactttttggttaaaaatatacatatatagacataggaaaagttctaggaagaaaaatgtcaaatgttagaagtggtaacctatgtggttagattgtgataggacctccattttgtatgttttatgtgtctgtactgtttcattacctcaacaatgtaatttttatacaaattgataaatttttattttaaaatgtatttagttttcaagcagctctttatcaaagacatggttctataagtggcttgggatcctcagtagaatttctgaagattttatttaaagggagtgagaaagtaatagaatagtatgtgtttctttaggcaatgtgctgtataatattttattgtaatctagagactttgtggtaattactaaagttaaagcagtattaccttaagctgttgactcccctcctaagtaaaaataattttaaagaaacaaaataatctatgcttttccacatgaatacagtgtttgaaatatttatatatacataaagtaggtcatatttcaccctagttgtcatcaattcatctaattcttgacatgatatataatttttaatgacttgcaaaaaattctggaagaactctctccaaaatcatctaagcattaagatcaaaagttttagtgacactaaacagaggcaaaacttaagacaatacttcctccttttctatcataaaatagataagtttagctcacaaaaacacagtacaggcagcaatggagattttccatagcatcttttgatacatagtaccgctgcaaacttcaacaaattcctaagacattttaaaattagcaattcagttactagctccaaaataaatcattgtatttatgcaatggctgagacagtcttaggaacatggtaggaagtctctctgtgtctgagtgactcaacagtctgacagccaccccaagtaatccccttgaaggtccaaagtcagaatcatttctaagatttgtcatctctagtagagtagctaatgtgctctcttggtcccttttacttaagtgaattcaataaatgatgctggaagtacttcactaggtagagtctgttaatttactaagaaaggtgtttgacttcccatagaatgtacaaactgagtttgtactgaagatttctctaagaactgtcgtaatgcttggtatttaaagaataacaaccaaaaagaatacattcagctgagagaatggttcattttaggtggcttaatgaagaaataattggatacaatttgacatttacaatttgataatgataggtagactgtacttgtccctttaccaggagaacaactatagaacagcttaggttcatatgcagaagacaccttattttttttctgcctttttttatttttttgagatgcagtgtcactctgtcattgcccaggctggagtgcagtggtgccatctcggctcactgcaacctccacctcccgggttcaagtgattctcctgcctcagcctcctgagtagctgggattacaggtatgcaccaccatggccggctaatttttgtatttgtagtagagacgggatttcaccacgttggtcaggctggtctcgatctgacctcaggtgatccacccgcctcagcctcccaaagtgcagggattacaggcacgatccatcgtgcctggcctgttctgcatttttattattacataaacagtattctggaaaggctggaaaatttaaaaatcgcctctcatcttattatgttttcccactttctgcctttatgcacataagtgattattttacacagtttaatcacaacatatgcaattttatatgatttttgaattcattttcctaatgaaaaagtgtttctcaataagcaactttcttcttaaaaatgacacagccatttcaagagggaagggtagaaaaatattttaattgaatcagctacttatgaatatagtattttatattcctttttgtaatattttggaatctcagcaaagtcgtagatcttttcctaattctgctctcattaagttactctgaatcaaacccataagtctgagtctactccgtagtgcagtattcctgctgaaatacttagagattgaagtgcatttgttagacacttgcaaattatcattcgcttaatctgtaatgtaaatgttcgctctttttcatttctaattttacttgcttgtgatttctccttttttttgtttcttgatggctcactgtccagtagtgtctctttttaacaaatgttttttgactgcttaacaattttgtgatttacaatttctcctttgatcatctttgtgtctttcatttgacttccttatattcactgtattattccatttatgccttcttgacttaaaaactgatcctttttcttttaaaaatataagtattaaaagctacatatactgtatccggaggtgtgcggggattatttttcaattcttaaaatgtgcaaatatgccttttgatttaaaagttgcttaaaggtacattttttaattttgaggatatgttagttatgaatttgttaatgattatattttgtattttattgcattgggtcagactgtagaatgtatttatatttcagggctaaaacaatgtttttgtcacttagtagtccattttgtaaatttctaagcaagtttaaaaatggtttctgttatacaggttttaatcatatgcatatatatgttgtatttatgtatatttcacatatacatatatgtataaacatatatatgtatatatatatttatccatattatgtaatccttactaataattcacatctttcatatctttttgtttacttacttttcttcctttcacatcttttggttacttactttttttttttttttttttttgagacggagtcttgctctgtcacccaggctggagtgcagtggcactatcacggctcactgcaacctctgcctcccggattaatgccattctcctgcctcagcctcccgaacacgcctggctaatttttttgtatttttagtagagatggggtttcaccatgttagccaggatggtctcgatctcctgacctcgtaatctgcctgcttcggcctcccaaagtgctgggattacaggtgtgagctaccatgctcagccaaggttacttactttcttaatctgtcttgggcggggggttgacagaggttaattaaagcctataatcaccattgtgtttgtcagtttctttttttaaccttcctttaatttatgctatatgggtttttgtgcaatagaatttgggtatacatacttataccctcattatgacctttaatatttactacaaatttcttatttatagctctgttgacatagtttatcttgaatctagctttgtacaataaaaatcaacagcagctttgttcttgttagtacttctagtatatttaacctttctaaatctaagttagaacgtttctaattcttattctaattcttctaaattagaatcttctaattctaataagaacctgttcttatgtttggtttgaagaaatcacacaacatacattcttatacacgaaagtgtctgtccatcatctagattcaaacttcctggagagctccatatttattaatttttgaatcctttaaaattcccagggccacgcataaagattggatttaaaatatatttgttagctgacttgaaatgtcaaaaagagtgaatcatcagcaatagagctgaaaaataatcgacaatccagtggtgataaatttggggcaggaattttcctggcctccctggaagcacaaaacctcagttgctacatccttcaacaatgtgcacctgctatttctgtacttggcacagactaatcggacagacacacttctagtcaataagaaagaaagcacagtcccttttcagtcaccttgcctttactaccaatcaatccacaggcagttctactttggaacgagagtttaactgccctgcttgcttctccgagatc

SEQ ID NO: 156014 - DNA, 4794 bp, Artificial Sequence
  derived and/or modified sequence
atggaggctgaagaagcgcagcgtggggcttctcctccaatctccgcaatagaagagttttccattatccctgaagcaccgatgaggtctagccaggtgagcgccctaggcttagaggcccaagaggatgaagatcctagctacaaatggcgcgaggagcaccggttatccgctacacagcagagtgaactgcgcgacgtttgcgattatgctatagaaactatgccttcatttcctaaagaagggagtgctgatgtggagcccaatcaagagtcccttgttgccgaagcctgcgatacacccgagcattgggaggcggtgcctcagtcgctcgctggccgacaagctagaaccctggcgcctcctgagttgtgggcatgccccattcagtcagaacacctagatatggcacccttcagcagcgacctcgggagtgaggaagaagaggtggagttttggcccggtcttacctccctcactctgggcagcggccaagcggaggaagaagaagagacaagcagcgataactcaggacaaacccgctattattctccttgcgaagagcaccccgctgaaacaaaccagaacgaaggttccgagtccggcaccatccgccagggcgaggagctccctcccgaagaactgcaggagtcccaggggctgttgcacccccaagaggtgcaggttcttgaggagcaagggcagcaggaagctggattcaggggggaagggacactgagggaggacgtgtgcgcagatggcctgctgggcgaggaacaaatgatcgagcaggtgaatgatgaaaagggggaacagaaacagaaacaggaacaggttcaagacgtaatgctggggagacagggtgagcggatgggactgaccggagagccagaaggattgaacgatggggaatgggaacaggaagatatggagcgaaaagctcaggggcagggcgggccggagcagggggaggagaggaagagagaactacaggtacctgaggaaaatagggccgacagtcaggatgagaaaagccagacttttctaggaaagtccgaagaagtgaccgggaaacaagaagatcatggaatcaaggaaaagggggtgcctgtgtcagggcaagaagcaaaggagccggaatcttgggatgggggaagattgggggccgtcgggcgtgcacgttctcgggaggaggaaaacgagcatcacggcccttccatgcctgccctgattgcccccgaagattcgcctcattgtgatctgttcccaggcgcctcttatttaatgactcagatccccggaacacagacagagtcccgggccgaggagctcagccctgcagctctttcccctagcctggagcccatcaggtgcagtcatcagcccatttccttgttaggaagctttttgactgaggaatcccccgacaaggaaatcgatcaaaacagtcagcaggaggagtctaggctgcgaaaaggaacagtgtcaagccagggcacagaggtggtgttcgcttccgccagcgttaccccgccccggacccctgatagcgctcctccctcccccgctgaagcctatcccatcacaccggcaagcgtttctgcccggcctcccgtggccttccctcggagagaaacgtcatgcgccgcgagggcacctgaaaccgcgtctgctcctttgtccatggatgacccaagcccttgcgggaccagcgagatgtgtccagcggccctgtatgggtttccctcaaccggcacatcacctccccgccctccagccaactcaaccggaactgtccagcatctcaggagcgactccttcccagggtcacaccggacagagcagacgccggaccttgtcggtatgcttctgagctacagtcacagcgagttacctcagaggcctccaaagcctgcaatctattctagcgttacaccaaggagggaccgccggagcggccgcgattattccacagtctccgcctcacctacagctctaagcacgcttaaacaagatagccaggagagcatatcaaacctggagcgcccctcatctcctccctccatccagccctgggttagtcctcataaccccgcttttgcgaccgagtcacctgcatatggctcaagcccctccttcgtgtccatggaagatgtgaggatccacgagccgttaccaccacccccacctcaacgacgggacacacatccaagcgttgtggagacagacggacacgcaagggttgtcgtgccgacactcaagcaacatagccacccaccaccgttggcactcggatctgggctccatgcgcctcacaagggccccttgcctcaggcgtcagaccctgctgttgcccggcagcatagacctctgccttccactcctgatagctcccatcacgctcaggctaccccccggtggcgatataacaaacccttgcctccaactcctgacctaccccagcctcatctcccacctatttccgcgcctggaagtagcaggatataccggccgctgccccccctccctattatcgatccccctacagagcccccacctttaccacccaaatcccggggccgctcacgaagtaccagaggtggtcacatgaactcaggaggtcacgccaagacccggcccgcctgtcaggactggaccgttccactgcccgcatctgccggacgaacttcatggccacctgcgacagccagaagtacagagagtttcacgtctacgagcaggagcaaaagtgaggtttcccctgggatggcatttagcaatatgaccaatttcctgtgtccaagttcaccaacgaccccttggactccagaactacagggccccacctccaaggatgaggccggtgtctctgagcaccctgaggctccggcccgggaaccactgcgaaggacaaccccccagcagggcgcttctggacctggtcgctctcccgtaggtcaggcccgacagccggaaaaaccatctcacttacatctggaaaaggcgtcaagctggcctcaccggcgagatagcggtagacctcctggggatagcagtgggcaagctgtggctcccagcgagggcgccaacaagcataaaggctggtccagacaagggctccggagaccatccatcctgcctgaagggagctcggattccaggggtcccgccgtcgagaagcaccctggcccgagcgacacggtggtttttagagagaagaaaccaaaagaggtcatggggggatttagcagacgatgttccaagttgatcaattccagtcaactcctttatcaagagtactctgacgtcgttctgaacaaggaaatacagagccaacagaggctagagagtttgagtgagacccctgggccctctagcccacggcaaccaaggaaagccctcgtatcttccgagagctacctccagcgcttatccatggcatcatccggatctctgtggcaggaaatcccagtggtaagaaactccacagtcctgctgagtatgacccacgaggaccagaaactgcaggaggtgaagttcgagctgatcgtatctgaggcaagctatctacgctctctgaacatcgccgtggatcatttccagttgagcacatctctgagagccacacttagtaatcaagagcaccagtggctcttctcacgcctgcaagatgtgcgggatgtctccgccacatttcttagtgacctggaagagaacttcgagaataacatattcagcttccaggtgtgtgatgttgtgctgaatcatgctccagattttagacgtgtgtacctaccctacgtcactaatcaaacctaccaggagaggacatttcagagtctaatgaattccaacagtaacttcagggaggtgctggaaaagcttgagagtgaccccgtctgtcagcggctgtcactgaaaagctttttgatactgccatttcaaagaatcaccagattgaagcttctgctccagaatatcctgaagagaacacagccaggttcctctgaagaggcggaagcaaccaaggcccatcatgctctggagcaactgatcagagactgcaataataatgtgcagtcaatgcggaggacggaagagctgatttacttgtctcagaaaatagagttcgaatgtaaaattttcccactgatttcacaatccagatggctcgtgaaatctggcgaactgactgcattggagtttagcgccagccccggccttcgtcgcaagctcaatactcgcccagttcatctccacttgttcaacgattgtttgctgctgagtagaccccgcgagggaagcaggtttctagtgtttgaccatgcccctttttcctccattcgcggagaaaagtgtgagatgaagctccatgggccacacaagaatctttttcggttgttccttagacagaatacgcagggcgctcaagccgagtttctgtttaggacagaaacccagtctgagaaactcaggtggatctcagctctggcgatgcccagggaggagctggacctgctggagtgttacaactctccgcaggtccagtgcctgcgagcgtacaagcccagagagaacgatgagctggccctggagaaagctgatgtcgtgatggtgacacagcaatcttctgacgggtggctggagggcgtacgcctcagcgatggagaacggggatggttccctgtgcaacaggttgagtttatttctaacccggaagtgagggctcagaacttgaaagaggcacatcgggtgaagactgctaagctgcagcttgtggagcagcaagcctag

SEQ ID NO: 156015 - DNA, 1197 bp, Artificial Sequence
  derived and/or modified sequence
atggcctcctccgggagcctgtggcaggaaatccccgtggtgcggaattctaccgtgcttctttccatgacccacgaggatcagaaacttcaggaggtcaaatttgagctaatcgtgagcgaagctagttatctgcggtcccttaacattgccgtagatcactttcagctttccacgtctctgagagctacattgtctaaccaggagcatcagtggctttttagccgactgcaggacgtgagggacgttagcgcaaccttcctcagcgacctcgaggagaatttcgaaaacaatatcttctcatttcaggtttgtgacgtggtgttgaatcatgcccccgactttagacgtgtttacctgccatatgtgacgaatcagacatatcaagagcggactttccagtccttgatgaatagcaattccaatttccgggaggttctggagaagctggagtccgatcccgtatgtcagaggctgtctctgaaatcatttctgatcttaccatttcagcgtataacacgattgaaattgttattacagaatatactgaaaaggactcagcctgggagcagcgaagaagccgaagccacgaaggcccaccacgcgctagagcagcttattagagactgcaacaataatgtgcagtccatgcggaggaccgaagagctgatttatctctcacaaaagatagaattcgaatgcaaaatttttcccctgatctcacagtctaggtggttggttaagagtggagaattgacagccctcgaattttccgcgtctccaggcctacgcagaaagctgaacacccgtcctgtgcatctccacctcttcaacgattgcttgcttctgtctcggcccagggagtcagagaagctaaggtggataagtgcactggccatgccccgtgaggagttagatctccttgagtgttataactcacctcaggtgcagtgcttacgcgcctataagccacgcgagaacgatgagttggcactggagaaagcagatgtggtcatggtgacacagcagagctctgacggctggctcgaaggcgtgcgcctctcggacggtgaacgtggttggtttccagtgcaacaagtggagtttatttcaaaccccgaagtcagagctcagaacctcaaagaagcccacagggttaagacagccaagctgcaactggtggagcagcaggcatag

SEQ ID NO: 156016 - DNA, 1560 bp, Artificial Sequence
  derived and/or modified sequence
atgggtggtttctcccgccgttgctcaaaattaatcaattctagccagctactttatcaggaatatagcgatgtggtgctgaataaggagatccagtctcaacagcgcctcgaatcattgtccgagacaccgggacccagcagcccccggcagccccgaaaggcactggtgtccagcgaatcttatctgcagaggctgtcaatggcctcttctggatccttgtggcaggagatcccagtggtgcgtaactcaaccgtactcttaagcatgactcacgaggatcagaaactacaggaagtcaaatttgaattaatcgtctccgaggcttcctacctgcgatctctgaatatcgcggtcgaccactttcagctgtccacttctctacgcgcaacgctgtccaatcaggagcatcagtggcttttcagccgtctgcaagatgttcgcgacgtatcagcaacctttctaagtgatttagaggagaatttcgagaataacatattcagctttcaggtgtgtgacgttgttctgaatcatgcccccgacttccgtcgagtgtatctgccatacgtgacaaaccagacgtaccaagagaggaccttccagagcttgatgaactcaaacagtaattttcgggaagtgcttgaaaagctggaaagcgatccagtgtgtcagagattatccttgaagtccttcctgatcctacctttccagagaataacaagattgaagctgctgctccagaatattcttaaaaggacacagcccggttcttccgaggaggctgaggctacaaaagcccaccacgcccttgagcagctgatcagggactgcaacaataatgtgcagtcaatgcgcagaaccgaagagctgatttaccttagccaaaaaattgaatttgagtgcaagatttttccactgatttctcagtcccggtggctggtgaagtccggagaactgactgccctcgaattctctgcctccccgggtctcagacgtaaattaaacacaagacccgtccaccttcatctgttcaacgactgtcttcttctgtcgcgccccagggaggggtctcgcttcttggtttttgatcatgcaccattttcctctatccgaggggagaagtgcgagatgaagttgcacggaccacacaagaatctgtttcgcctgtttctacgacaaaacactcaaggagctcaggcagaatttctgttcaggacggagacgcagtctgagaagctaaggtggattagcgccctggcaatgccacgtgaggagctggacctgcttgaatgctataacagcccccaagtccaatgtcttagggcatacaagccccgagagaatgacgagctcgccctcgaaaaggccgacgtggtcatggtgactcagcagagttctgatgggtggctggaaggcgtccggctctcagacggagagcgagggtggttcccagtgcagcaggtcgagttcatctccaaccctgaggtccgcgctcagaatctgaaagaggctcatcgcgtgaagactgcaaagcttcaattggttgaacagcaagcgtag

SEQ ID NO: 156017 - DNA, 2394 bp, Artificial Sequence
  derived and/or modified sequence
tgagttgttgtacctaccttgaagcagcattctcacccccctcccttggctctcgggagcgggcttcacgcccctcacaaggggcctcttccccaggcaagcgacccggccgtggctcgccagcatcgacccctgcctagcacgccagattcttcacatcatgcccaagccactccacggtggcggtataataaaccattgcctcccactccagacctgccccaacctcacctccctccgatctctgcgcccgggagctctcggatctacagacctttgcccccactgccaatcattgatcctcctacagagccaccaccactgccacctaagagcagaggacggtctcgttctacccgtggggggcacatgaattctggaggccacgctaaaacgcggccagcctgccaggactggactgtacctcttcccgcgtccgccgggcggacatcctggccaccagcaactgccagaagcaccgagagcttcacctcaaccagcaggagcaaaagcgaggtttcccccggcatggcattttccaacatgactaacttcctgtgcccctcatcccccacaactccctggacgcctgagttgcagggcccaacctccaaggatgaggcgggtgtgagtgaacatccagaggctcccgccagagagccactgcggcggactactccgcagcagggcgcttccggccccggtcgttcacccgtgggccaggcaaggcagccggagaagccctcacatttacacctcgaaaaggcttcctcctggccacacagaagggattctggacgcccacccggcgatagcagcggtcaagcagtggccccctccgaaggagctaataaacataagggctggtcacggcaggggctccgtcggcccagtatcctacccgagggctcatcggattctcggggtccagcagtggaaaaacatccgggacccagcgacaccgtagtctttagagagaaaaaacccaaagaagtgatgggtggctttagtcggaggtgttccaaactgatcaattcaagtcagctgttgtaccaggaatactcagatgtcgtgcttaataaagagatacagagccaacagagactggagtcattgtccgagactcctggtccctctagccctcggcagcccagaaaggccctcgtgagttctgagtcatatttacagcggctcagtatggcaagttctggtagtctctggcaggaaattcccgtggtgcgtaatagcactgtcctgctgagtatgactcacgaagaccagaagttgcaggaggtgaagttcgagctcattgtgtccgaagcttcgtatctgagaagtcttaacatcgccgttgaccattttcagttatccacatccctgagagccactctttccaatcaggagcaccagtggctattcagcagactccaggacgtgagagacgtctccgcaaccttcctgtctgatctcgaagaaaattttgagaacaacatcttctccttccaagtgtgcgacgtggtgcttaaccacgcccccgactttaggcgcgtctaccttccctatgtaactaatcagacgtaccaagagcgcacattccagtctctgatgaattcaaacagtaacttccgggaggttctggaaaaattagagagtgaccccgtgtgtcaaagactttccctcaagtcattcctaattctcccattccaaagaattacacgtctgaaactccttctgcagaatattcttaagaggacacagcccggcagctccgaagaagcagaggctacaaaggcccatcacgccctggagcaactgataagggattgcaacaacaacgtgcagagtatgcgacggacggaggaactgatctatctgtctcagaaaattgagttcgagtgcaagattttccctctcataagccagagtcgatggctcgtcaagtccggtgaactaactgcccttgaattctcggcatcacccgggttgagacgaaagctgaacaccagacctgtgcacctccatctcttcaatgattgtctcctgctgtcccgcccacgcgagtctgagaagctcagatggatatcagcgctggcaatgccaagggaggaattggatctcttggagtgttataactcaccgcaagtccaatgcctcagggcttataaacctagagagaacgacgaattggctctggagaaagctgacgtcgtgatggtgacccagcagtcatccgacgggtggctcgagggagttcgcctaagtgatggagaaaggggctggtttccggtgcagcaggttgagttcatcagtaaccccgaagtgcgggcacagaacctgaaagaagcacatagagtcaagaccgctaagttgcagctagtcgaacagcaggcctag

SEQ ID NO: 156018 - DNA, 4794 bp, Artificial Sequence
  derived and/or modified sequence
atggaggccgaggaggcccagagaggagccagcccccccatcagcgccatcgaggagttcagcatcatccctgaggcccccatgaggagcagccaggtgtctgccctgggcctggaggcccaggaggatgaggaccccagctacaagtggagggaggagcaccggctgagcgccacccagcagagcgagctgagagatgtgtgtgactatgccatcgagaccatgcccagcttccccaaggagggcagcgcagatgtggagcccaaccaggagagcctggtggccgaggcctgtgacaccccagagcactgggaggccgtgccccagagcctggccggccggcaggcccggaccctggcccctcctgagctgtgggcctgccccatccagagcgagcacctggacatggcccccttcagcagtgacctgggcagcgaggaggaggaggtggagttctggccaggcctgaccagcctgaccctgggcagcggccaggccgaggaggaggaggagaccagcagtgacaacagcggccagacccgctactacagcccctgtgaggagcaccctgctgagaccaaccagaatgaaggcagcgagagcggcaccatccggcagggcgaggagctgcccccagaggagctgcaggagagccagggcctgctgcacccccaggaggtgcaggtgctggaggagcagggccagcaggaggccggcttccggggggagggcaccctgcgggaggatgtgtgtgctgatggcctgctgggggaggagcagatgattgagcaggtgaatgatgagaagggggagcagaagcagaagcaggagcaggtgcaggatgtgatgctgggccggcagggcgagaggatgggcctgaccggggagcctgagggcctgaatgatggagagtgggagcaggaggacatggagaggaaggcccagggccagggcggccctgagcagggcgaggagaggaagcgggagctgcaggtgcctgaagaaaatagagctgacagccaggatgagaagagccagaccttcctgggcaagtctgaggaggtgacaggcaagcaggaggaccacggcatcaaggagaagggcgtgcctgtgtctggccaggaggccaaggagcctgagagctgggatggcggccgcctgggcgctgtgggccgggcccggagccgggaggaggagaatgagcaccacggccccagcatgcctgccctgattgcccctgaggacagcccccactgtgacctcttccctggggccagctacctgatgacccagatccctggcacccagacagagagcagagctgaggagctgagccctgctgccctgagccccagcctggagcccatccgctgcagccaccagcccatcagcctgctgggcagcttcctgacagaggagagcccagacaaggagattgaccagaacagccagcaggaggagagccggctgaggaagggcaccgtgagcagccagggcacagaggtggtgtttgccagcgcctctgtgaccccacccaggaccccagattctgccccacccagccctgctgaggcctaccccatcaccccagcctctgtgtctgcccggccccctgtggccttcccccggcgggagaccagctgtgccgcccgggcccctgagacagccagcgcccccctgtccatggatgaccccagcccctgtggcaccagcgagatgtgcccagctgccctgtatggcttccccagcacaggcaccagccccccccggcccccagccaacagcacaggcaccgtgcagcacctgcggagtgacagcttccctggcagccacaggacagagcagaccccagacctggtgggcatgctgctgagctacagccacagcgagctgccccagaggcctcccaagccagccatctacagctctgtgaccccaagaagagaccggcgcagcggccgggactacagcacagtgtctgccagccccacagccctgagcaccctgaagcaggacagccaggagagcatcagcaacctggagcggcccagcagcccccccagcatccagccctgggtgagcccccacaacccagcctttgccacagagagccctgcctacggcagcagccccagctttgtgtccatggaggatgtgcgcatccacgagcccctgcccccacctccaccccagaggcgggacacccaccccagcgtggtggagacagatggccacgcccgggtggtggtgcccaccctgaagcagcacagccaccccccacccctggccctgggcagcggcctgcacgccccccacaagggccccctgccccaggccagtgaccctgctgtggcccggcagcaccggcccctgcccagcaccccagacagcagccaccacgcccaggccaccccccgctggagatacaacaagcccctgccccccaccccagacctgccccagccccacctgccccccatcagcgcccctggcagcagccgcatctaccggcccctgccccccctgcccatcattgatcctcccacagagcccccacccctgccccccaagagccggggccgcagccgcagcacccggggcggccacatgaacagcggcggccacgccaagaccaggcctgcctgccaggactggacagtgcccctgcctgccagcgctggccgcacctcctggcccccagccacagcccggagcacagagagcttcaccagcaccagccgcagcaagtctgaggtgtccccaggcatggccttcagcaacatgaccaacttcctgtgccccagcagccccaccaccccctggaccccagagctgcagggccccaccagcaaggatgaggccggcgtgtctgagcaccctgaggccccagcccgggagcccctgcggaggaccaccccccagcagggcgccagcggccctggccgcagccctgtgggccaggcccggcagcctgagaagcccagccacctgcacctggagaaggccagctcctggccccaccggcgggacagcggccggcccccaggggacagcagcggccaggccgtggcccccagcgagggcgccaacaagcacaagggctggagccggcagggcctgcggcggcccagcatcctgcctgagggcagcagtgacagccggggccctgctgtggagaagcaccctggccccagcgacacagtggtgttccgggagaagaagcccaaggaggtgatgggcggcttcagccgccgctgcagcaagctgatcaacagcagccagctgctgtaccaggagtacagtgatgtggtgctgaacaaggagatccagagccagcagaggctggagagcctgtctgagaccccaggccccagcagcccccggcagcccaggaaggccctggtgtcctctgagagctacctgcagaggctgtccatggccagcagcggcagcctgtggcaggagatccctgtggtgaggaacagcacagtgctgctgtccatgacccatgaggaccagaagctgcaggaggtgaagtttgagctgattgtgtctgaggccagctacctgcggagcctgaacattgctgtggaccacttccagctgagcaccagcctgcgggccaccctgagcaaccaggagcaccagtggctgttcagccggctgcaggatgtgagagatgtgtctgccaccttcctgagtgacctggaggagaactttgagaacaacatcttctccttccaggtgtgtgatgtggtgctgaaccacgccccagacttcagaagagtgtacctgccctacgtgaccaaccagacctaccaggagaggaccttccagagcctgatgaacagcaacagcaacttccgggaggtgctggagaagctggagagtgaccctgtgtgccagaggctgagcctgaagagcttcctgatcctgcccttccagaggatcacccggctgaagctgctgctgcagaacatcctgaagaggacccagcccggcagcagcgaggaggccgaggccaccaaggcccaccacgccctggagcagctgatccgggactgcaacaacaacgtgcagagcatgagaagaacagaggagctgatctacctgagccagaagattgaatttgagtgcaagatcttccccctcatcagccagagccgctggctggtgaagagcggggagctgacagccctggagttcagcgccagccctggcctgcggaggaagctgaacaccaggcctgtgcacctgcacctgttcaatgactgcctgctgctgagccggccccgggagggcagccgcttcctggtgtttgaccacgcccccttcagcagcatccggggggagaagtgtgagatgaagctgcacggcccccacaagaacctcttccgcctcttcctgcggcagaacacccagggcgcccaggccgagttcctgttcagaacagagacccagagcgagaagctgcgctggatcagcgccctggccatgccccgggaggagctggacctgctggagtgctacaacagcccccaggtgcagtgcctgcgggcctacaagcccagagaaaatgatgagctggccctggagaaggcagatgtggtgatggtgacccagcagagcagtgatggctggctggagggcgtgcggctgagtgatggagagcggggctggttccctgtgcagcaggtggagttcatcagcaaccctgaggtgcgggcccagaacctgaaggaggcccaccgggtgaagacagccaagctgcagctggtggagcagcaggcctag

SEQ ID NO: 156019 - DNA, 1197 bp, Artificial Sequence
  derived and/or modified sequence
atggccagcagcggcagcctgtggcaggagatccctgtggtgaggaacagcacagtgctgctgtccatgacccatgaggaccagaagctgcaggaggtgaagtttgagctgattgtgtctgaggccagctacctgcggagcctgaacattgctgtggaccacttccagctgagcaccagcctgcgggccaccctgagcaaccaggagcaccagtggctgttcagccggctgcaggatgtgagagatgtgtctgccaccttcctgagtgacctggaggagaactttgagaacaacatcttctccttccaggtgtgtgatgtggtgctgaaccacgccccagacttccggcgggtgtacctgccctacgtgaccaaccagacctaccaggagaggaccttccagagcctgatgaacagcaacagcaacttccgggaggtgctggagaagctggagagtgaccctgtgtgccagaggctgagcctgaagagcttcctgatcctgcccttccagaggatcacccggctgaagctgctgctgcagaacatcctgaagaggacccagcccggcagcagcgaggaggccgaggccaccaaggcccaccacgccctggagcagctgatccgggactgcaacaacaacgtgcagagcatgagaagaacagaggagctgatctacctgagccagaagattgaatttgagtgcaagatcttccccctcatcagccagagccgctggctggtgaagtctggagagctgacagccctggagttcagcgccagccctggcctgcggaggaagctgaacaccaggcctgtgcacctgcacctgttcaatgactgcctgctgctgagccggccccgggagagcgagaagctgcgctggatcagcgccctggccatgccccgggaggagctggacctgctggagtgctacaacagcccccaggtgcagtgcctgcgggcctacaagccccgggagaatgatgagctggccctggagaaggcagatgtggtgatggtgacccagcagagcagtgatggctggctggagggcgtgcggctgagtgatggagagcggggctggttccctgtgcagcaggtggagttcatcagcaaccctgaggtgcgggcccagaacctgaaggaggcccaccgggtgaagacagccaagctgcagctggtggagcagcaggcctag

SEQ ID NO: 156020 - DNA, 1560 bp, Artificial Sequence
  derived and/or modified sequence
atgggcggcttcagccgccgctgcagcaagctgatcaacagcagccagctgctgtaccaggagtacagtgatgtggtgctgaacaaggagatccagagccagcagaggctggagagcctgtctgagaccccaggccccagcagcccccggcagcccaggaaggccctggtgtcctctgagagctacctgcagaggctgtccatggccagcagcggcagcctgtggcaggagatccctgtggtgaggaacagcacagtgctgctgtccatgacccatgaggaccagaagctgcaggaggtgaagtttgagctgattgtgtctgaggccagctacctgcggagcctgaacattgctgtggaccacttccagctgagcaccagcctgcgggccaccctgagcaaccaggagcaccagtggctgttcagccggctgcaggatgtgagagatgtgtctgccaccttcctgagtgacctggaggagaactttgagaacaacatcttctccttccaggtgtgtgatgtggtgctgaaccacgccccagacttcagaagagtgtacctgccctacgtgaccaaccagacctaccaggagaggaccttccagagcctgatgaacagcaacagcaacttccgggaggtgctggagaagctggagagtgaccctgtgtgccagaggctgagcctgaagagcttcctgatcctgcccttccagaggatcacccggctgaagctgctgctgcagaacatcctgaagaggacccagcccggcagcagcgaggaggccgaggccaccaaggcccaccacgccctggagcagctgatccgggactgcaacaacaacgtgcagagcatgagaagaacagaggagctgatctacctgagccagaagattgaatttgagtgcaagatcttccccctcatcagccagagccgctggctggtgaagagcggggagctgacagccctggagttcagcgccagccctggcctgcggaggaagctgaacaccaggcctgtgcacctgcacctgttcaatgactgcctgctgctgagccggccccgggagggcagccgcttcctggtgtttgaccacgcccccttcagcagcatccggggggagaagtgtgagatgaagctgcacggcccccacaagaacctcttccgcctcttcctgcggcagaacacccagggcgcccaggccgagttcctgttcagaacagagacccagagcgagaagctgcgctggatcagcgccctggccatgccccgggaggagctggacctgctggagtgctacaacagcccccaggtgcagtgcctgcgggcctacaagcccagagaaaatgatgagctggccctggagaaggcagatgtggtgatggtgacccagcagagcagtgatggctggctggagggcgtgcggctgagtgatggagagcggggctggttccctgtgcagcaggtggagttcatcagcaaccctgaggtgcgggcccagaacctgaaggaggcccaccgggtgaagacagccaagctgcagctggtggagcagcaggcctag

SEQ ID NO: 156021 - DNA, 2394 bp, Artificial Sequence
  derived and/or modified sequence
tgagtggtggtgcccaccctgaagcagcacagccaccccccacccctggccctgggcagcggcctgcacgccccccacaagggccccctgccccaggccagtgaccctgctgtggcccggcagcaccggcccctgcccagcaccccagacagcagccaccacgcccaggccaccccccgctggagatacaacaagcccctgccccccaccccagacctgccccagccccacctgccccccatcagcgcccctggcagcagccgcatctaccggcccctgccccccctgcccatcattgatcctcccacagagcccccacccctgccccccaagagccggggccgcagccgcagcacccggggcggccacatgaacagcggcggccacgccaagaccaggcctgcctgccaggactggacagtgcccctgcctgccagcgctggccgcacctcctggcccccagccacagcccggagcacagagagcttcaccagcaccagccgcagcaagtctgaggtgtccccaggcatggccttcagcaacatgaccaacttcctgtgccccagcagccccaccaccccctggaccccagagctgcagggccccaccagcaaggatgaggccggcgtgtctgagcaccctgaggccccagcccgggagcccctgcggaggaccaccccccagcagggcgccagcggccctggccgcagccctgtgggccaggcccggcagcctgagaagcccagccacctgcacctggagaaggccagctcctggccccaccggcgggacagcggccggcccccaggggacagcagcggccaggccgtggcccccagcgagggcgccaacaagcacaagggctggagccggcagggcctgcggcggcccagcatcctgcctgagggcagcagtgacagccggggccctgctgtggagaagcaccctggccccagcgacacagtggtgttccgggagaagaagcccaaggaggtgatgggcggcttcagccgccgctgcagcaagctgatcaacagcagccagctgctgtaccaggagtacagtgatgtggtgctgaacaaggagatccagagccagcagaggctggagagcctgtctgagaccccaggccccagcagcccccggcagcccaggaaggccctggtgtcctctgagagctacctgcagaggctgtccatggccagcagcggcagcctgtggcaggagatccctgtggtgaggaacagcacagtgctgctgtccatgacccatgaggaccagaagctgcaggaggtgaagtttgagctgattgtgtctgaggccagctacctgcggagcctgaacattgctgtggaccacttccagctgagcaccagcctgcgggccaccctgagcaaccaggagcaccagtggctgttcagccggctgcaggatgtgagagatgtgtctgccaccttcctgagtgacctggaggagaactttgagaacaacatcttctccttccaggtgtgtgatgtggtgctgaaccacgccccagacttcagaagagtgtacctgccctacgtgaccaaccagacctaccaggagaggaccttccagagcctgatgaacagcaacagcaacttccgggaggtgctggagaagctggagagtgaccctgtgtgccagaggctgagcctgaagagcttcctgatcctgcccttccagaggatcacccggctgaagctgctgctgcagaacatcctgaagaggacccagcccggcagcagcgaggaggccgaggccaccaaggcccaccacgccctggagcagctgatccgggactgcaacaacaacgtgcagagcatgagaagaacagaggagctgatctacctgagccagaagattgaatttgagtgcaagatcttccccctcatcagccagagccgctggctggtgaagagcggggagctgacagccctggagttcagcgccagccctggcctgcggaggaagctgaacaccaggcctgtgcacctgcacctgttcaatgactgcctgctgctgagccggccccgggagagcgagaagctgcgctggatcagcgccctggccatgccccgggaggagctggacctgctggagtgctacaacagcccccaggtgcagtgcctgcgggcctacaagcccagagaaaatgatgagctggccctggagaaggcagatgtggtgatggtgacccagcagagcagtgatggctggctggagggcgtgcggctgagtgatggagagcggggctggttccctgtgcagcaggtggagttcatcagcaaccctgaggtgcgggcccagaacctgaaggaggcccaccgggtgaagacagccaagctgcagctggtggagcagcaggcctag

SEQ ID NO: 156022 - DNA, 4794 bp, Artificial Sequence
  derived and/or modified sequence
atggaggccgaggaggcccagcggggcgccagcccccccatcagcgcaatagaggagtttagcattattcctgaagcgcccatgcggagttcccaggtgagtgcactgggtctggaagctcaagaggatgaagatccatcttacaagtggcgtgaggagcaccggctgtctgcaacacagcaatccgaactccgcgacgtatgcgattacgccatcgagacaatgccttccttcccaaaggaagggtcagccgatgtggagccaaaccaggaatccctagttgcagaagcatgtgacactccagagcattgggaggcagtgccccagagcctggcgggcaggcaagctagaaccctggctccccctgagctttgggcctgcccaatacaatcagaacacttggatatggcgcctttttctagcgacctggggtctgaggaggaagaggtggaattttggcctggcctcacttcccttactctgggtagcggacaggcggaagaggaggaggaaacctcatcagataactccggccagacccgttattacagcccttgcgaggaacatcccgcagagacgaaccaaaatgagggatctgagagcggcaccatcaggcagggtgaagaactaccacctgaggagttgcaagagagtcaagggctgctccacccccaggaagtacaagtcttggaagagcaggggcagcaagaggccggtttcaggggggagggaacactgagagaagacgtgtgcgcggatggcctacttggagaagagcaaatgatagagcaggtgaacgacgagaaaggtgagcaaaagcagaagcaggaacaggtccaggacgtgatgctcggacggcagggtgagcgcatgggtctgacaggagagccggagggactaaacgacggggagtgggaacaagaagacatggagcgaaaggcccaagggcaaggcgggcctgagcagggagaggaacgaaagcgcgagctgcaggtgcccgaagaaaatcgagctgacagtcaggatgagaagagccagacgttcctcgggaagagcgaggaagtgaccgggaaacaggaagaccacggaattaaagagaaaggggtgcccgttagtggccaggaggctaaagagcccgagtcttgggacgggggtagattgggggctgtcgggcgagcaagatcacgggaagaggaaaatgagcatcacggcccttcaatgccagccctcattgcacccgaagactccccacactgtgacctgttcccaggagcctcttatctgatgacccagataccaggcacacagactgaatctagggcagaagagctgtcacccgcagccttatccccttccctcgagcccatcaggtgcagccaccaaccaatcagtctgcttggatctttcctgacagaagagtccccagataaggaaattgaccaaaactcacagcaggaggagtccagactgcgcaaaggcacagtttcgtctcagggcaccgaagtcgtgttcgcctcagcaagcgtgacacctccacgcactccagactccgccccaccctccccagcagaagcatatcctatcacgcccgcctcagtgagcgcacgacctcccgttgcttttccacgcagggagacctcctgcgcagcccgcgctccagagacggcttccgccccattaagcatggacgacccaagtccatgcggtacctctgaaatgtgccccgccgcactgtatggattcccttctactgggacgtcccctccccgcccccccgccaacagtaccggcaccgtgcaacacctcaggagcgatagcttcccagggtcgcataggaccgagcagactccagatctggtgggcatgttgctctcatacagccacagcgagcttcctcaacgcccgccgaagccagcaatttacagctctgtcacaccacgtcgggaccggagaagtggccgggactattccaccgtgtctgcttctcccactgcattgtctactctgaagcaggattcccaggagtccattagcaatctggaacgtccttcatctcccccttcaattcagccatgggtttctcctcataatcccgccttcgccacggaatctccagcatatggttccagtccgtcttttgtttccatggaggatgtaagaatacatgagcccttgcctccacccccgcctcagcgaagagacacccacccctcagtcgtggaaacagacggacatgctagggtggtggtgcctaccctgaaacaacactcccacccgccacctctggccttagggagcggattgcacgcaccgcataaagggcctcttccgcaggctagcgacccagcagtggcccggcagcataggccgctgccttcaacccctgatagcagccatcacgcacaggctacaccgcggtggcggtataataagccgcttccaccaaccccagacttgccacaacctcacctaccccctattagcgctcctggctcctcgcgtatctacaggcccttaccgcccttgcccatcatagaccctcccacagagcctccacccctaccccccaaatccaggggccgctctcggagcactcggggaggacacatgaactccggcggtcatgcgaaaacccgcccagcatgtcaggactggaccgtcccactgcctgcttccgctggcaggacatcatggcctcctgcgaccgcacgctctaccgagagctttacaagtaccagccgcagcaaatctgaagtcagtcccggaatggcttttagtaatatgacaaactttctctgcccctctagccctacaacaccctggacaccggagcttcagggtccaacctctaaggacgaggctggggtgagcgagcatccagaagcgcctgctagggaacccctccgacgcacaaccccgcagcagggcgcatcaggacccggacgctctcccgtcggacaggccaggcagccagagaaaccctcccacctgcacctagagaaggcatcgagctggcctcacaggagggattctggtcgcccaccaggagactcttctgggcaagcggttgctccatccgagggcgcaaataagcataagggatggtctaggcaggggttgaggagaccctccatactccccgaggggtcctctgactctagaggtccagctgtagaaaagcatcctggccctagcgatacggtagtattcagggagaaaaaacctaaagaggttatgggagggttttctcgccgctgtagcaagcttattaattccagccaacttctttaccaagagtactctgacgtcgtcctcaataaagagattcagtctcagcagaggttggaatcactaagtgagaccccagggccttcctcaccaagacagccgagaaaggcactggtgagttccgaatcttatcttcagcgactatctatggcatcgagcgggagcctctggcaggagattccggttgtgcggaattctacggtgttattatccatgacccatgaagaccagaaactgcaggaggtcaagtttgaattaattgtaagcgaagcctcttacctgaggagcctgaacatcgctgttgaccatttccagttgagcacaagtttgcgagccactctgtcgaatcaggagcaccagtggctgttttcgcgactacaggacgtgagggacgtatccgccacttttctctccgatttggaggaaaatttcgagaataatatcttctcattccaggtgtgtgacgtagtgttaaatcatgctcccgattttcgcagagtctatctaccatatgtgactaaccagacctatcaggaacggaccttccagtcacttatgaactcaaatagtaattttagggaggtcctagagaagctcgaaagcgatccagtgtgtcagcggctgtcgctcaaaagctttttaatcttgcccttccagcggataactcgtctgaaactgctcttgcagaatatcctgaaacgaactcagccgggatcctctgaagaagctgaagctaccaaggcccaccacgctctggagcaacttatccgggactgtaacaataacgttcagtccatgcgaagaactgaagagctcatttatctcagtcagaagattgaattcgagtgcaaaattttccctctcattagccaatctaggtggcttgtgaagtctggtgaattgacagcactggaattttctgctagccccggactgagaaggaagcttaatactcggccagtgcacctgcacttatttaatgattgtctgctcctcagtcgcccacgcgagggtagtcgtttcctagtcttcgatcatgcgcctttctcctccattaggggagaaaagtgcgagatgaagctacatggtccgcataagaacctgttccgcttgtttcttcggcagaacacacagggcgcgcaggccgagtttctattccggacagaaacgcagtcagagaaattaaggtggatttccgcacttgctatgcctagggaagagctggatctcctggaatgctacaactcccctcaggttcagtgcctgcgggcctacaagcctcgagagaacgacgaattggctctcgagaaggccgatgtggtaatggttacacagcagtcctccgatggctggttggaaggggtgagactgtcagacggggaacggggctggtttcccgtgcagcaggtggaattcattagtaaccccgaagtgcgggcccaaaatctcaaggaagcgcacagagtgaagacagccaaattgcagcttgtggagcagcaggcctag

SEQ ID NO: 156023 - DNA, 1197 bp, Artificial Sequence
  derived and/or modified sequence
atggccagcagcggcagcctgtggcaggagatccccgtggtgcggaactcaactgttctcttgtcaatgacccatgaagaccagaaacttcaagaagtgaaatttgagttgattgtatctgaggctagctacctgcgctccctaaatatcgccgttgatcactttcaactaagtacttctttgagggcaacactcagtaaccaggaacatcagtggttattctcacgcctgcaggatgtcagagacgtgtctgcaacctttctcagtgacctggaagaaaactttgaaaataacatattttcatttcaagtttgcgacgtcgttctgaaccatgccccagacttcaggcgagtgtacttaccctacgtgaccaatcagacataccaagaaaggaccttccagtcactcatgaattcaaactcaaacttccgcgaggtgctagagaagttagaatcagatccagtgtgccagcgcctttccctgaagagcttcctcatcttgcccttccaacgcataacacgacttaagctgcttctgcaaaacatcctgaagaggacccaacccggctcttccgaagaagcagaagcgaccaaggcccatcacgctctggagcagttaatccgggactgcaacaacaatgtgcagtccatgcgcaggacagaggaactcatatacctgtcacaaaaaattgaattcgagtgtaaaatcttccccctaatttctcaaagccgatggctggtcaaatcaggtgagttaactgccctcgaattctcggcgtcccccgggctgcgcagaaaactcaataccagaccagtacacctgcacctgttcaacgattgcctcctgctctcgcgacctcgggagtctgagaaattacgttggatttccgcgctagctatgccaagagaggaactcgacctactcgagtgctataactccccccaagtgcaatgcctgcgagcttacaaacctcgagagaacgatgaactcgccctagagaaggcagacgtggttatggtaactcagcagtcttccgatggctggttagagggggtacgcctctcagatggagagagggggtggtttcctgtgcagcaggtcgagttcattagcaacccagaggtccgggcacagaatctcaaggaggcgcaccgagtgaaaactgctaagctgcagctggtcgaacagcaggcatag

SEQ ID NO: 156024 - DNA, 1560 bp, Artificial Sequence
  derived and/or modified sequence
atgggcggcttcagccggcggtgcagcaagctgatcaacagcagccagctgctgtaccaagagtactctgacgtggtcttaaacaaagagattcagtcccagcagagactggaaagcctttccgagacacccggcccgtccagccctaggcagccacgcaaggccctggtgagctcagagtcctacctccagcgactctcaatggcctcgagtgggtccttgtggcaagaaatacccgttgttaggaactccacagtgctgctgtccatgacccatgaggaccagaaacttcaagaggtgaagttcgaattaattgtatccgaagccagctacctcagatccctgaacatcgcggtggatcatttccagttgtcaacttctttgcgggctaccttgtctaatcaggagcaccaatggctgttctcacgactgcaggacgtccgggatgtgtctgcaacctttcttagcgatctcgaggaaaactttgagaacaatattttctccttccaagtgtgcgatgtggtactaaatcacgcaccagacttcaggcgcgtctaccttccatacgttactaatcagacctaccaagagcgcacatttcagagcctgatgaatagcaacagtaacttccgcgaagtcctcgagaagttggagtccgatccagtgtgtcagaggttgagcctgaaatcctttctgatcctgccatttcaaaggatcaccagactgaagcttcttctgcagaacatactcaagcgaactcagccaggaagttccgaagaagctgaagccactaaggcccaccatgcactcgaacagctcataagagattgcaacaacaacgtccagtctatgcgacgcacagaggagctgatttatctttcccagaagattgagtttgagtgcaagatttttcccttgattagccagtccagatggctcgtcaaatcgggcgagctgaccgcattggagttctccgccagcccagggcttcgccgaaagttaaacacacggcctgtacatttgcacctgttcaacgattgcctactgctgtcaagaccgcgggaaggaagtcgatttcttgttttcgatcacgccccattctcaagcatccggggagagaagtgcgagatgaaattgcacggcccccataagaatcttttccgtctgttcctgcgtcagaatacacagggggcccaggccgagtttttgtttaggacagaaacacagagtgagaagctgagatggatttctgccctggcgatgccaagagaggagttggatctgctggaatgttacaattctccgcaagtccaatgtctcagagcgtataagcctcgggagaatgatgagctggctctagagaaagccgatgtcgtcatggtgacccaacaaagctcagatggatggctggaaggggttagactctccgacggggaacgtggctggttccccgtacaacaggtggagttcatatctaatcctgaggtcagagctcagaacttaaaagaggcacacagagtgaagactgctaagctgcagttagttgaacagcaggcttag

SEQ ID NO: 156025 - DNA, 2394 bp, Artificial Sequence
  derived and/or modified sequence
tgagtggtggtgcccaccctgaagcagcacagccaccccccccccctcgctctcgggtcaggactacatgcccctcataagggccctctaccccaggcgagtgatccggctgtcgcacgccagcaccggccattgcccagtacaccagattcaagccatcacgcccaggcaacaccccgctggagatataacaagccactgccccctacgccagatctccctcagccccatcttccacctatttctgcacccgggtccagccgcatatatagacctctcccacccctaccaatcatcgacccgcccaccgagcctcccccccttcctcccaaatctcgcggacgatccagaagcacacgggggggccatatgaattccggcgggcacgccaagacaaggcccgcctgtcaagattggaccgttccactgcctgcatcggctggaaggacttcttggccccctgctactgcccgctccactgaaagttttacttcgacatccagaagcaagtccgaggtctcccccggaatggcgttttccaatatgactaattttctgtgcccttcatcaccaaccaccccgtggacaccagagctgcaaggccccaccagcaaggacgaggccggcgtgagcgagcaccctgaagcccccgccagagagcccctgcgaaggacaacaccccagcagggagcgtccgggcctggccgctctccagtgggacaagcaaggcagcctgaaaaaccatcccacctgcacctggaaaaggcatcttcatggccacatcggcgggactccgggcgccctcccggagatagcagcgggcaggccgtcgccccgagcgagggcgctaacaagcacaagggctggagccgccagggcctaaggcgaccaagcattctcccagaagggagctctgatagtagagggccggctgtggagaagcatccgggtccaagcgacacggtagtcttcagggaaaaaaaacctaaggaagtcatgggaggcttttccaggcggtgttctaaactcatcaatagctctcagttgctctaccaggagtactcagacgtagtccttaataaggaaatacaaagccagcaaagattagaatccctttccgaaactccaggaccgagttctcccaggcagcctaggaaggcgctcgtgtccagcgaaagctatcttcagaggttgagtatggcctccagcggatctttatggcaggagatccctgtggtgcgcaatagcactgtgctgctgagtatgacgcacgaagatcaaaagctgcaggaggtgaagttcgaattaatagtttccgaggcgagttatcttcggtctctgaacatagctgtggaccattttcaactcagcacatccctgcgcgccaccctgtcaaatcaagagcatcagtggctgttttccagactccaggacgtaagagatgtgagtgcaacctttctttcagacttggaagaaaattttgagaacaatatcttcagcttccaggtctgcgacgtggtcctgaatcacgctcccgatttccgacgggtctatctgccatatgtcacaaaccagacttatcaggaacgaacatttcaatccctgatgaatagcaattcaaacttcagggaggtgctagaaaagttagagtccgatcccgtctgccagcgcctcagccttaaatcctttttaatcctgcctttccagcggataactcggttaaaattgctattgcagaatattctgaaaaggactcaaccggggagttccgaagaggccgaagctacgaaggcgcaccatgctctggagcagctgattcgggactgtaataataatgtccagtccatgaggagaactgaagaactaatttatctgagccagaagattgagtttgagtgcaaaattttcccactcattagccaaagcagatggctcgtaaagtccggagagctcactgctctggaattttccgcctccccaggccttcgacgcaaactcaatacacggccagtgcacttgcatctttttaatgactgtctcctcctgtcacgtcctagagagagcgaaaaactacggtggattagcgccctggccatgcccagggaggaattagacttgttggagtgctataattcaccacaggtccaatgtctccgtgcatacaagccacgagagaatgatgagctggccctcgagaaggctgacgtcgtgatggttacccagcagtcaagcgatgggtggctagaaggtgtcaggctgagtgacggcgagcgcggctggttccctgtccagcaagtggaattcatctcgaatcctgaagtcagggctcaaaacctgaaggaagcgcaccgggttaagactgctaagcttcagctcgtcgagcagcaggcctag

SEQ ID NO: 156026 - DNA, 4794 bp, Artificial Sequence
  derived and/or modified sequence
atggaggcagaagaggcccagaggggagcaagccctcctatcagtgccattgaggagttctcaattattcctgaggccccaatgcggtcttcacaggttagtgccttgggtctggaggcccaggaggatgaggacccaagctataagtggagggaagaacatcggctgagtgccacccagcaatcggaactccgagatgtgtgtgattacgctattgaaactatgccttcatttccaaaggagggcagtgcggacgttgaacccaaccaagaaagtttggtggctgaggcctgtgatacaccagagcactgggaagccgtgcctcagtcgcttgccggaagacaggccagaacgctggctcccccagagctctgggcctgtccaattcaatctgagcacctggacatggcccctttttctagcgaccttgggtctgaggaagaagaagtggaattttggcccggactgactagcttgaccctgggaagtgggcaagctgaagaagaggaggagacaagcagtgacaacagcggccagacacgctactatagcccttgcgaggaacatccagccgaaaccaaccagaacgagggatccgagtccggtacaatcagacagggcgaggagctccctccggaagaacttcaggaatctcagggactactccacccacaggaagtgcaagttcttgaggagcaggggcagcaggaagcaggttttcgcggtgaagggactctgcgcgaagacgtatgtgccgatgggctcttaggggaagaacaaatgatcgaacaggtcaatgacgagaaaggcgaacagaagcagaagcaagaacaagtgcaggacgtaatgctggggcgacagggggagaggatgggcttaaccggcgagcccgaaggactgaacgatggcgaatgggaacaagaggatatggagcgcaaggctcaaggtcagggaggacccgagcagggtgaagaaaggaagagggagctgcaggttcctgaggaaaaccgcgctgacagccaggacgaaaaatcccaaacgttcctgggaaagtcagaggaagtgactggaaaacaggaagaccatgggataaaggagaagggagtccccgtctcaggccaggaggctaaggaacccgagagttgggatggaggacggttgggagcggtgggcagagcccgaagcagagaagaagagaacgagcaccatggacctagtatgccagctctgattgctccagaggactcaccacactgcgatctttttccaggggcatcatacctgatgacacagattccaggcacgcagactgaatctcgagccgaggagctctcccctgctgctctctctccatctttagaacctatcaggtgttctcaccagccaattagcctgttgggtagctttttaaccgaggaatcaccagacaaggagatcgatcagaactctcagcaggaagaatcccgactgagaaagggcacagtcagcagtcagggcaccgaggtggtgtttgcgtccgcgagcgtcacccctcccagaacgcctgatagtgctcccccatcaccggcagaggcctatcctattactcccgcatctgtgtccgccagaccgcctgtcgcttttcctcgcagagaaacgtcctgtgccgctcgggcacctgagactgcctctgcaccattaagtatggacgaccccagtccgtgtgggacctccgaaatgtgtccagccgcactgtacggattcccgtctactggaacgtcaccacccagaccacccgctaactccacaggaacagtgcagcacctacgctctgattccttccccggaagtcacaggaccgagcagactccagacctcgtgggcatgcttctatcctattcgcattcggaactaccgcagcgccctcccaagcctgccatatacagttctgtgacccctagacgagacagacgttcagggagagattacagtacagttagtgcatctccgaccgctttaagcaccctgaagcaagactcacaggaaagcattagcaatcttgagcgaccctcctccccgcctagcatccagccttgggtgtccccacacaacccggcttttgctaccgagtcaccagcttacggtagtagcccctcctttgtctctatggaagatgtccgaatccacgagccccttccacctccacctccccaaagaagggacacgcacccttctgtcgtcgagacagacgggcatgcacgagtcgtggtccctactctgaagcaacacagccatccccctcctctcgccctcggtagcggactgcacgctcctcacaaaggcccactgccccaggcgagtgaccccgcagtggccagacagcaccgccctttgccatctactccagacagcagccatcacgctcaagcaaccccacgctggcgttacaataaacctctcccgccaacccctgacttgccacagccacacctgcctcctatctccgctcctggcagctcacggatctaccggcctctgccaccgctcccaatcatcgatccccctactgagcctccacccctcccccctaagagccgcggacgctcccggagcacaagagggggtcacatgaactctggtgggcacgctaaaacccgcccagcctgccaggactggacagtcccgctaccagcttcagccggaaggacatcctggcctcccgcaactgcccgttctactgagagctttacctccacgagccgatccaagtcagaagtgtcccctggcatggcatttagtaacatgaccaacttcctgtgtccttcttcgccaactacgccatggacaccagaacttcaaggtccgaccagcaaagacgaggcaggggtgtccgagcaccccgaagctcctgcaagagaaccacttcgccgaaccactccccagcagggcgctagcggacccggacggtccccagtggggcaggctcgccagcccgaaaagccaagccacctacacctcgaaaaagcttcatcatggcctcacagaagggatagcggccgaccccctggcgatagttctgggcaggcagtcgctccatctgaaggtgccaataagcacaagggatggtccaggcaggggctgcggaggccgtcaattctacccgaaggatcttctgattctagaggccctgcggtggagaagcaccctggaccttcagacaccgtggtgttccgcgagaagaaaccaaaagaagtgatggggggattttcccgcaggtgctcaaagctaattaatagcagccagctgctctatcaggaatacagtgacgtcgtgctcaacaaagagatccagtcccagcagagactggagagcctttccgagaccccagggcctagctctccgagacagccacggaaggccctggtgagcagcgaatcatatctccaacgcctgtcaatggcgtcctcaggcagcctatggcaggaaatacccgttgtcaggaactctacagtcctcctgagcatgacccatgaggatcagaaactgcaggaggtgaagtttgagctgatcgtgtccgaagcttcgtacctgcgcagtctgaatatcgccgtagaccattttcaactgtcaacatccctccgggctaccctgagtaaccaggagcaccagtggctcttttcacggctgcaagacgtgagagatgtcagtgctacgtttctctccgacctcgaagagaacttcgaaaacaacattttctcttttcaggtatgtgacgtggtgttgaaccatgcccctgactttagaagagtgtacctcccctatgtgactaaccagacctatcaagagagaacgttccagagcttgatgaactccaactctaatttcagggaggtacttgagaaactggaaagtgatccagtctgtcagaggctatccctgaagagcttcctgatcctgccgtttcagaggatcacacgacttaaactcctgttgcagaatattctgaaacgaacgcaacctgggtcttctgaagaggcggaggcgaccaaggcacaccacgcgcttgaacagctcattcgggattgtaataacaatgtgcagtctatgcggaggaccgaagagctcatttacctgagccagaaaatcgaatttgaatgcaaaatctttcctttaatctcccaaagccgctggctcgttaagagtggggagctaaccgccctcgagttttccgcctcgcccggattgcggagaaagttgaatacccgtccagtgcacctgcacctgtttaatgattgtctgttattatcccggcctcgcgagggcagcagatttctggtgttcgatcacgccccattctcttccatccgtggtgagaagtgtgagatgaagttgcatggaccacacaagaatctgttccggctttttctccgccagaatacacagggtgcccaagcggagttcttattccggacagaaactcagtctgaaaagctgagatggatatcagcgctggctatgcctagagaggagctggatctactggagtgctataactcccctcaggtgcagtgtttgagggcctacaaaccccgtgagaacgatgaactcgccctagagaaggcagacgtggtgatggtgacgcaacagtctagtgatggatggctggagggtgttagactgtctgacggcgagcgcggttggttcccagttcagcaggtggagttcatctcaaacccagaagttcgtgctcaaaatctcaaggaagctcaccgcgtcaagacagccaaactgcaacttgtggaacagcaggcttag

SEQ ID NO: 156027 - DNA, 1197 bp, Artificial Sequence
  derived and/or modified sequence
atggcctcctccggcagcctttggcaggaaattccagtcgtccggaacagcaccgtgttattgagcatgacacacgaagaccagaaattacaggaagtgaagtttgaactcatcgtgagcgaagcgtcctacttaaggagtcttaatatcgccgtcgatcattttcaactgagcacgtctctacgagccactctgtccaatcaggaacaccaatggttgtttagtagactgcaagatgttcgagatgtttctgccacttttctgtctgatctggaggagaatttcgagaacaacatcttcagcttccaggtgtgtgacgtggtgctgaatcatgccccagattttcgaagagtgtacctcccctacgtcactaaccaaacttatcaagaacggactttccaaagcctgatgaattctaactccaacttcagagaggtgctagagaaactcgagtccgatcctgtctgtcaaagacttagcctgaagtcgttcctgattctgcccttccagcgaattactagactgaagctgttgctgcagaatatcctgaagagaacacaacctgggagcagtgaagaagcagaagctactaaagctcatcacgctctcgagcagctgatcagagactgtaataacaacgttcagtctatgagacggaccgaggagttgatatacctcagtcaaaagattgaattcgaatgtaaaattttcccgctgatatcacagtcccggtggttagtcaaaagtggtgagctgactgcgctggagttttcagccagccccggactgcggaggaaactgaacacacggcctgtccacctccatctgttcaacgattgccttctgctgtctcgcccacgggagtcggagaagctccggtggatttccgcgctagctatgccaagggaagaactggacctgcttgagtgttacaactctccccaggttcagtgcctgagggcctataagccacgcgagaatgatgagctcgctctggaaaaggcagacgttgtgatggtcacccaacagtcctccgacggctggctggaaggagttaggcttagcgacggtgagcgtgggtggttcccagttcagcaagttgagtttatctccaatcctgaagtcagggcccaaaatcttaaggaggcacaccgtgtgaaaactgctaagttacagctcgtagagcagcaggcctag

SEQ ID NO: 156028 - DNA, 1560 bp, Artificial Sequence
  derived and/or modified sequence
atgggtggcttttctagacgctgcagtaagttgatcaattcgtcacagcttctgtatcaggaatactctgacgtggttcttaacaaagagatccagagccagcaacgactggaatcattgtctgagacccccggacccagctcccccaggcagcctcggaaagcccttgtgtcatcggagtcctatctgcaaaggctgtctatggcttcgagcggaagtctgtggcaggaaattccagttgtccgtaactcgactgtgctgctctcaatgacacacgaggatcaaaagctccaagaggtcaagtttgagcttatcgtctcagaggccagttacctaaggagccttaatattgctgtcgaccatttccagttgtctacctctctccgggctacactgtcaaatcaggagcaccagtggttgttttcacgtctgcaagacgttagggatgtgtcggccaccttcttgtccgatttggaagaaaacttcgaaaataatatcttctccttccaggtatgcgacgtggtgctgaaccacgcccctgacttcaggcgagtctacttgccttacgtgactaaccagacttaccaggaaagaaccttccagagcctaatgaatagtaatagtaatttcagagaggttctcgaaaagctggaaagtgacccggtgtgtcagcggctctcactgaagagcttccttatccttccttttcaacggatcacgcgcctgaagttgctactgcagaacattttaaaacggactcagcccggaagcagcgaagaggctgaggccaccaaagcccatcacgcattagagcaattaatcagggactgcaacaacaatgtgcagagcatgcggaggacagaagaactgatttacttgagccagaaaattgaatttgagtgcaaaatcttccccctgatatcccagtcacggtggctggttaagagtggggagctgacggccctggaattcagcgcttcccccggacttcgccgaaaattgaacacccgtccagtgcatctgcacttatttaacgattgtctgcttctttcacgacctagagaggggagcaggtttcttgtgttcgaccacgcccctttctccagcatcaggggcgaaaaatgtgaaatgaagctccatggccctcataagaacctcttccgcctttttctgagacagaacacccagggcgctcaagccgaatttttgttcaggactgagacgcagtccgagaagcttcgctggatctccgcgctcgctatgccaagagaggaactggaccttctcgagtgttacaatagcccccaagttcaatgtcttcgcgcttacaaacctcgtgagaacgacgagttagctctcgagaaagctgacgtcgttatggttacgcagcaatccagcgatgggtggctggagggggttagattgtccgatggcgagcgcggatggttccccgtgcaacaggtagaattcatcagcaaccctgaggttcgggcacagaacctaaaggaggcgcacagggtgaagacggctaagctgcagctagtggaacaacaggcttag

SEQ ID NO: 156029 - DNA, 2394 bp, Artificial Sequence
  derived and/or modified sequence
taggtagtggtgcccactttgaaacagcattcccaccctcccccactggccctgggatctggactccatgccccacacaaggggccactgcctcaggccagcgatccagccgtcgcaagacagcacagacctctgcctagtacccccgattcttcgcatcatgcgcaggcaacccctaggtggaggtacaataagcccctgccaccaacacctgacctgcctcagccccatctgccccctatcagtgctccaggaagctcacgaatctatcggcctttgcccccattgcctattatcgatcctccaactgagccgccacctctccccccaaagagtagggggagatctaggtccactagaggtgggcatatgaattctggcggtcatgcgaaaactcgacctgcttgtcaggactggactgtccccctgccagccagcgctggtagaacaagctggcctccagccactgcacgtagtactgaaagctttaccagcaccagtcggtccaagtcagaggttagtcccggaatggctttttctaatatgactaacttcctgtgccccagcagcccaaccaccccctggacacccgagttacaaggccctacatcaaaagatgaggcgggtgttagcgaacacccggaggctccagccagagagcctttacgacgaacgacccctcaacagggggcttcaggccctggtcggtcgcctgtgggtcaggcacgccaaccagaaaaaccctcccacctgcatcttgagaaagcatcttcctggcctcacaggcgggacagtggtcgcccacccggagattcaagcggacaggccgtggctcccagtgagggtgctaacaaacataagggctggtccaggcaggggctgagacgcccaagtattttgcctgaaggaagctccgatagtaggggccctgccgtagaaaaacaccccggtccctcagacaccgtggtcttccgagaaaagaagcccaaggaagttatggggggtttcagcaggagatgctctaagctcatcaactctagccagttgttgtaccaggagtactcagacgtggtcctgaataaagagattcaatcccagcaaaggctggagagcctcagcgagaccccaggtccctctagcccccgacagcctaggaaggccctggtgagcagcgagtcttacctccagagactcagcatggcctctagtgggagcctctggcaggagattccagtggtgcgaaactcaacagtattgctgagtatgacccatgaggatcaaaagctccaggaggtcaagtttgagcttattgtctctgaggcctcatatcttcgttccctcaatatcgccgtcgaccacttccagctcagtacatccttaagggccacactctccaaccaagagcatcagtggctgtttagcagactccaggacgtgcgtgatgtttctgcaacattcctgagcgatcttgaagaaaatttcgagaacaatattttctctttccaggtttgtgatgtggtgttaaatcatgctcctgattttagaagggtatatctcccctacgttacaaatcagacttaccaagagcgcactttccagtccctaatgaactccaattccaatttcagggaggttctcgaaaagttggaaagcgaccctgtttgccagcgattgtcactcaaatctttccttatactccctttccagcgaatcacaagattgaagttgctcctgcagaatattctgaagcgaacccagcccggatcaagtgaggaagcagaggccaccaaagcacaccatgctctggagcagcttataagagattgcaacaacaacgtgcagtctatgcgtcggactgaggaattgatttacctctcccagaaaatcgagttcgagtgtaagatctttccgctgatttcccagagtcgttggctagtgaagagtggcgagctcaccgcactggagttttccgcgagcccgggacttcggaggaagctcaacacccggcctgtgcatctgcatttattcaacgactgcttgctgctgagccgacctcgagaatcagaaaagcttaggtggataagcgccctggcaatgcccagggaggagttagatctcttagaatgttataactccccacaggttcagtgcttgagggcttataagcccagggagaacgatgagttggctttggagaaggccgatgtggtgatggtcacgcaacagtccagcgacggctggctggaaggagtgcggctaagtgacggagaaagaggctggtttcctgttcagcaggtggagtttatctccaatcccgaggtgagggcccagaacctgaaggaggcacacagagtcaaaaccgcaaagctgcagcttgtagaacagcaagcatag

SEQ ID NO: 156030 - DNA, 4794 bp, Artificial Sequence
  derived and/or modified sequence
atggaggcagaggaggctcagaggggtgcttcaccaccaattagcgccatcgaagagttttcgatcatccccgaggctcctatgagatcctcccaggtgtcagcacttggcttagaagcccaggaagatgaagacccatcttacaagtggagagaggagcacagactgtccgccacacaacagagcgaactcagagatgtgtgtgattatgcaattgagaccatgccgagcttccccaaggaagggagtgcagatgtcgagcccaatcaggagtcattggtggcagaggcatgcgacaccccagagcattgggaagccgtgccccagagcctcgccggacgtcaggctaggactctcgcccccccagagctgtgggcttgtccgatccagtcagagcatctcgatatggcccctttcagctccgatctcggctcagaagaggaagaagtcgagttctggccaggactaacatctttgaccttaggaagtggacaggcggaggaggaggaagagacaagctctgacaacagtggccagaccaggtattacagtccctgtgaggaacaccctgctgaaaccaaccagaacgagggctccgagtccggaactatacgccagggggaggaactcccccctgaagagttacaggagtcacagggccttctgcatccacaagaagtgcaggtcctggaagaacaggggcagcaggaggccggttttagaggggaaggcactttgcgcgaggatgtgtgtgcggatggtctgctgggagaagagcagatgattgagcaagtgaatgatgaaaagggagaacagaaacagaaacaggagcaggtccaggacgttatgcttggccgacagggggagcgcatggggctgaccggagaaccggagggactcaacgatggtgaatgggagcaggaggatatggagagaaaggcccagggccagggcggacccgaacaaggagaagaaaggaagagagagctccaggtgcctgaggagaatcgggcggattcacaagatgagaagtcccagaccttcctgggcaagagcgaggaggtgaccggcaaacaggaagaccatgggatcaaggaaaagggggttcccgtgtccggacaggaggccaaagaaccagagtcctgggacggcggccgactaggagccgtaggacgcgctagatccagagaagaggagaatgagcaccacggccccagcatgcccgctcttattgcacctgaggattcaccacactgcgacctgttccctggcgctagttatttaatgacacagatacctgggacacagactgaatcccgggcagaagagctttctcccgccgccctgagtccatccctggaacccattcgctgttcccaccagccaatctctctgctcggttcctttctgaccgaggaatctccagataaagagatcgaccaaaattcccaacaggaggagtcacggcttcgtaaagggaccgtgagctcccaggggaccgaggttgtattcgccagtgcgagtgttacaccacctagaacacctgatagtgcccccccctcaccggcggaggcctatccaatcacgccggcttcggtgtccgctaggccacccgtcgcttttcctcggagggagacctcctgcgcagcacgcgctccagagaccgctagcgccccattaagcatggacgatccttctccgtgtgggacgtcggaaatgtgtcctgcagctctatacggattccccagcactggaacaagccctcctaggcctcccgccaactccacaggaacagtgcagcaccttcgctcggatagctttcccggatcccatcgcacagagcagacaccagacctggttggaatgttgctctcatactcacactcagagctgccacaacgcccaccaaagcctgccatatatagcagtgtgacccctaggagagatcgtaggagcggtagggactactccactgtgtccgctagtcccaccgccttgtccactttaaagcaagattcccaggaaagtataagtaacctggaacggcctagcagtccacctagtatacaaccctgggtgagtcctcacaatcccgcttttgccacagagagcccagcttatgggtcatctcccagtttcgtgtcgatggaagatgtacggatccatgaacctttacccccacctcccccccagaggcgcgatacccaccctagcgttgttgagactgacggccacgctagagtcgtggtgcccacacttaagcagcacagtcacccaccaccattagctctgggtagtggcctccacgccccacataaagggccccttccacaagccagcgatcccgccgtcgcccgccagcaccgacccctaccctccacccctgattccagtcaccatgcacaagcgactccacggtggagatacaataaacccctcccacctacaccagacctgccacaaccgcatctgcctccaatctctgcccccgggagttcacggatctataggccacttccccccctgccaataattgatcccccaaccgagccgcctcctcttccaccgaaaagcaggggaagatccagatccaccagaggagggcacatgaactccggtggccatgccaaaacacggccggcgtgccaggactggaccgtgccactgcctgccagcgctgggcgcacgtcctggccacccgcgactgcccggtctaccgaatcattcaccagcacatcaaggtctaagtccgaagtaagcccaggaatggcgttctctaacatgactaattttctctgcccatccagtcctactacaccctggacacctgaattgcagggccctacttccaaggacgaagctggggtgtccgaacaccccgaggcacccgcccgcgaaccgttgcgcagaacaacaccccagcaaggagcatccgggcccgggcgcagcccagtgggccaggctcgccagcctgaaaagccttcgcacttgcacctggagaaggcctcctcttggccccatcgccgagactcaggccgccctccaggagacagcagcggccaggcggtggctccctcagaaggcgccaataaacataagggctggtcgaggcaaggacttaggcggcccagcatactacctgaaggcagctccgactctagaggtccggccgtcgagaaacacccagggccaagcgatactgtggtattccgggagaaaaaaccaaaagaggtaatgggtgggttcagcagacgctgttccaagcttatcaactcaagccagctcctctatcaggagtattcggatgtcgtgctcaacaaagagattcaatctcagcagcggcttgagtccctatctgaaacgccaggcccatctagcccccgacagccacgcaaagcactcgtttcatccgaatcctatctccagagattatccatggcctctagcggctcactgtggcaggagatccctgtggtgagaaattcgactgtcttactgtctatgacacatgaggaccagaagctgcaggaagttaaatttgagctcattgtgagtgaggcctcctatctgcgcagcctgaacatagccgtggatcactttcaactcagcacgagtctaagagcaactctgtcaaatcaagagcaccagtggctgttctccaggctccaggatgtgcgggacgtgtccgctactttcctcagtgatcttgaagaaaacttcgagaacaatatatttagtttccaggtttgcgacgtcgtgctcaaccatgcccctgatttccgacgtgtctacctcccttacgtcaccaatcagacataccaggaaaggaccttccaaagtcttatgaatagcaactccaactttcgggaggttctcgaaaaactcgaatcagaccctgtgtgccagaggttgtcacttaagtcttttctcatattacctttccagagaataacccgtttgaaacttctactgcagaatatccttaagcggactcaacctgggagttcagaagaggccgaggctacaaaagcccatcacgcactggagcagcttattagagattgcaataataacgttcaaagtatgagaagaacagaagaattgatttacctgagtcagaagattgagttcgagtgcaagattttccccctcataagccagtctcggtggttggttaagtcaggcgaacttactgccctggagttttcagcttctcctggtctgcggagaaaattgaacacccgtccagtgcacctgcatctctttaacgattgcttgctgctgagtaggccgagggaagggagtagatttctcgtcttcgaccatgctcctttctcttcgattcgcggcgaaaaatgcgaaatgaaacttcacggaccacacaagaatctcttccgactgtttctgagacagaatactcaaggtgcgcaggcggagttcctttttaggactgagactcagagtgaaaagctccggtggatttctgctttagctatgccaagggaagagctagatctactggagtgttataatagcccacaggtgcagtgcttacgggcttacaaaccacgagagaatgatgagttggcgctagagaaagctgacgtggtgatggttacacagcagtcttccgacggttggctcgagggcgtcaggttgagcgatggagagcgcggatggtttcccgtgcagcaggtggagtttatcagcaaccccgaggtgcgtgctcagaacctcaaggaggcacatcgtgtcaaaaccgcaaagctccagctcgtcgagcagcaggcctag

SEQ ID NO: 156031 - DNA, 4794 bp, Artificial Sequence
  derived and/or modified sequence
atggaagccgaagaggcccagcgcggtgcttcaccccccatcagcgctatcgaagaattcagtataatcccagaagctccgatgcgttccagccaggtctccgccctaggattagaagctcaggaagacgaggacccatcatacaaatggcgagaggagcatcgccttagtgcgacccagcagagcgagctgagagacgtctgcgattatgccattgagactatgccgagctttcctaaagagggttctgcagacgttgaaccaaaccaagagtcactggtggccgaggcttgcgacactcccgagcactgggaggccgtaccacagagcctcgccggcaggcaagcaagaactcttgccccccccgaactatgggcgtgccctatacagtcagaacatcttgacatggcaccattctcaagcgatttaggatccgaagaagaagaagtagagttttggcccggcctgacatcattgactttgggtagcggacaggcggaggaggaggaggaaacatccagcgacaatagtggacaaacgcgctactattcaccctgcgaggaacaccccgctgaaactaaccaaaacgaaggcagcgaatccggaaccatacggcagggggaggaactccccccagaggaactccaagagagccaggggttgctgcatccacaagaagtacaggtcctggaggagcaaggacaacaggaagccggatttcggggcgaaggtactctcagggaagacgtgtgcgccgatggacttttgggcgaggaacaaatgatcgagcaggtgaatgatgaaaaaggagaacagaagcaaaaacaagaacaggtacaggatgtaatgttaggtagacagggcgagcggatgggactcaccggagagccggaagggctaaacgatggagagtgggaacaagaggacatggagagaaaggcccagggacaaggaggccccgaacagggcgaggagaggaaaagagagttgcaagtacccgaagagaaccgggccgatagccaagatgaaaagtcacagacatttctggggaagtctgaggaggtcacaggcaaacaagaagaccacggtatcaaagaaaagggcgtgcccgtttcaggtcaggaggcaaaggagcccgaatcttgggatggagggcgattaggcgcagttggcagggcgagaagtagggaagaagagaatgagcaccatggcccgtcgatgcccgcccttatagcccccgaagattccccacactgtgacctgttcccaggagctagctacctcatgacacagatcccaggaacccaaaccgagtctagagccgaggaactgagcccggctgctctgagcccatccctggaacccatccgctgtagccaccagcccatatctctcttggggtctttcctgaccgaggaatctcccgacaaggaaatagaccaaaacagccagcaagaagaatccaggctgagaaaaggtaccgtatcatcacaagggaccgaagttgtctttgctagcgccagcgtgacacctcctcgcacacctgattctgccccaccttcccctgcggaggcatacccgattacccctgcaagcgtttctgcacgtcctcccgtcgcatttcccagaagagaaactagctgcgccgcgcgggcccccgaaactgcttctgctccactatctatggacgatcccagcccatgcgggacttcagaaatgtgccctgccgccctttacggcttccctagcacaggtactagccctccacgccccccagccaactcaacaggcaccgtgcagcacctacgttctgactccttccccggatctcatagaactgaacagacgccagacctggtcggtatgttgttaagctattcacacagcgagcttccacagaggcctccaaaaccagccatctacagttcggttacaccacgccgggacagacggtccggtcgtgattactctacagtctcagcaagtccgacagccctgtcaaccctaaaacaagattctcaggaatccatatccaaccttgagagaccctcctctccgccctctatccaaccgtgggtttcaccgcacaatcccgctttcgccacagagagcccagcttatgggtcatctcccagtttcgtgtcgatggaagatgtacggatccatgaacctttacccccacctcccccccagaggcgcgatacccaccctagcgttgttgagactgacggccacgctagagtcgtggtgcccacacttaagcagcacagtcacccaccaccattagctctgggtagtggcctccacgccccacataaagggccccttccacaagccagcgatcccgccgtcgcccgccagcaccgacccctaccctccacccctgattccagtcaccatgcacaggccacaccacgatggaggtacaataagcccctccctccaactcccgatcttccccagccccacctacctcccatctcagccccaggctcaagtaggatttacagaccccttcctccactgcctataatcgatcccccaacagagccaccccctcttccccccaaatccagaggacggtcaaggtccaccagaggcggacacatgaatagtggcggccatgctaagaccagacccgcttgccaggactggaccgttccattgcccgcctcggcaggacgcactagttggcccccggcgacggcaaggtctacagaaagttttacatcaacctcccgatctaaatctgaggtaagtccaggaatggcatttagtaacatgacaaattttctgtgtcccagtagtccaacaactccgtggaccccagaactccagggacccacctcaaaagatgaagccggcgttagcgaacaccccgaagctccagcccgagagccactgaggaggacaactccacaacagggagcctccggaccaggacgaagtccagtcggtcaagccagacagcctgagaaaccatcacacttacacctcgaaaaagcctcttcatggcctcacagaagagattcgggccgaccccctggagactcctcaggccaagctgtggccccaagcgaaggggccaataaacacaaggggtggtcccgacagggactgagaaggccatccatcctccctgaaggaagttccgactccagaggccccgctgtggaaaagcatccagggcccagcgacaccgtggtatttagggaaaagaaaccaaaggaagtgatgggcgggttcagtagaagatgttctaaacttatcaattcctcccaactgctgtatcaggaatactctgatgtagtcctgaataaagagatccagagccagcaacgattggaatcacttagtgagacacccggaccaagctccccccgtcagccccggaaagcactagtgagttcagaatcttatctgcaaagactgagcatggcgtcttcaggatcactgtggcaggaaatacctgttgttaggaattcaaccgtgctgctgtccatgacccatgaagatcaaaaactccaggaggttaagtttgagcttattgtctccgaagccagctatttaagatcactgaacattgccgtggaccacttccagctgtcaacatccctacgagccaccctgtcaaaccaggaacaccaatggctcttctccagacttcaggatgtgagagacgtttcagcaactttcttatcagatctagaggaaaatttcgagaacaatatcttctcttttcaggtgtgtgacgtagtgctcaatcacgctcccgactttaggcgggtctaccttccttatgtgactaaccagacttatcaagaaagaacatttcaaagcttgatgaactccaacagcaacttcagagaagtgctcgagaagctcgagtccgatcccgtgtgccagagactgtcgctcaaatcatttcttattctgccatttcaaagaattactcggttaaagttattgctgcagaatattcttaaacgtacacagcccggaagtagcgaagaagctgaagccactaaagctcaccatgcactcgaacagcttattcgggattgcaataacaacgtgcagagcatgaggcgcaccgaagaactgatttatttgtcgcaaaagatcgagttcgaatgtaaaattttccctctgatttcccagtcccgctggttggttaaaagcggcgagctcaccgctctcgaattctccgcgagccccggcctgaggaggaagcttaacacacgaccagttcacctacacctattcaatgactgcctgctgctttcccgacccagggagggatcccgattccttgtgtttgaccacgcgccattttcttccatacggggcgaaaaatgtgaaatgaagttgcacggacctcacaagaacctctttagactctttttaagacagaacacccagggcgcccaggccgagttcctctttcggaccgaaactcaatccgaaaaactgagatggattagcgcccttgccatgccccgagaggaacttgacctgctagagtgctataacagccctcaagtgcagtgcctgcgggcttacaagccaagagaaaatgatgaactcgccctcgagaaggccgatgtagtgatggtaacccagcagtcgagtgacggctggttggaaggggttagactgtcagatggtgagagaggttggtttccagtacagcaagtagagtttatatccaacccagaagttagggcccagaacttgaaggaggctcatagagtgaaaacggccaagctgcaattggttgagcaacaggcatag

SEQ ID NO: 156032 - DNA, 5544 bp, Artificial Sequence
  derived and/or modified sequence
gaaacttcctaggagaacccgatccctccctcccgtcgggcggccaggggcgggccgcgggtggggcggccgggcctgcgctggggacggctctggggactgcggccggcgccgggacctggaggggacgctggggccgaagcagcatgtgacaccgaccaggattcagccctgatggaggctgaggaggcccagcgtggagcctctcctcccatctctgccatagaggaattcagcattatccctgaggctcccatgaggagcagccaggtctctgccttggggcttgaagctcaagaagatgaggacccatcctataagtggagagaggaacacagactctcagcaactcagcagagtgagttaagggatgtgtgtgactatgcgattgagacgatgccctcttttcccaaggaaggttctgcagatgtggagcccaatcaggaaagccttgtggctgaggcctgtgacactccggaacactgggaggcagtaccccagagcctagcaggccgacaagcaaggactctagctcccccagagctctgggcctgccccattcagagtgagcatctagacatggccccattttccagtgacctgggaagcgaagaagaggaggtggaattttggccaggacttacttctttgacattgggatctggacaggcagaagaagaagaggaaacctcttcagataactctggtcagaccagatattattctccctgcgaagagcatcctgcagagaccaaccagaatgaaggctctgaaagtgggactatcaggcagggggaagagctgccacctgaggagctgcaggaaagtcaagggctcttgcatccccaggaggtccaagttctggaggagcagggacagcaggaagcaggatttcggggggaaggaactctgagggaggatgtttgtgccgatgggctattaggggaggaacagatgatagagcaggttaatgatgaaaagggagaacagaagcaaaaacaggaacaggtacaagatgtgatgcttgggagacaaggagaaagaatggggctcactggggagccagagggtctgaatgacggtgagtgggagcaggaggatatggagaggaaggctcagggtcagggaggtccagaacagggagaagagaggaagagggagctgcaggtgccagaagagaatagggcggactctcaggacgaaaagagtcaaacctttttgggaaaatcagaggaagtaactggaaagcaagaagatcatggtataaaggagaaaggggtgccagtcagcgggcaggaggcgaaagagccagagagttgggatgggggcaggctgggggcagtgggaagagcgaggagcagggaagaggagaatgagcatcatgggccttcaatgcccgctctgatagcccctgaggactctcctcactgtgacctgtttccaggtgcctcatatctcatgactcagattcccgggactcagacagagtccagggctgaggaactgtcccccgcagctctgtctccctcgctagagcccatcaggtgctctcaccagcccatttctctactgggctcctttttgactgaggagtcacctgacaaggaaatagatcaaaacagccagcaagaggaatccaggctgaggaagggaacagtgtccagccaagggactgaggtggtctttgccagtgcatctgtgactcctccaaggacaccagattcagctcctcccagtcctgctgaagcctaccccatcacacctgcctcggtatctgccaggcccccagttgcctttcccaggagggaaacctcttgtgctgcacgtgctccagaaactgccagtgcccctctctcaatggatgacccatctccctgtgggacttctgagatgtgcccggctgccctctatggcttcccctccaccgggaccagccctccgaggcccccagccaactccacaggcaccgtccagcacttacggagtgactccttccctggttctcacaggacagagcagactccagacctggtgggaatgttgctttcctactcccactcagagctgccccagaggccccccaaacctgccatctacagctctgtgaccccaagaagggacagaaggagtggtagggactacagcaccgtttcagcatcccctactgccttatccacgctgaagcaggactctcaagaatccatctcaaatctagagagacccagcagtcctcccagcatccagccctgggtctccccacataatccagcctttgccacagagtctcccgcctacggttcttccccatcctttgtctccatggaggatgtgaggatccacgaacctctgccccctcctcccccacagaggagggacacccatccctccgtggtggagacagatggccatgctcgtgtagtggttcccacgctgaagcagcatagccaccctcctccattggccctaggttcagggctgcatgccccccataaaggcccacttccccaagcctctgaccccgctgtggccaggcagcaccgacctctgccatctaccccagacagctcccaccatgctcaggccacccccaggtggagatacaacaagccgctaccccctacccctgatttgccgcagccccaccttcctcccatttctgctcctggtagctcaaggatctacaggcctctacccccactacccatcatagaccctcccaccgaaccacccccattgcccccaaagtccagggggaggagcaggagcactcggggaggacatatgaactcagggggtcatgccaaaacaagacctgcttgtcaagactggacagtccccctccctgcctctgctggacgcacctcctggcccccggccacagctagatcaacagagtctttcacttccaccagcaggagtaagagcgaagtgtcccctggcatggctttcagcaacatgacaaacttcctatgcccctcttcccctaccactccctggactccggagctccagggacccacctctaaggatgaagcaggggtctcagaacaccctgaggcccctgcgagagaacctttgagaaggacaacccctcagcaaggagccagtggcccagggaggtcacctgtgggccaagcaaggcagccagaaaaacccagccatctgcacctggagaaggcgtccagctggccccacaggcgggactcagggaggccaccaggggacagcagtggacaggctgtggctcctagtgagggggccaacaagcacaagggctggagccggcagggcctgcgcagaccttccatcttgcctgagggctcttcagattcaagaggtccagccgtggagaaacatccgggaccctcagacactgttgtttttcgggagaaaaaaccaaaggaggtgatgggaggcttttcaagacgctgctccaaactcatcaactcctcccagctgctttaccaggagtatagtgatgttgtcctgaataaggagatccagagccagcagcggctggagagcctgtccgagacacccgggcctagctctccgcggcagcctcggaaggccctggtctcctccgagtcgtacctgcagcggctctccatggcctccagcggctccctctggcaggaaatccccgtggtgcgcaacagcaccgtgctgctctccatgacccatgaagaccaaaagctgcaagaggtcaaatttgagctgattgtgtcagaggcctcctacctgcgcagtctaaacatagctgtggatcatttccaactttcaacttcactccgggccacactttccaaccaggagcaccaatggctcttctctcgtttacaggatgtgcgagacgtcagcgccacgttcctttcagacctggaagagaactttgagaacaatatcttctccttccaagtatgtgacgtagtcctgaaccacgccccagacttccgccgggtctacctgccttatgtcaccaaccagacctatcaggaacgcaccttccagagcctgatgaatagcaacagcaatttccgggaggtcttggagaagctggagagcgaccccgtctgccagcgcctttccctcaagtcctttctgattctgcccttccaacgcatcacccgcctcaaactgctgctccagaacattctgaagagaacacagcctggctcctcggaggaggcagaggccacgaaggcacaccacgccctggagcagctgatccgggactgcaataacaatgtccagagtatgcgacggacagaggaactaatctacctgagccagaagattgagtttgagtgcaaaatattcccgctcatttctcagtcacgctggctggtgaaaagtggggagctgacagccttggagttcagtgcttccccagggctacgaaggaagctgaacacgcgtccagtccacctgcacctcttcaatgactgtctgctgctgtctcggccccgagagggtagccgattcctggtatttgaccatgctcccttctcctccattcggggggaaaagtgtgaaatgaagctacatggacctcacaaaaacctgttccgactctttctgcggcagaacactcagggcgcccaggccgagttcctcttccgcacggagactcaaagtgaaaagcttcggtggatctcagccttggccatgccaagagaggagttggaccttctggagtgttacaactccccccaggtacagtgccttcgagcctacaagccccgagagaatgatgaattggcactggagaaagccgacgtggtgatggtgactcagcagagcagtgacggctggctggagggcgtgaggctctcagacggggagcgaggctggtttcctgtgcagcaggtggagttcatttccaacccagaggtccgtgcacagaacctgaaggaagctcatcgagtcaagactgccaaactacagctggtggaacagcaagcctaagtcttctctgagaggagtttcgtgagctgaagaacaagctgctcatggcaagggctggccccagaaccctgcaagagaggccttctgtggatggagaactaggccttctcaaagctcaaggacaaaatccagctaacccagtccctcggcccaggcctcctttcgtgctttgtgcttggtgggggggatttcgagggactttgcactggactctgggaacctttcatcattaaaaaaagggggaccattggggcctgagccaaggaactttccttctactgccttatagtgcttaaacattctccgcctccagggtgcagattcagagctggccagagtttcagtgatagccgtatgttaaacagaatctcacctcagtctcctggagggagatgtttaagaggggttaacacatcagatgggagggtcagcccggtgacctctaaggtatcttctaacctagaaattcaccataattatggtgcaaggtcagtgtgtctctgagatctatgtctgttggtggcaatgtgagggtgatactctctcactctaataaacttggcacttctccgagta

SEQ ID NO: 156033 - DNA, 2937 bp, Artificial Sequence
  derived and/or modified sequence
gtgtagtggttcccacgctgaagcagcatagccaccctcctccattggccctaggttcagggctgcatgccccccataaaggcccacttccccaagcctctgaccccgctgtggccaggcagcaccgacctctgccatctaccccagacagctcccaccatgctcaggccacccccaggtggagatacaacaagccgctaccccctacccctgatttgccgcagccccaccttcctcccatttctgctcctggtagctcaaggatctacaggcctctacccccactacccatcatagaccctcccaccgaaccacccccattgcccccaaagtccagggggaggagcaggagcactcggggaggacatatgaactcagggggtcatgccaaaacaagacctgcttgtcaagactggacagtccccctccctgcctctgctggacgcacctcctggcccccggccacagctagatcaacagagtctttcacttccaccagcaggagtaagagcgaagtgtcccctggcatggctttcagcaacatgacaaacttcctatgcccctcttcccctaccactccctggactccggagctccagggacccacctctaaggatgaagcaggggtctcagaacaccctgaggcccctgcgagagaacctttgagaaggacaacccctcagcaaggagccagtggcccagggaggtcacctgtgggccaagcaaggcagccagaaaaacccagccatctgcacctggagaaggcgtccagctggccccacaggcgggactcagggaggccaccaggggacagcagtggacaggctgtggctcctagtgagggggccaacaagcacaagggctggagccggcagggcctgcgcagaccttccatcttgcctgagggctcttcagattcaagaggtccagccgtggagaaacatccgggaccctcagacactgttgtttttcgggagaaaaaaccaaaggaggtgatgggaggcttttcaagacgctgctccaaactcatcaactcctcccagctgctttaccaggagtatagtgatgttgtcctgaataaggagatccagagccagcagcggctggagagcctgtccgagacacccgggcctagctctccgagtcgtacctgcagcggctctccatggcctccagcggctccctctggcaggaaatccccgtggtgcgcaacagcaccgtgctgctctccatgacccatgaagaccaaaagctgcaagaggtcaaatttgagctgattgtgtcagaggcctcctacctgcgcagtctaaacatagctgtggatcatttccaactttcaacttcactccgggccacactttccaaccaggagcaccaatggctcttctctcgtttacaggatgtgcgagacgtcagcgccacgttcctttcagacctggaagagaactttgagaacaatatcttctccttccaagtatgtgacgtagtcctgaaccacgccccagacttccgccgggtctacctgccttatgtcaccaaccagacctatcaggaacgcaccttccagagcctgatgaatagcaacagcaatttccgggaggtcttggagaagctggagagcgaccccgtctgccagcgcctttccctcaagtcctttctgattctgcccttccaacgcatcacccgcctcaaactgctgctccagaacattctgaagagaacacagcctggctcctcggaggaggcagaggccacgaaggcacaccacgccctggagcagctgatccgggactgcaataacaatgtccagagtatgcgacggacagaggaactaatctacctgagccagaagattgagtttgagtgcaaaatattcccgctcatttctcagtcacgctggctggtgaaaagtggggagctgacagccttggagttcagtgcttccccagggctacgaaggaagctgaacacgcgtccagtccacctgcacctcttcaatgactgtctgctgctgtctcggccccgagaaagtgaaaagcttcggtggatctcagccttggccatgccaagagaggagttggaccttctggagtgttacaactccccccaggtacagtgccttcgagcctacaagccccgagagaatgatgaattggcactggagaaagccgacgtggtgatggtgactcagcagagcagtgacggctggctggagggcgtgaggctctcagacggggagcgaggctggtttcctgtgcagcaggtggagttcatttccaacccagaggtccgtgcacagaacctgaaggaagctcatcgagtcaagactgccaaactacagctggtggaacagcaagcctaagtcttctctgagaggagtttcgtgagctgaagaacaagctgctcatggcaagggctggccccagaaccctgcaagagaggccttctgtggatggagaactaggccttctcaaagctcaaggacaaaatccagctaacccagtccctcggcccaggcctcctttcgtgctttgtgcttggtgggggggatttcgagggactttgcactggactctgggaacctttcatcattaaaaaaagggggaccattggggcctgagccaaggaactttccttctactgccttatagtgcttaaacattctccgcctccagggtgcagattcagagctggccagagtttcagtgatagccgtatgttaaacagaatctcacctcagtctcctggagggagatgtttaagaggggttaacacatcagatgggagggtcagcccggtgacctctaaggtatcttctaacctagaaattcaccataattatggtgcaaggtcagtgtgtctctgagatctatgtctgttggtggcaatgtgagggtgatactctctcactctaataaacttggcacttctccgagt

SEQ ID NO: 156034 - DNA, 2432 bp, Artificial Sequence
  derived and/or modified sequence
ctaccactccctggactccggagctccagggacccacctctaaggatgaagcaggggtctcagaacaccctgaggcccctgcgagagaacctttgagaaggacaacccctcagcaaggagccagtggcccagggaggtcacctggggccaacaagcacaagggctggagccggcagggcctgcgcagaccttccatcttgcctgagggctcttcagattcaagaggtccagccgtggagaaacatccgggaccctcagacactgttgtttttcgggagaaaaaaccaaaggaggtgatgggaggcttttcaagacgctgctccaaactcatcaactcctcccagctgctttaccaggagtatagtgatgttgtcctgaataaggagatccagagccagcagcggctggagagcctgtccgagacacccgggcctagctctccgcggcagcctcggaaggccctggtctcctccgagtcgtacctgcagcggctctccatggcctccagcggctccctctggcaggaaatccccgtggtgcgcaacagcaccgtgctgctctccatgacccatgaagaccaaaagctgcaagaggtcaaatttgagctgattgtgtcagaggcctcctacctgcgcagtctaaacatagctgtggatcatttccaactttcaacttcactccgggccacactttccaaccaggagcaccaatggctcttctctcgtttacaggatgtgcgagacgtcagcgccacgttcctttcagacctggaagagaactttgagaacaatatcttctccttccaagtatgtgacgtagtcctgaaccacgccccagacttccgccgggtctacctgccttatgtcaccaaccagacctatcaggaacgcaccttccagagcctgatgaatagcaacagcaatttccgggaggtcttggagaagctggagagcgaccccgtctgccagcgcctttccctcaagtcctttctgattctgcccttccaacgcatcacccgcctcaaactgctgctccagaacattctgaagagaacacagcctggctcctcggaggaggcagaggccacgaaggcacaccacgccctggagcagctgatccgggactgcaataacaatgtccagagtatgcgacggacagaggaactaatctacctgagccagaagattgagtttgagtgcaaaatattcccgctcatttctcagtcacgctggctggtgaaaagtggggagctgacagccttggagttcagtgcttccccagggctacgaaggaagctgaacacgcgtccagtccacctgcacctcttcaatgactgtctgctgctgtctcggccccgagagggtagccgattcctggtatttgaccatgctcccttctcctccattcggggggaaaagtgtgaaatgaagctacatggacctcacaaaaacctgttccgactctttctgcggcagaacactcagggcgcccaggccgagttcctcttccgcacggagactcaaagtgaaaagcttcggtggatctcagccttggccatgccaagagaggagttggaccttctggagtgttacaactccccccaggtacagtgccttcgagcctacaagccccgagagaatgatgaattggcactggagaaagccgacgtggtgatggtgactcagcagagcagtgacggctggctggagggcgtgaggctctcagacggggagcgaggctggtttcctgtgcagcaggtggagttcatttccaacccagaggtccgtgcacagaacctgaaggaagctcatcgagtcaagactgccaaactacagctggtggaacagcaagcctaagtcttctctgagaggagtttcgtgagctgaagaacaagctgctcatggcaagggctggccccagaaccctgcaagagaggccttctgtggatggagaactaggccttctcaaagctcaaggacaaaatccagctaacccagtccctcggcccaggcctcctttcgtgctttgtgcttggtgggggggatttcgagggactttgcactggactctgggaacctttcatcattaaaaaaagggggaccattggggcctgagccaaggaactttccttctactgccttatagtgcttaaacattctccgcctccagggtgcagattcagagctggccagagtttcagtgatagccgtatgttaaacagaatctcacctcagtctcctggagggagatgtttaagaggggttaacacatcagatgggagggtcagcccggtgacctctaaggtatcttctaacctagaaattcaccataattatggtgcaaggtcagtgtgtctctgagatctatgtctgttggtggcaatgtgagggtgatactctctcactctaataaacttggcacttctccgagta

SEQ ID NO: 156035 - DNA, 2968 bp, Artificial Sequence
  derived and/or modified sequence
gtgtagtggttcccacgctgaagcagcatagccaccctcctccattggccctaggttcagggctgcatgccccccataaaggcccacttccccaagcctctgaccccgctgtggccaggcagcaccgacctctgccatctaccccagacagctcccaccatgctcaggccacccccaggtggagatacaacaagccgctaccccctacccctgatttgccgcagccccaccttcctcccatttctgctcctggtagctcaaggatctacaggcctctacccccactacccatcatagaccctcccaccgaaccacccccattgcccccaaagtccagggggaggagcaggagcactcggggaggacatatgaactcagggggtcatgccaaaacaagacctgcttgtcaagactggacagtccccctccctgcctctgctggacgcacctcctggcccccggccacagctagatcaacagagtctttcacttccaccagcaggagtaagagcgaagtgtcccctggcatggctttcagcaacatgacaaacttcctatgcccctcttcccctaccactccctggactccggagctccagggacccacctctaaggatgaagcaggggtctcagaacaccctgaggcccctgcgagagaacctttgagaaggacaacccctcagcaaggagccagtggcccagggaggtcacctgtgggccaagcaaggcagccagaaaaacccagccatctgcacctggagaaggcgtccagctggccccacaggcgggactcagggaggccaccaggggacagcagtggacaggctgtggctcctagtgagggggccaacaagcacaagggctggagccggcagggcctgcgcagaccttccatcttgcctgagggctcttcagattcaagaggtccagccgtggagaaacatccgggaccctcagacactgttgtttttcgggagaaaaaaccaaaggaggtgatgggaggcttttcaagacgctgctccaaactcatcaactcctcccagctgctttaccaggagtatagtgatgttgtcctgaataaggagatccagagccagcagcggctggagagcctgtccgagacacccgggcctagctctccgcggcagcctcggaaggccctggtctcctccgagtcgtacctgcagcggctctccatggcctccagcggctccctctggcaggaaatccccgtggtgcgcaacagcaccgtgctgctctccatgacccatgaagaccaaaagctgcaagaggtcaaatttgagctgattgtgtcagaggcctcctacctgcgcagtctaaacatagctgtggatcatttccaactttcaacttcactccgggccacactttccaaccaggagcaccaatggctcttctctcgtttacaggatgtgcgagacgtcagcgccacgttcctttcagacctggaagagaactttgagaacaatatcttctccttccaagtatgtgacgtagtcctgaaccacgccccagacttccgccgggtctacctgccttatgtcaccaaccagacctatcaggaacgcaccttccagagcctgatgaatagcaacagcaatttccgggaggtcttggagaagctggagagcgaccccgtctgccagcgcctttccctcaagtcctttctgattctgcccttccaacgcatcacccgcctcaaactgctgctccagaacattctgaagagaacacagcctggctcctcggaggaggcagaggccacgaaggcacaccacgccctggagcagctgatccgggactgcaataacaatgtccagagtatgcgacggacagaggaactaatctacctgagccagaagattgagtttgagtgcaaaatattcccgctcatttctcagtcacgctggctggtgaaaagtggggagctgacagccttggagttcagtgcttccccagggctacgaaggaagctgaacacgcgtccagtccacctgcacctcttcaatgactgtctgctgctgtctcggccccgagaaagtgaaaagcttcggtggatctcagccttggccatgccaagagaggagttggaccttctggagtgttacaactccccccaggtacagtgccttcgagcctacaagccccgagagaatgatgaattggcactggagaaagccgacgtggtgatggtgactcagcagagcagtgacggctggctggagggcgtgaggctctcagacggggagcgaggctggtttcctgtgcagcaggtggagttcatttccaacccagaggtccgtgcacagaacctgaaggaagctcatcgagtcaagactgccaaactacagctggtggaacagcaagcctaagtcttctctgagaggagtttcgtgagctgaagaacaagctgctcatggcaagggctggccccagaaccctgcaagagaggccttctgtggatggagaactaggccttctcaaagctcaaggacaaaatccagctaacccagtccctcggcccaggcctcctttcgtgctttgtgcttggtgggggggatttcgagggactttgcactggactctgggaacctttcatcattaaaaaaagggggaccattggggcctgagccaaggaactttccttctactgccttatagtgcttaaacattctccgcctccagggtgcagattcagagctggccagagtttcagtgatagccgtatgttaaacagaatctcacctcagtctcctggagggagatgtttaagaggggttaacacatcagatgggagggtcagcccggtgacctctaaggtatcttctaacctagaaattcaccataattatggtgcaaggtcagtgtgtctctgagatctatgtctgttggtggcaatgtgagggtgatactctctcactctaataaacttggcacttctccgagt

SEQ ID NO: 156036 - DNA, 4794 bp, Artificial Sequence
  derived and/or modified sequence
atggaggccgaggaggcccagagaggcgccagcccccccatcagcgccatcgaggagttcagcatcatccccgaggcccccatgagaagcagccaggtgagcgccctgggcctggaggcccaggaggacgaggaccccagctacaagtggagagaggagcacagactgagcgccacccagcagagcgagctgagagacgtgtgcgactacgccatcgagaccatgcccagcttccccaaggagggcagcgccgacgtggagcccaaccaggagagcctggtggccgaggcctgcgacacccccgagcactgggaggccgtgccccagagcctggccggcagacaggccagaaccctggccccccccgagctgtgggcctgccccatccagagcgagcacctggacatggcccccttcagcagcgacctgggcagcgaggaggaggaggtggagttctggcccggcctgaccagcctgaccctgggcagcggccaggccgaggaggaggaggagaccagcagcgacaacagcggccagaccagatactacagcccctgcgaggagcaccccgccgagaccaaccagaacgagggcagcgagagcggcaccatcagacagggcgaggagctgccccccgaggagctgcaggagagccagggcctgctgcacccccaggaggtgcaggtgctggaggagcagggccagcaggaggccggcttcagaggcgagggcaccctgagagaggacgtgtgcgccgacggcctgctgggcgaggagcagatgatcgagcaggtgaacgacgagaagggcgagcagaagcagaagcaggagcaggtgcaggacgtgatgctgggcagacagggcgagagaatgggcctgaccggcgagcccgagggcctgaacgacggcgagtgggagcaggaggacatggagagaaaggcccagggccagggcggccccgagcagggcgaggagagaaagagagagctgcaggtgcccgaggagaacagagccgacagccaggacgagaagagccagaccttcctgggcaagagcgaggaggtgaccggcaagcaggaggaccacggcatcaaggagaagggcgtgcccgtgagcggccaggaggccaaggagcccgagagctgggacggcggcagactgggcgccgtgggcagagccagaagcagagaggaggagaacgagcaccacggccccagcatgcccgccctgatcgcccccgaggacagcccccactgcgacctgttccccggcgccagctacctgatgacccagatccccggcacccagaccgagagcagagccgaggagctgagccccgccgccctgagccccagcctggagcccatcagatgcagccaccagcccatcagcctgctgggcagcttcctgaccgaggagagccccgacaaggagatcgaccagaacagccagcaggaggagagcagactgagaaagggcaccgtgagcagccagggcaccgaggtggtgttcgccagcgccagcgtgaccccccccagaacccccgacagcgccccccccagccccgccgaggcctaccccatcacccccgccagcgtgagcgccagaccccccgtggccttccccagaagagagaccagctgcgccgccagagcccccgagaccgccagcgcccccctgagcatggacgaccccagcccctgcggcaccagcgagatgtgccccgccgccctgtacggcttccccagcaccggcaccagcccccccagaccccccgccaacagcaccggcaccgtgcagcacctgagaagcgacagcttccccggcagccacagaaccgagcagacccccgacctggtgggcatgctgctgagctacagccacagcgagctgccccagagaccccccaagcccgccatctacagcagcgtgacccccagaagagacagaagaagcggcagagactacagcaccgtgagcgccagccccaccgccctgagcaccctgaagcaggacagccaggagagcatcagcaacctggagagacccagcagcccccccagcatccagccctgggtgagcccccacaaccccgccttcgccaccgagagccccgcctacggcagcagccccagcttcgtgagcatggaggacgtgagaatccacgagcccctgccccccccccccccccagagaagagacacccaccccagcgtggtggagaccgacggccacgccagagtggtggtgcccaccctgaagcagcacagccaccccccccccctggccctgggcagcggcctgcacgccccccacaagggccccctgccccaggccagcgaccccgccgtggccagacagcacagacccctgcccagcacccccgacagcagccaccacgcccaggccacccccagatggagatacaacaagcccctgccccccacccccgacctgccccagccccacctgccccccatcagcgcccccggcagcagcagaatctacagacccctgccccccctgcccatcatcgacccccccaccgagcccccccccctgccccccaagagcagaggcagaagcagaagcaccagaggcggccacatgaacagcggcggccacgccaagaccagacccgcctgccaggactggaccgtgcccctgcccgccagcgccggcagaaccagctggccccccgccaccgccagaagcaccgagagcttcaccagcaccagcagaagcaagagcgaggtgagccccggcatggccttcagcaacatgaccaacttcctgtgccccagcagccccaccaccccctggacccccgagctgcagggccccaccagcaaggacgaggccggcgtgagcgagcaccccgaggcccccgccagagagcccctgagaagaaccaccccccagcagggcgccagcggccccggcagaagccccgtgggccaggccagacagcccgagaagcccagccacctgcacctggagaaggccagcagctggccccacagaagagacagcggcagaccccccggcgacagcagcggccaggccgtggcccccagcgagggcgccaacaagcacaagggctggagcagacagggcctgagaagacccagcatcctgcccgagggcagcagcgacagcagaggccccgccgtggagaagcaccccggccccagcgacaccgtggtgttcagagagaagaagcccaaggaggtgatgggcggcttcagcagaagatgcagcaagctgatcaacagcagccagctgctgtaccaggagtacagcgacgtggtgctgaacaaggagatccagagccagcagagactggagagcctgagcgagacccccggccccagcagccccagacagcccagaaaggccctggtgagcagcgagagctacctgcagagactgagcatggccagcagcggcagcctgtggcaggagatccccgtggtgagaaacagcaccgtgctgctgagcatgacccacgaggaccagaagctgcaggaggtgaagttcgagctgatcgtgagcgaggccagctacctgagaagcctgaacatcgccgtggaccacttccagctgagcaccagcctgagagccaccctgagcaaccaggagcaccagtggctgttcagcagactgcaggacgtgagagacgtgagcgccaccttcctgagcgacctggaggagaacttcgagaacaacatcttcagcttccaggtgtgcgacgtggtgctgaaccacgcccccgacttcagaagagtgtacctgccctacgtgaccaaccagacctaccaggagagaaccttccagagcctgatgaacagcaacagcaacttcagagaggtgctggagaagctggagagcgaccccgtgtgccagagactgagcctgaagagcttcctgatcctgcccttccagagaatcaccagactgaagctgctgctgcagaacatcctgaagagaacccagcccggcagcagcgaggaggccgaggccaccaaggcccaccacgccctggagcagctgatcagagactgcaacaacaacgtgcagagcatgagaagaaccgaggagctgatctacctgagccagaagatcgagttcgagtgcaagatcttccccctgatcagccagagcagatggctggtgaagagcggcgagctgaccgccctggagttcagcgccagccccggcctgagaagaaagctgaacaccagacccgtgcacctgcacctgttcaacgactgcctgctgctgagcagacccagagagggcagcagattcctggtgttcgaccacgcccccttcagcagcatcagaggcgagaagtgcgagatgaagctgcacggcccccacaagaacctgttcagactgttcctgagacagaacacccagggcgcccaggccgagttcctgttcagaaccgagacccagagcgagaagctgagatggatcagcgccctggccatgcccagagaggagctggacctgctggagtgctacaacagcccccaggtgcagtgcctgagagcctacaagcccagagagaacgacgagctggccctggagaaggccgacgtggtgatggtgacccagcagagcagcgacggctggctggagggcgtgagactgagcgacggcgagagaggctggttccccgtgcagcaggtggagttcatcagcaaccccgaggtgagagcccagaacctgaaggaggcccacagagtgaagaccgccaagctgcagctggtggagcagcaggcctag

SEQ ID NO: 156037 - DNA, 1197 bp, Artificial Sequence
  derived and/or modified sequence
atggccagcagcggcagcctgtggcaggagatccccgtggtgagaaacagcaccgtgctgctgagcatgacccacgaggaccagaagctgcaggaggtgaagttcgagctgatcgtgagcgaggccagctacctgagaagcctgaacatcgccgtggaccacttccagctgagcaccagcctgagagccaccctgagcaaccaggagcaccagtggctgttcagcagactgcaggacgtgagagacgtgagcgccaccttcctgagcgacctggaggagaacttcgagaacaacatcttcagcttccaggtgtgcgacgtggtgctgaaccacgcccccgacttcagaagagtgtacctgccctacgtgaccaaccagacctaccaggagagaaccttccagagcctgatgaacagcaacagcaacttcagagaggtgctggagaagctggagagcgaccccgtgtgccagagactgagcctgaagagcttcctgatcctgcccttccagagaatcaccagactgaagctgctgctgcagaacatcctgaagagaacccagcccggcagcagcgaggaggccgaggccaccaaggcccaccacgccctggagcagctgatcagagactgcaacaacaacgtgcagagcatgagaagaaccgaggagctgatctacctgagccagaagatcgagttcgagtgcaagatcttccccctgatcagccagagcagatggctggtgaagagcggcgagctgaccgccctggagttcagcgccagccccggcctgagaagaaagctgaacaccagacccgtgcacctgcacctgttcaacgactgcctgctgctgagcagacccagagagagcgagaagctgagatggatcagcgccctggccatgcccagagaggagctggacctgctggagtgctacaacagcccccaggtgcagtgcctgagagcctacaagcccagagagaacgacgagctggccctggagaaggccgacgtggtgatggtgacccagcagagcagcgacggctggctggagggcgtgagactgagcgacggcgagagaggctggttccccgtgcagcaggtggagttcatcagcaaccccgaggtgagagcccagaacctgaaggaggcccacagagtgaagaccgccaagctgcagctggtggagcagcaggcctag

SEQ ID NO: 156038 - DNA, 1560 bp, Artificial Sequence
  derived and/or modified sequence
atgggcggcttcagcagaagatgcagcaagctgatcaacagcagccagctgctgtaccaggagtacagcgacgtggtgctgaacaaggagatccagagccagcagagactggagagcctgagcgagacccccggccccagcagccccagacagcccagaaaggccctggtgagcagcgagagctacctgcagagactgagcatggccagcagcggcagcctgtggcaggagatccccgtggtgagaaacagcaccgtgctgctgagcatgacccacgaggaccagaagctgcaggaggtgaagttcgagctgatcgtgagcgaggccagctacctgagaagcctgaacatcgccgtggaccacttccagctgagcaccagcctgagagccaccctgagcaaccaggagcaccagtggctgttcagcagactgcaggacgtgagagacgtgagcgccaccttcctgagcgacctggaggagaacttcgagaacaacatcttcagcttccaggtgtgcgacgtggtgctgaaccacgcccccgacttcagaagagtgtacctgccctacgtgaccaaccagacctaccaggagagaaccttccagagcctgatgaacagcaacagcaacttcagagaggtgctggagaagctggagagcgaccccgtgtgccagagactgagcctgaagagcttcctgatcctgcccttccagagaatcaccagactgaagctgctgctgcagaacatcctgaagagaacccagcccggcagcagcgaggaggccgaggccaccaaggcccaccacgccctggagcagctgatcagagactgcaacaacaacgtgcagagcatgagaagaaccgaggagctgatctacctgagccagaagatcgagttcgagtgcaagatcttccccctgatcagccagagcagatggctggtgaagagcggcgagctgaccgccctggagttcagcgccagccccggcctgagaagaaagctgaacaccagacccgtgcacctgcacctgttcaacgactgcctgctgctgagcagacccagagagggcagcagattcctggtgttcgaccacgcccccttcagcagcatcagaggcgagaagtgcgagatgaagctgcacggcccccacaagaacctgttcagactgttcctgagacagaacacccagggcgcccaggccgagttcctgttcagaaccgagacccagagcgagaagctgagatggatcagcgccctggccatgcccagagaggagctggacctgctggagtgctacaacagcccccaggtgcagtgcctgagagcctacaagcccagagagaacgacgagctggccctggagaaggccgacgtggtgatggtgacccagcagagcagcgacggctggctggagggcgtgagactgagcgacggcgagagaggctggttccccgtgcagcaggtggagttcatcagcaaccccgaggtgagagcccagaacctgaaggaggcccacagagtgaagaccgccaagctgcagctggtggagcagcaggcctag

SEQ ID NO: 156039 - DNA, 2394 bp, Artificial Sequence
  derived and/or modified sequence
tgagtggtggtgcccaccctgaagcagcacagccaccccccccccctggccctgggcagcggcctgcacgccccccacaagggccccctgccccaggccagcgaccccgccgtggccagacagcacagacccctgcccagcacccccgacagcagccaccacgcccaggccacccccagatggagatacaacaagcccctgccccccacccccgacctgccccagccccacctgccccccatcagcgcccccggcagcagcagaatctacagacccctgccccccctgcccatcatcgacccccccaccgagcccccccccctgccccccaagagcagaggcagaagcagaagcaccagaggcggccacatgaacagcggcggccacgccaagaccagacccgcctgccaggactggaccgtgcccctgcccgccagcgccggcagaaccagctggccccccgccaccgccagaagcaccgagagcttcaccagcaccagcagaagcaagagcgaggtgagccccggcatggccttcagcaacatgaccaacttcctgtgccccagcagccccaccaccccctggacccccgagctgcagggccccaccagcaaggacgaggccggcgtgagcgagcaccccgaggcccccgccagagagcccctgagaagaaccaccccccagcagggcgccagcggccccggcagaagccccgtgggccaggccagacagcccgagaagcccagccacctgcacctggagaaggccagcagctggccccacagaagagacagcggcagaccccccggcgacagcagcggccaggccgtggcccccagcgagggcgccaacaagcacaagggctggagcagacagggcctgagaagacccagcatcctgcccgagggcagcagcgacagcagaggccccgccgtggagaagcaccccggccccagcgacaccgtggtgttcagagagaagaagcccaaggaggtgatgggcggcttcagcagaagatgcagcaagctgatcaacagcagccagctgctgtaccaggagtacagcgacgtggtgctgaacaaggagatccagagccagcagagactggagagcctgagcgagacccccggccccagcagccccagacagcccagaaaggccctggtgagcagcgagagctacctgcagagactgagcatggccagcagcggcagcctgtggcaggagatccccgtggtgagaaacagcaccgtgctgctgagcatgacccacgaggaccagaagctgcaggaggtgaagttcgagctgatcgtgagcgaggccagctacctgagaagcctgaacatcgccgtggaccacttccagctgagcaccagcctgagagccaccctgagcaaccaggagcaccagtggctgttcagcagactgcaggacgtgagagacgtgagcgccaccttcctgagcgacctggaggagaacttcgagaacaacatcttcagcttccaggtgtgcgacgtggtgctgaaccacgcccccgacttcagaagagtgtacctgccctacgtgaccaaccagacctaccaggagagaaccttccagagcctgatgaacagcaacagcaacttcagagaggtgctggagaagctggagagcgaccccgtgtgccagagactgagcctgaagagcttcctgatcctgcccttccagagaatcaccagactgaagctgctgctgcagaacatcctgaagagaacccagcccggcagcagcgaggaggccgaggccaccaaggcccaccacgccctggagcagctgatcagagactgcaacaacaacgtgcagagcatgagaagaaccgaggagctgatctacctgagccagaagatcgagttcgagtgcaagatcttccccctgatcagccagagcagatggctggtgaagagcggcgagctgaccgccctggagttcagcgccagccccggcctgagaagaaagctgaacaccagacccgtgcacctgcacctgttcaacgactgcctgctgctgagcagacccagagagagcgagaagctgagatggatcagcgccctggccatgcccagagaggagctggacctgctggagtgctacaacagcccccaggtgcagtgcctgagagcctacaagcccagagagaacgacgagctggccctggagaaggccgacgtggtgatggtgacccagcagagcagcgacggctggctggagggcgtgagactgagcgacggcgagagaggctggttccccgtgcagcaggtggagttcatcagcaaccccgaggtgagagcccagaacctgaaggaggcccacagagtgaagaccgccaagctgcagctggtggagcagcaggcctag

SEQ ID NO: 156040 - protein, 474 aa, Artificial Sequence
  derived and/or modified sequence
MADSASESDTDGAGGNSSSSAAMQSSCSSTSGGGGGGGGGGGGGKSGGIVISPFRLEELTNRLASLQQENKVLKIELETYKLKCKALQEENRDLRKASVTIQARAEQEEEFISNTLFKKIQALQKEKETLAVNYEKEEEFLTNELSRKLMQLQHEKAELEQHLEQEQEFQVNKLMKKIKKLENDTISKQLTLEQLRREKIDLENTLEQEQEALVNRLWKRMDKLEAEKRILQEKLDQPVSAPPSPRDISMEIDSPENMMRHIRFLKNEVERLKKQLRAAQLQHSEKMAQYLEEERHMREENLRLQRKLQREMERREALCRQLSESESSLEMDDERYFNEMSAQGLRPRTVSSPIPYTPSPSSSRPISPGLSYASHTVGFTPPTSLTRAGMSYYNSPGLHVQHMGTSHGITRPSPRRSNSPDKFKRPTPPPSPNTQTPVQPPPPPPPPPMQPTVPSAATSQPTPSQHSAHPSSQP

SEQ ID NO: 156041 - DNA, 1425 bp, Artificial Sequence
  derived and/or modified sequence
atggcggacagtgccagtgaaagcgatactgatggcgccggcggcaacagctcaagctccgctgcaatgcaatcatcctgttcctcaacctccggaggaggcgggggcggcggcggtggcggcgggggggggaagtctggtggcattgttatcagcccattccgtctagaagagttgacaaacagactcgcaagcctccaacaggaaaacaaagtgctcaagatcgagcttgaaacttataagctgaagtgtaaggctcttcaggaagagaatcgggacttgcgcaaagctagtgtgaccatccaggctcgggccgagcaagaagaggagtttatctccaatacactgtttaagaagatccaggctctgcagaaggaaaaggagaccttagcagtgaattacgagaaggaagaggagttcctgaccaatgagttatcacgcaagctgatgcagctgcaacatgagaaggctgaactggagcaacatctggagcaggaacaggaatttcaagtgaataaactgatgaaaaaaattaaaaaactcgagaatgacaccatctctaaacagcttactctcgagcagctcagaagagaaaaaattgatctggagaacacccttgaacaggaacaagaggcgttggtcaatcgcctgtggaaacgtatggataagctcgaggccgaaaagcggatactgcaagagaaactagaccaacctgtgagtgcacccccttctccacgagatatttctatggagatcgacagtcctgaaaatatgatgcggcatattcgcttccttaagaacgaagtcgagcgtctgaaaaagcaacttagggctgcccagctgcagcattcagagaagatggctcagtatctcgaagaggagcgtcacatgcgcgaggagaatctgcggctgcaaaggaaacttcaacgggagatggagcggcgcgaagccttatgcaggcagctgagtgagagcgagagttcgctggagatggatgacgagagatattttaacgaaatgtccgcccagggactgaggccccggacggtctctagtcccatcccttataccccttccccaagttcctcacgcccaatcagccctggcctttcctatgcctctcacaccgtgggctttactcctcctacctctttaaccagggctggcatgtcttattataacagccccggccttcatgtccagcacatgggcacatctcacggcattactaggcctagtccccggcgttcgaactcgcccgataagttcaagagacctacacctccccccagtcccaatactcaaaccccggtgcagccgccccctccgcccccacctccacccatgcagccaaccgtgccctccgcggccacctcccaaccaacaccttcccagcatagcgcacacccgagttctcagccctag

SEQ ID NO: 156042 - DNA, 1425 bp, Artificial Sequence
  derived and/or modified sequence
atggctgacagcgccagcgagagtgacacagatggagctgggggcaacagcagcagcagcgctgccatgcagagcagctgcagcagcaccagcggcggcggcggcggcggcggcggcggcggcggcggcggcaagagcggcggcatcgtcatcagccccttccggctggaggagctgaccaaccggctggccagcctgcagcaggagaacaaggtgctgaagattgagctggagacctacaagctgaagtgcaaggccctgcaggaggagaacagagacctgaggaaggcctctgtgaccatccaggcccgggcagagcaggaggaggagttcatcagcaacaccctcttcaagaagatccaggccctgcagaaggagaaggagaccctggccgtgaactatgagaaggaggaggagttcctgaccaatgagctgagcaggaagctgatgcagctgcagcacgagaaggccgagctggagcagcacctggagcaggagcaggagttccaggtgaacaagctgatgaagaagatcaagaagctggagaatgacaccatcagcaagcagctgaccctggagcagctgcggcgggagaagattgacctggagaacaccctggagcaggagcaggaggccctggtgaaccggctgtggaagaggatggacaagctggaggccgagaagaggatcctgcaggagaagctggaccagcctgtgtctgccccacccagcccccgggacatctccatggagattgacagccctgagaacatgatgaggcacatccgcttcctgaagaatgaggtggagcggctgaagaagcagctgcgggccgcccagctgcagcacagcgagaagatggcccagtacctggaggaggagcggcacatgagggaggagaacctgcggctgcagaggaagctgcagcgggagatggagcggcgggaggccctgtgccggcagctgtctgagagcgagagcagcctggagatggatgatgagcgctacttcaatgagatgtctgcccagggcctgcggcccaggacagtgagcagccccatcccctacacccccagccccagcagcagccggcccatcagccctggcctgtcctatgccagccacacagtgggcttcaccccacccaccagcctgacccgggccggcatgagctactacaacagccctggcctgcacgtgcagcacatgggcaccagccacggcatcacccggcccagccccaggaggagcaacagcccagacaagttcaagaggcccaccccaccacccagccccaacacccagacccctgtgcagcccccacctcctcctcctcctccacccatgcagcccaccgtgcccagcgctgccaccagccagcccacccccagccagcacagcgcccaccccagcagccagccctag

SEQ ID NO: 156043 - DNA, 1425 bp, Artificial Sequence
  derived and/or modified sequence
atggccgacagcgccagcgagagcgacaccgacggcgccggcggcaacagctcctcttctgccgccatgcagtcgtcatgtagttcaacaagtggaggcggaggaggagggggaggaggggggggaggtggtaaaagcgggggcatagtgatctctccctttcgcctagaggaactcactaaccgactagcgagcctgcagcaagagaacaaagtcctcaaaatcgaactagaaacctataaattgaagtgtaaagcccttcaagaggagaatcgcgatttgcggaaggccagtgtgaccatccaagcgagagcggagcaagaggaagaattcattagcaataccctgtttaagaagatccaagcactgcagaaagaaaaagagactctcgccgtcaactatgagaaagaagaggaattcttaacaaacgagctgtccaggaagttgatgcagctgcagcacgaaaaggctgagctggaacagcatctcgagcaggagcaagagtttcaggtcaataagcttatgaagaaaattaagaaactcgaaaatgacacaatcagtaagcaacttaccctcgaacaattgcgaagagagaagattgatttggaaaacaccctggaacaagagcaggaggctctggtgaaccgtctgtggaagcgaatggacaagcttgaagctgagaaaaggattttgcaagaaaagttggaccaaccagtgtcggctcctccatcccctcgggacataagtatggaaattgattcacctgagaatatgatgagacacatcagattcctcaaaaatgaagtggaaaggctgaaaaagcagctccgagctgctcagttacagcattctgagaagatggcccagtatttggaggaggagaggcatatgcgagaagagaacctgcggctgcagcgcaaacttcagcgcgaaatggagagaagggaggctctgtgccgccagctcagcgaaagcgaaagcagcctggagatggacgatgaaagatatttcaacgagatgtctgcccaggggctgcggcccagaacagtttcgtcccccatcccttatacaccatcgccaagtagctccagaccaatttctcccggtctgtcttacgcaagtcatacggtgggattcacaccacctacttctctgacacgggcaggaatgtcctactataacagccctgggctccacgttcagcatatggggacctcccacgggatcacacgcccctctccccgcaggtccaacagcccagacaagttcaagcgacctacccctcctccatctccgaacacccagaccccagtgcagcctccaccacctccacccccgcctccaatgcagcccaccgtgccttctgcggcaaccagtcagcccaccccatcccagcatagtgctcacccttcgtctcaaccttag

SEQ ID NO: 156044 - DNA, 1425 bp, Artificial Sequence
  derived and/or modified sequence
atggcagattcggcatcagaatctgacacagacggcgctgggggtaattccagcagttccgcggcaatgcagagtagttgtagctccacatccggcggaggaggcggagggggtggaggtggtggcggtggcaaaagtggcggtattgtgatctccccttttagactggaggagctgacgaaccggctggcatctttgcaacaagagaataaagtccttaaaatagaactggagacatataaactgaaatgcaaagcattacaggaggaaaatagggatttgcgcaaggcatcagttaccatccaagccagggccgaacaagaggaggagtttatatctaataccttgtttaagaaaatccaggctctgcaaaaagaaaaagagacactggccgtcaattatgagaaggaggaggagttcctgaccaacgaactgagtaggaagcttatgcagcttcaacatgagaaggctgaacttgagcagcacctcgagcaagagcaggaatttcaggttaacaagctgatgaagaaaatcaaaaaactcgaaaatgatacaatttctaagcagctgactctggaacagctgcgaagggaaaagattgatctggagaacacacttgagcaagaacaagaggccctggtgaaccgtctatggaaacgaatggacaaacttgaggctgagaaacgtattctccaggagaaactcgatcagccagtgagtgcccctcctagtccgagggatattagcatggagatcgattcgcccgaaaatatgatgcggcatattcggtttcttaagaatgaggtggaacgtctgaagaagcaactgagggcggcacaactgcagcactcagaaaagatggcacagtaccttgaggaggagcgccacatgcgggaagaaaatctaagactgcagcggaaactgcagcgcgaaatggaaagaagagaggctctctgccgacagctctcagaatcagagtcctctcttgagatggacgacgaacggtacttcaacgaaatgtctgcccaagggctgcgccctcgcaccgtgtcctcaccaatcccctacacaccgtctccctcatcaagccgaccaatcagtccaggcctcagctatgccagccacactgtggggttcaccccgcctacctcattaacacgagccggtatgtcatactacaacagtccaggcttgcatgtgcagcacatggggacctcacacgggatcaccaggccttcgcctcgacgttccaactcaccagacaagttcaaaagaccaacccctccccctagtcctaacacgcagacacccgtgcagcctcccccaccacctccccctccacccatgcaaccgacggtacccagcgccgctacctctcagccgactccttcacaacactctgcacacccatctagccagccctag

SEQ ID NO: 156045 - DNA, 5811 bp, Artificial Sequence
  derived and/or modified sequence
agtgcaatactgcccaagcccgggcggggtctctgttctctggcagaggaggtcccttggcagcgggaagcgccctctctttctctcgccgccgctccgagtctgcgccctggtgccaggcgctcagctcggcgctcccctgtgctcgcccggcgcccactcattcgcagcccggccttcgtcgccgccgcctccctgctgctcctcctcctttccccagcccgccgcggccatggcggacagcgccagcgagagcgacacggacggggcggggggcaacagcagcagctcggccgccatgcagtcgtcctgctcgtcgacctcgggcggcggcggtggcggcgggggaggcggcggcggtgggaagtcggggggcattgtcatctcgccgttccgcctggaggagctcaccaaccgcctggcctcgctgcagcaagagaacaaggtgctgaagatagagctggagacctacaaactgaagtgcaaggcactgcaggaggagaaccgcgacctgcgcaaagccagcgtgaccatccaagccagggctgagcaggaagaagaattcattagtaacactttattcaagaaaattcaggctttgcagaaggagaaagaaacccttgctgtaaattatgagaaagaagaagaattcctcactaatgagctctccagaaaattgatgcagttgcagcatgagaaagccgaactagaacagcatcttgaacaagagcaggaatttcaggtcaacaaactgatgaagaaaattaaaaaactggagaatgacaccatttctaagcaacttacattagaacagttgagacgggagaagattgaccttgaaaatacattggaacaagaacaagaagcactagttaatcgcctctggaaaaggatggataagcttgaagctgaaaagcgaatcctgcaggaaaaattagaccagcccgtctctgctccaccatcgcctagagatatctccatggagattgattctccagaaaatatgatgcgtcacatcaggtttttaaagaatgaagtggaacggctgaagaagcaactgagagctgctcagttacagcattcagagaaaatggcacagtatctggaggaggaacgtcacatgagagaagagaacttgaggctccagaggaagctgcagagggagatggagagaagagaagccctctgtcgacagctctccgagagtgagtccagcttagaaatggacgacgaaaggtattttaatgagatgtctgcacaaggattaagacctcgcactgtgtccagcccgatcccttacacaccttctccgagttcaagcaggcctatatcacctggtctatcatatgcaagtcacacggttggtttcacgccaccaacttcactgactagagctggaatgtcttattacaattccccgggtcttcacgtgcagcacatgggaacatcccatggtatcacaaggccttcaccacggagaagcaacagtcctgacaaattcaaacggcccacgccgcctccatctcccaacacacagaccccagtccagccacctccgcctccacctccgccacccatgcagcccacggtcccctcagcagccacctcgcagcctactccttcgcaacattcggcgcacccctcctcccagccttaatgcatgagcttagtctgaatttcaagttgggactcatccaatggagccgtctactcaacgccaaaggcttccttctctggcatatttggatatgacttatttgcactgaggttatctaggcttcactatccattgtgttgtaaatgtttgtcagaaatgcagccagtgttgtgggtctacaacactaaccagacgactttttccatcagtgttttacttgaatcttcatgtacgtccattccctggctggaaccttcgctgtttggtatttggtatttcagcagcagtgtgcaatttttgcttggcccagagcttcattctcctggcttttaggtttgtaaaagaaaaagggatatcttttttatatttttttccatgaatctgcagaaaattactgagctgttgttaccctcctctcattataatagtgtttaccaaacataccaataattcagcactacaattcagacctttgaaaatctggctttcagtgtagaacagaaagttagatgaatcagtgcccaagacatattttctgtttaacagaactttctacagatacattttttacaggttattttcattgtgttattgacatccatgtctctcgtaaaacagatggcccaaagtaatgaatcatgtggctgtaccttctccacataaatgggatggataattatcgtatattaagatgtgattctcttttttatccttaatgttaatctacttaacctggccccctctaacatgagtcgataaatgttgtcctactcaccggtggtttcaatggctaattagaatgtgttatttgatttctgctgcagaaggcagtgtgattgtaacaaaaacaatgcggcttccccctttcgtacttcatttgtgttctcttaaaatagagtttgaacaaatattttaaaggtgcaaaataccattagaaaatactatttgaaatggacattatcgcattatcttggcataatggccagaaaatattgtattgcttggcagaaaagaaaataaggtctaaaggaaagtagcacattagcattgatggctgttcatttcacccagtataagcaagtgcagtgtacaaagaagtatattctgaatacattatttccattcatttagcacaaataaatcatttggtttcactttgcagtggaacactgagtcactcttttcttaacacgtgcaacatcttaatttttgtttttcagcagttgctgttttgtactttggtagtaaagtgatttttaccacctgtgtttgcatatttatatatgctgtggatgaaaataacttactagagaatgtatattttatgacaagaatgtgtatctgttggatataatcagagaactgaaaagtaatttatcagtaatttttaagagtccatgttttgtgacaaccatctctaatagccaactctttattaaacacactcctaaaaataaggaaccatgacattgtagatatttaatattgtacagtatagaaacctccatttttgccttcgaatgcatatttaagagttaacagaatgaaaaaaaaaagtcttgttggataatagtgtttgactagcgttttaagaacttgagagtaaaagcaacaataagattttttcacctcttcctgcttccacccccaaactgagaacatcactcaattgtttggaagaaactgtaggtctatataaattttatttataatgtatgtgtaatatacataatcataatacagttctcagatgcagggaagaagtttggcatttaatcattgaggctttaggtttttgatgtgatcagactgggccatgtcaaacccggaattttcaccaacagttcactcaccctcctggtacattgccattccaaggaattctgagagtaggcaaacaaattttgccttcatggtacagttctcagtttttcttataggagaaatatggtatatgtttataagaatcttttatgagattatagatttcaatgctgtggatagtgtcttgcacccaaacaagaaagtccataatggaatgatcttccctcagcttcctatcgatttagttacctcttgaaagcacaaaaattaaaacattgccatatgttgaatttttaaaaagcacttggagtgagcgaacatttcctgataaatgccttttagagataggttcttgatattcagacatctgcagaaatgttctggttcccaaagtcatttcacttcgaaataaaacacagctccttcaaacagcactttttccacataaatctagttgcctctccctgtggacattcagaactgatagaacaaacactactcttttgaatttgatggttcgtgtcctttaaagtgtttgaggacctatgcagagcctgtaacacttgggtagtacctgctaggacaatttcttggcaattgtcttactactagggatcagtaagatttagattctgagcccataatggcaacagccccctcacctatgggaagctgacttccctcagtcgggcacttctcatgggggctgaacatggttcctgccattctgttacccactctcccaggtgagccctggattggctcccagaaggcctttgtaaaatcagtagccgtcctgcaggcaggtgggagcaacaggggcttcagtagcttcattttcctgtcttgcagacagagacccttggctaccactgtgctgctaataggataagtactctgttgccagattaccatgccttttatacaaaaccaaattaacttacctaatacctgacacctctttgggctctgaactgctttctctcatcaagcatgctagcactctagacagaattctagaaatttggcagatagtggaagcctttaattgaacttactccttcgttgactgaaaggagttttaaattctgagctcctgagatactgactagcaaccatggaatgaatgtgtgaccagaaagtggctttgacaccaagtgctactgtccctttgtaattggcttctaacagaattcaaccagaaataattgataatgtgaatttttgttaattgttcacttgtaggaaaatagaacatgtatcaccctttgttaggtagacatgaacttttcctgcacaaagccttgcttttagagaatgcccaataaggcaagaaaaagcatagtaacttgtgctttgagagctcaatatttgtatcttatcagtacagaagaaatatttctgtgtaacttgatcttctgtctagtacttgtcttataggtaaccaacactgaaaactttgtagtgatgactaccaaagaaatacatagtaaaacaaccttttatttccaaattgttaaagagccagccattgatgctgctacatgagttccatgctcaagagccattgtaagagattaaggggtttctaggtttttggtgattttttgtttgtttttttctttgttttttagggtttttttttcttctttaattttttgattaaaacatacacacagctgttagcataaagtcgtggggggcattttctggaatgctcagcagttctgattaactgccaagcccaggttgcctctcatgaggcaactgaaaaaatcctgtgtcttgatagcatgggtgctgtgtgtgtgcatgtgtgtgtctgcattcatgccttaactcgggttactgcacaactttagttcttgacttagtctgcaccgtcatctagattgtattgtacatctcggtctgaacttcatcctggcaaaaacaaagttgcaggcacaacagtttaagaatgcattcctccagaagagtatctggtcaggttgacccctgagccttctttggacttgatttggaacttagcctggaaagcgaaagtggactgtccaacagaaagatgtcaacaaggaaaagaggagagccaagcgctagcatgccttttgcctctgcatatctgtgcacactgtatgttgttcatgatagcttgtctacaacttgactaggttggagttctggtaatagtggcaatcttgacattcttggtcagagtttagagagatgtaagactttcaattaatgtcttatttactcctttatgttgattagtctttgatacatgtgctgaatcagaaacctaaataaagataattttttaaaatgta

SEQ ID NO: 156046 - DNA, 1425 bp, Artificial Sequence
  derived and/or modified sequence
atggccgacagcgccagcgagagcgacaccgacggcgccggcggcaacagcagcagcagcgccgccatgcagagcagctgcagcagcaccagcggcggcggcggcggcggcggcggcggcggcggcggcggcaagagcggcggcatcgtgatcagccccttcagactggaggagctgaccaacagactggccagcctgcagcaggagaacaaggtgctgaagatcgagctggagacctacaagctgaagtgcaaggccctgcaggaggagaacagagacctgagaaaggccagcgtgaccatccaggccagagccgagcaggaggaggagttcatcagcaacaccctgttcaagaagatccaggccctgcagaaggagaaggagaccctggccgtgaactacgagaaggaggaggagttcctgaccaacgagctgagcagaaagctgatgcagctgcagcacgagaaggccgagctggagcagcacctggagcaggagcaggagttccaggtgaacaagctgatgaagaagatcaagaagctggagaacgacaccatcagcaagcagctgaccctggagcagctgagaagagagaagatcgacctggagaacaccctggagcaggagcaggaggccctggtgaacagactgtggaagagaatggacaagctggaggccgagaagagaatcctgcaggagaagctggaccagcccgtgagcgccccccccagccccagagacatcagcatggagatcgacagccccgagaacatgatgagacacatcagattcctgaagaacgaggtggagagactgaagaagcagctgagagccgcccagctgcagcacagcgagaagatggcccagtacctggaggaggagagacacatgagagaggagaacctgagactgcagagaaagctgcagagagagatggagagaagagaggccctgtgcagacagctgagcgagagcgagagcagcctggagatggacgacgagagatacttcaacgagatgagcgcccagggcctgagacccagaaccgtgagcagccccatcccctacacccccagccccagcagcagcagacccatcagccccggcctgagctacgccagccacaccgtgggcttcaccccccccaccagcctgaccagagccggcatgagctactacaacagccccggcctgcacgtgcagcacatgggcaccagccacggcatcaccagacccagccccagaagaagcaacagccccgacaagttcaagagacccacccccccccccagccccaacacccagacccccgtgcagcccccccccccccccccccccccccccatgcagcccaccgtgcccagcgccgccaccagccagcccacccccagccagcacagcgcccaccccagcagccagccctag

SEQ ID NO: 156047 - DNA, 1845 bp, Artificial Sequence
  derived and/or modified sequence
atgaacaccttccaggaccagagcggcagcagcagcaacagagagcccctgctgagatgcagcgacgccagaagagacctggagctggccatcggcggcgtgctgagagccgagcagcagatcaaggacaacctgagagaggtgaaggcccagatccacagctgcatcagcagacacctggagtgcctgagaagcagagaggtgtggctgtacgagcaggtggacctgatctaccagctgaaggaggagaccctgcagcagcaggcccagcagctgtacagcctgctgggccagttcaactgcctgacccaccagctggagtgcacccagaacaaggacctggccaaccaggtgagcgtgtgcctggagagactgggcagcctgaccctgaagcccgaggacagcaccgtgctgctgttcgaggccgacaccatcaccctgagacagaccatcaccaccttcggcagcctgaagaccatccagatccccgagcacctgatggcccacgccagcagcgccaacatcggccccttcctggagaagagaggctgcatcagcatgcccgagcagaagagcgccagcggcatcgtggccgtgcccttcagcgagtggctgctgggcagcaagcccgccagcggctaccaggccccctacatccccagcaccgacccccaggactggctgacccagaagcagaccctggagaacagccagaccagcagcagagcctgcaacttcttcaacaacgtgggcggcaacctgaagggcctggagaactggctgctgaagagcgagaagagcagctaccagaagtgcaacagccacagcaccaccagcagcttcagcatcgagatggagaaggtgggcgaccaggagctgcccgaccaggacgagatggacctgagcgactggctggtgaccccccaggagagccacaagctgagaaagcccgagaacggcagcagagagaccagcgagaagttcaagctgctgttccagagctacaacgtgaacgactggctggtgaagaccgacagctgcaccaactgccagggcaaccagcccaagggcgtggagatcgagaacctgggcaacctgaagtgcctgaacgaccacctggaggccaagaagcccctgagcacccccagcatggtgaccgaggactggctggtgcagaaccaccaggacccctgcaaggtggaggaggtgtgcagagccaacgagccctgcaccagcttcgccgagtgcgtgtgcgacgagaactgcgagaaggaggccctgtacaagtggctgctgaagaaggagggcaaggacaagaacggcatgcccgtggagcccaagcccgagcccgagaagcacaaggacagcctgaacatgtggctgtgccccagaaaggaggtgatcgagcagaccaaggcccccaaggccatgacccccagcagaatcgccgacagcttccaggtgatcaagaacagccccctgagcgagtggctgatcagacccccctacaaggagggcagccccaaggaggtgcccggcaccgaggacagagccggcaagcagaagttcaagagccccatgaacaccagctggtgcagcttcaacaccgccgactgggtgctgcccggcaagaagatgggcaacctgagccagctgagcagcggcgaggacaagtggctgctgagaaagaaggcccaggaggtgctgctgaacagccccctgcaggaggagcacaacttcccccccgaccactacggcctgcccgccgtgtgcgacctgttcgcctgcatgcagctgaaggtggacaaggagaagtggctgtacagaacccccctgcagatgtag

SEQ ID NO: 156048 - DNA, 1845 bp, Artificial Sequence
  derived and/or modified sequence
atgaacacctttcaggatcaaagcgggtcctcctcgaatcgggaacctttattgaggtgctccgacgctcggcgagaccttgagcttgcaatcgggggggtcctgagagcagaacaacaaataaaggacaatcttagggaggttaaggcgcagattcactcgtgcataagcaggcatctcgaatgtctacgctctcgggaggtctggctgtacgaacaagtggatctgatttatcaattgaaggaagaaaccctacagcagcaggcccaacagttatactccctcttggggcaatttaactgtcttacacaccagcttgaatgcacacagaataaggaccttgccaatcaggtgtcagtgtgcctggagcggctgggcagcttgaccctgaaacctgaggactccaccgtgctactctttgaagccgatactatcaccctaagacagaccatcactacgttcggctcacttaaaactatccagatcccagagcatctgatggctcacgcctccagcgcaaatataggtccttttctagaaaagcgcggctgtatttccatgcctgagcagaagagtgccagcggcattgttgctgtacctttctccgagtggctgctggggagtaaacccgcatccggctaccaagcgccctatattcccagtactgatcctcaggactggctcacacagaaacagaccctggagaattcacagacgtcgagcagagcgtgtaattttttcaataacgtgggcggcaacctgaaaggtctggagaactggctgctcaaaagcgagaagtctagttatcaaaaatgcaactcacactccactacgtcaagctttagtatagaaatggagaaagtcggcgaccaagagcttccagaccaggatgagatggatctcagcgactggcttgtcaccccccaagaaagccacaaactccgaaagccggagaacggtagcagagaaaccagcgagaaattcaaattgcttttccagtcctacaacgtgaacgattggcttgttaaaacagatagctgcacaaattgtcaaggtaatcaacctaagggggtggaaatcgagaatcttggaaatctgaagtgtctaaacgatcatctggaggccaagaagcccctcagtaccccctccatggtcaccgaggactggctcgtccagaaccaccaggatccctgcaaggtagaggaggtgtgcagggccaatgagccctgtacttcattcgctgagtgcgtgtgcgacgaaaattgcgaaaaagaagctctctataagtggctgctgaagaaagaaggtaaggacaagaacgggatgcccgtggaacctaagccagagcctgagaaacataaagattccctgaacatgtggttatgccctcggaaagaagtaatagaacagacaaaggcacccaaagcgatgaccccatcgaggattgctgattctttccaagtcattaagaacagccccctttccgagtggctgatccggcctccttacaaagaaggatcaccgaaggaggtaccgggtacggaggaccgagcaggcaagcagaaattcaagagcccaatgaataccagctggtgtagctttaataccgcggactgggtcctgccaggcaaaaagatgggtaacctcagtcagcttagcagcggcgaagacaagtggctcctaagaaaaaaagcgcaggaggtgctcctgaatagtccccttcaagaggagcataactttcccccagatcactacgggttgccggccgtctgcgacctgttcgcttgtatgcagctcaaagttgacaaggagaagtggctgtaccggactccactccagatgtag

SEQ ID NO: 156049 - DNA, 1845 bp, Artificial Sequence
  derived and/or modified sequence
atgaacacattccaagatcagagcggcagttcaagcaaccgcgaacccttgcttcgctgctctgacgccaggcgcgacttggaactcgcaatcgggggtgtcctcagggccgagcagcagattaaagacaacctgcgcgaggtgaaagcgcagattcatagctgtattagccggcatctcgagtgtctgaggtcgcgcgaagtgtggttgtatgagcaggtcgatctcatctaccagttgaaggaggagaccctgcagcagcaggcccagcaactttatagtctccttggacaatttaactgcctcacacatcagttggagtgcacacagaataaggaccttgcaaaccaggtctcagtgtgcctggaacgtctggggtcactgaccctgaaacccgaggatagtactgttctcctgttcgaggctgacaccatcaccttgcgacagacaatcaccacttttggctcattaaagaccattcagatccccgagcacctgatggcacatgcaagttcagcaaacatcggcccctttctcgaaaagagaggctgtatctccatgcccgaacagaaatcggcgagcggcatcgtcgctgtgccattttcagaatggctcctgggaagtaagcctgcatcaggctaccaagcaccatatattccaagtactgaccctcaagattggctgacccagaaacagacattggagaactcgcagacctctagccgcgcgtgcaattttttcaataacgttggcggcaatttgaaagggctcgagaattggctcctgaagtctgagaagagcagttaccaaaaatgcaactcacactctactacttcttccttctctatcgaaatggagaaagttggcgaccaggagctgccagaccaggacgaaatggatctctccgactggctagttacacctcaggagagccataaactcaggaagcccgagaacggatcccgtgagacctctgaaaagttcaaactcctttttcagagttacaatgtcaacgactggctggtgaagactgacagctgtaccaattgtcaagggaaccagcccaagggcgtcgagatcgagaacctgggcaatttgaaatgtttgaacgaccatctggaagccaaaaagcccctgtcgactccatctatggtgaccgaggattggctagtgcagaatcaccaggatccctgcaaggtggaggaggtgtgtagagcaaacgaaccctgtacttctttcgcagagtgcgtgtgtgatgagaactgcgagaaagaggccttgtataagtggctgctcaagaaggagggcaaagataagaacggtatgcctgtggagcctaaacccgagccagagaaacacaaagatagcctgaatatgtggctctgtcctcgtaaagaagtgatcgagcagacgaaggcacctaaagcgatgacccccagcaggattgccgatagcttccaggtgattaaaaacagcccattgagtgaatggctaattagacctccatacaaagagggatctcccaaagaagtgcccggcacagaggaccgggctggaaagcaaaaatttaaatcgccaatgaatacatcttggtgttcttttaatactgcagactgggtgctgcccggcaagaaaatgggaaacctttcccagctatccagtggggaagataaatggctgctcaggaagaaggcgcaggaggtactactgaatagcccgttgcaggaggagcacaacttcccgccagatcactacggtttgccagcagtgtgcgatctgtttgcctgcatgcagctgaaagttgataaagaaaagtggctttatcgtactcctttgcagatgtag

SEQ ID NO: 156050 - DNA, 1845 bp, Artificial Sequence
  derived and/or modified sequence
atgaacactttccaggaccagtccggcagctcatccaatcgtgaacccctcctcaggtgtagcgacgccagaagagatctagagctagccataggaggagtgctgcgcgcggagcagcaaatcaaagataacctccgtgaggttaaagcacagatccactcctgcatatcccgtcacttggaatgcctgcggtccagagaggtttggctttacgagcaagtagatctgatttaccagctgaaggaagagacactccagcagcaggcccagcaactgtattcgctcctgggacagttcaactgtctgacccatcagcttgaatgtacacagaataaagacctggccaatcaggtctctgtttgcttggaacgcttaggctccctgacattgaaacctgaggattctaccgtgctcctgtttgaagcagatactattactttgagacaaacgatcaccaccttcggaagcttgaagacgatacagattcccgaacacctcatggctcacgcatcatccgcgaacataggccccttcctggaaaagagaggatgtatctccatgcccgagcagaaaagtgcgagtggcatcgtggctgtcccttttagtgaatggctgttgggtagcaaaccagcttcaggataccaggccccgtatatcccttctaccgatccacaggattggcttactcaaaagcagactctcgagaattctcagacgagttcacgtgcatgcaattttttcaataacgtgggtggtaacttaaaagggcttgagaactggctattaaagagcgagaaatccagttaccaaaaatgcaatagtcacagtacaacatcttccttctcaattgagatggaaaaagtgggcgaccaggaactgccagatcaagatgaaatggatttgtccgattggctggtgacccctcaagaatcacataaactgagaaaacctgaaaacggtagccgcgaaactagcgaaaagttcaaactgctgttccagtcgtataatgttaatgattggctcgtaaaaacagactcttgtacaaattgtcagggtaaccagccgaaaggtgtagagattgaaaatctggggaatcttaagtgtctgaatgaccacctagaggcgaaaaaacctctgagcaccccttctatggtgaccgaagactggctggttcagaatcatcaggatccatgcaaagtagaggaagtgtgtcgagcgaacgagccctgcacgtcatttgccgaatgcgtctgtgatgaaaactgcgaaaaggaggcactgtacaagtggctgctcaagaaggagggcaaagataagaacgggatgccagtggaaccgaagcctgagcccgagaagcacaaggactctttgaatatgtggctgtgccctcgcaaggaggtcatcgaacaaaccaaggccccgaaagcgatgacaccttcaaggattgctgattcctttcaggtgattaagaattcaccgcttagcgagtggttaatccgcccaccgtataaggaggggagccccaaagaggttccagggactgaggacagggccgggaagcagaagttcaaatcccccatgaacacgagctggtgttcttttaacaccgctgactgggtgctgcctggcaagaaaatgggtaatttgagccaactctccagtggagaagacaagtggctgttgcggaagaaggcacaggaggtgctgctgaatagccctctccaagaagagcacaatttcccccccgaccattatgggctacccgcggtctgtgacctcttcgcctgtatgcaactaaaggtggataaggaaaaatggctatatagaaccccactgcagatgtag

SEQ ID NO: 156051 - DNA, 1845 bp, Artificial Sequence
  derived and/or modified sequence
atgaacaccttccaggaccagagcggcagcagcagcaaccgggagcccctgctgcgctgcagtgatgcccggcgggacctggagctggccatcggcggcgtgctgcgggcagagcagcagatcaaggacaacctgcgggaggtgaaggcccagatccacagctgcatcagccgccacctggagtgcctgcggagccgggaggtgtggctgtatgagcaggtggacctgatctaccagctgaaggaggagaccctgcagcagcaggcccagcagctgtacagcctgctgggccagttcaactgcctgacccaccagctggagtgcacccagaacaaggacctggccaaccaggtgtctgtgtgcctggagcggctgggcagcctgaccctgaagccagaggacagcacagtgctgctgtttgaggccgacaccatcaccctgcggcagaccatcaccaccttcggcagcctgaagaccatccagatccctgagcacctgatggcccacgccagcagcgccaacatcggccccttcctggagaagaggggctgcatctccatgcctgagcagaagagcgccagcggcatcgtggccgtgcccttcagcgagtggctgctgggcagcaagccagccagcggctaccaggccccctacatccccagcacagacccccaggactggctgacccagaagcagaccctggagaacagccagaccagcagccgggcctgcaacttcttcaacaacgtgggcggcaacctgaagggcctggagaactggctgctgaagtctgagaagagcagctaccagaagtgcaacagccacagcaccaccagcagcttcagcattgagatggagaaggtgggggaccaggagctgcctgaccaggatgagatggacctgagtgactggctggtgaccccccaggagagccacaagctgaggaagccagaaaatggcagccgggagaccagcgagaagttcaagctgctcttccagagctacaacgtgaatgactggctggtgaagacagacagctgcaccaactgccagggcaaccagcccaagggcgtggagattgagaacctgggcaacctgaagtgcctgaatgaccacctggaggccaagaagcccctgagcacccccagcatggtgacagaggactggctggtgcagaaccaccaggacccctgcaaggtggaggaggtgtgccgggccaatgagccctgcaccagctttgctgaatgtgtgtgtgatgagaactgtgagaaggaggccctgtacaagtggctgctgaagaaggagggcaaggacaagaatggcatgcctgtggagcccaagccagagcctgagaagcacaaggacagcctgaacatgtggctgtgccccaggaaggaggtgattgagcagaccaaggcccccaaggccatgacccccagcagaattgctgacagcttccaggtgatcaagaacagccccctgtctgagtggctgatccggcccccctacaaggagggcagccccaaggaggtgcccggcacagaagatcgggccggcaagcagaagttcaagagccccatgaacacctcctggtgcagcttcaacacagctgactgggtgctgcccgggaagaagatgggcaacctgagccagctgagcagcggggaggacaagtggctgctgaggaagaaggcccaggaggtgctgctgaacagccccctgcaggaggagcacaacttccccccagaccactacggcctgcctgctgtgtgtgacctgtttgcctgcatgcagctgaaggtggacaaggagaagtggctgtaccgcacccccctgcagatgtag

SEQ ID NO: 156052 - DNA, 1845 bp, Artificial Sequence
  derived and/or modified sequence
atgaacaccttccaggaccagagcggcagcagcagcaaccgggagccacttttgcggtgctccgacgctagacgggacctcgagctggccattgggggcgtgcttcgggcagaacaacaaattaaagacaacctgagagaggtgaaagcacaaatccattcttgcatttctcgccacctggaatgtctgagaagccgggaggtgtggctttatgaacaggtagatttgatataccagcttaaggaagagacactgcagcagcaggcacagcagctgtactccctgctcggtcagttcaactgcttgactcatcagcttgagtgcactcagaataaggatctggcgaaccaggttagcgtgtgtctggaaagattgggcagtctgaccctcaagcctgaggattctacagtcctgctctttgaggcagacactataaccctgaggcagacgattacgacctttggcagtctcaaaaccatacaaatccccgagcacctgatggctcacgcctcatctgccaacatcggtccctttctggagaagcggggctgtatcagtatgcccgaacagaagtctgcttcagggatcgtagccgtgcccttcagcgaatggctgctaggctcgaaaccggcctctggttaccaggccccgtatattcctagcaccgatcctcaggactggctgacacaaaagcagactttggagaactcacaaacttcgtccagagcatgtaatttcttcaataatgtgggaggaaacctaaagggcttggagaattggctactgaagagcgagaaaagctcctatcaaaagtgtaactctcactccacaaccagctcctttagcatcgagatggagaaggttggggaccaggaactgccagaccaggacgaaatggatctgtctgattggctcgtgactcctcaggagtcccacaaactgaggaaacccgaaaacggctctcgcgagacctctgaaaaattcaagctgttgtttcagtcttacaatgttaatgactggctcgtgaagaccgattcctgtaccaactgccaaggaaaccagcctaaaggtgtggaaatcgagaacctgggcaacctgaagtgtttaaatgatcacctggaggccaagaagcccctcagcacaccaagtatggtgaccgaggactggttggtccagaaccatcaggatccatgcaaagtggaggaggtgtgccgcgctaacgagccatgtacctctttcgccgagtgcgtgtgcgatgaaaactgtgagaaggaggctctctataagtggctgttgaagaaggagggaaaagataagaatgggatgccagtggaacctaagccagagcctgagaagcacaaagattcgctaaacatgtggctgtgccctagaaaagaggtcatcgagcagactaaggcccccaaagctatgacacccagcaggatcgctgatagtttccaggtgataaaaaactcaccgttgtccgaatggctgatccggcctccctacaaggagggcagccccaaggaagttcctgggaccgaggaccgggctggcaagcagaaatttaagagtccaatgaacaccagctggtgctccttcaacaccgctgactgggtcttgccaggaaagaaaatgggcaacctgagccaactgtcctccggagaggataagtggctgttaaggaagaaagcccaagaggttcttctgaattcgccactccaagaagagcacaattttccaccggatcactatggcctgccggcagtctgcgatttgttcgcctgcatgcaattgaaggtggacaaggagaagtggctgtacaggacacccctccaaatgtag

SEQ ID NO: 156053 - DNA, 1845 bp, Artificial Sequence
  derived and/or modified sequence
atgaacaccttccaggaccagagcggcagcagcagcaaccgggagcctctgctgcggtgcagtgacgcaagaagagatctggagttagccattggcggcgtgctccgcgccgagcagcaaatcaaagacaacttaagagaggttaaggcacaaattcatagctgcatcagcagacatctggaatgcctcaggtctagagaggtatggttatacgaacaagtggatctgatttatcagctgaaagaagagacattgcagcaacaggcccagcaactgtactcattgttgggccagtttaattgcttaacccaccaacttgaatgcacccagaataaggatctcgcaaaccaggtgagcgtctgtttggagaggctcgggagtttgacccttaaacccgaggatagcacagttctcttgttcgaagccgacacaattacccttaggcagacaatcactacatttgggagcttgaagactattcagatccctgagcacttgatggctcacgcctcctcagcaaacatcggccccttcctggagaaacgtgggtgcatctcgatgcctgagcagaagagcgcctccggaatcgtggcagtcccgtttagcgagtggctgctgggctcaaaacccgcatctggctaccaggccccctacatccctagtaccgatccacaggactggttaactcagaagcagactctagaaaattctcaaacaagctccagagcctgcaatttctttaataacgtcgggggtaacctcaaggggctcgagaactggttgttgaagagcgagaagtcttcctaccagaagtgtaactcacacagcacaactagcagcttctctattgagatggaaaaggttggcgaccaggagttgccggatcaggacgaaatggacctaagcgactggctggtaacgcctcaggaaagtcataagctccgtaagcccgaaaatggctctagagagacatctgagaagtttaagttactctttcaatcttataacgtgaacgattggctggtcaaaacagactcctgcacaaactgtcaggggaaccagcccaaaggggtcgaaatagaaaaccttggcaacctcaagtgcctcaacgatcacctggaggccaagaagcctctgtccacgccgagtatggtgacggaagattggctagtgcagaaccaccaggacccttgtaaagtggaagaggtgtgtcgggcaaatgaaccttgcacgtcctttgctgagtgcgtatgtgatgagaactgcgagaaagaagctttgtacaagtggcttctaaagaaggaagggaaggataaaaatgggatgcctgtcgaaccaaagcccgaaccagagaaacacaaagattctttgaacatgtggctgtgccctcgcaaagaagttattgaacagaccaaagctcctaaggccatgacgccatccaggatagcggactcatttcaagtgatcaaaaattctccgctatctgaatggcttattcggccaccttataaggaaggcagccctaaggaggtgccagggacagaggaccgagccgggaagcagaagttcaaaagtccgatgaatacttcctggtgcagcttcaataccgctgactgggtgctacccgggaagaagatgggtaatctcagccagctgtcatccggggaagacaaatggctcctgaggaaaaaagcccaggaagtccttctgaactcccccctgcaagaggagcacaactttccaccagatcattatggactccccgcagtgtgcgatctcttcgcctgtatgcagctcaaggttgacaaggagaaatggttgtaccgcactcctttgcagatgtag

SEQ ID NO: 156054 - DNA, 1845 bp, Artificial Sequence
  derived and/or modified sequence
atgaacaccttccaggaccagagcggcagcagcagcaaccgggagccactgctgcgatgctccgatgcccgcagggatttggagctggccatcggcggtgtgctcagagcggagcagcagatcaaggacaatcttcgtgaggtgaaagcccaaatacattcctgtataagcagacatctggagtgcctccggagcagagaggtctggctctatgaacaggtagatttgatttaccagttgaaggaggaaaccctgcagcagcaggctcaacagctttattccctactcggacagttcaactgtctgacccatcagctggagtgcacacagaataaggacttagcgaaccaggtatccgtgtgcttggaacgcctgggcagcttgaccttaaaaccagaggactccacagtgctgctctttgaagccgataccattacgctacgccagaccatcactacatttggttctctgaagactatacagattccggaacacctgatggcacatgctagttccgccaacattggtccttttctggaaaaacggggatgcatctccatgcccgaacaaaagagcgctagcggaatagttgcagtccccttctccgaatggctgctaggatccaagcccgcatcaggctatcaagctccctacattcccagcaccgatcctcaggactggttgacccagaagcagactcttgaaaattcccaaacaagttccagggcttgtaatttcttcaacaacgttggcgggaaccttaaagggctggaaaactggctcctaaagtccgagaaaagctcctatcagaagtgcaatagtcattcaaccacctctagcttttccatcgagatggaaaaggtgggcgaccaagagcttcccgatcaagacgagatggacctatctgactggctcgttacacctcaggagagccacaaactcagaaaacctgaaaacgggagtcgtgagacctcggagaaattcaagctcctctttcagtcctacaatgtaaatgactggttagtgaagactgatagctgtactaactgccaaggaaaccagcccaaaggggtagagatcgaaaacctgggtaacctgaaatgcctgaacgaccacttggaggccaaaaaacctttgtccactccgagtatggtcacagaagattggcttgtacaaaatcaccaagatccttgtaaagttgaggaagtgtgcagagctaacgagccttgcacaagcttcgcagagtgcgtttgtgacgagaattgtgagaaggaagctctgtacaagtggttgctgaaaaaagaaggcaaggacaagaacggcatgccagtggagcccaagccagagccagaaaagcataaggattccctgaacatgtggctttgtccacggaaggaggttatcgagcagacaaaagcccccaaagcaatgaccccatctcgaatcgcggactcttttcaggtgatcaagaacagcccactgtcagaatggctgattcgcccaccatacaaagaaggttctccaaaggaggtcccaggaaccgaggaccgcgctgggaaacaaaagtttaagtcgcctatgaacacgtcttggtgtagtttcaataccgctgactgggtgctgccgggcaaaaagatggggaatctgagccagttgagcagtggagaagacaagtggctactgcgtaaaaaggcccaggaggtgctcctcaactcccctcttcaagaagaacacaattttccacccgatcattacggactccccgccgtgtgtgacctttttgcctgcatgcagcttaaggtcgacaaggagaagtggttgtaccgaactcccctgcagatgtag

SEQ ID NO: 156055 - DNA, 1845 bp, Artificial Sequence
  derived and/or modified sequence
atgaacacgttccaagatcagagcggcagctcttctaaccgggaacccctgttgcgatgtagcgacgcaaggcgggatctcgagttggccatcgggggtgttctgcgggctgagcagcagatcaaggataatctgagggaagtgaaggctcaaattcacagctgcatcagcaggcatcttgagtgcctccgatcccgcgaagtttggctctacgaacaggtcgatctgatctaccaactgaaggaagagactctccaacaacaagcccaacaactatactcccttctgggccagttcaattgccttacgcatcaactggagtgtacacagaataaggacctcgccaaccaggtgtccgtttgcttggaacggctgggctctctgacattaaagcccgaagactcaactgttttgctgtttgaggccgataccattacccttaggcaaacgattactacatttgggtctttaaagacgattcagatccctgagcatcttatggcccacgctagctccgccaacatcggtccctttctagagaagcgtggatgcatcagtatgccagagcagaagtctgcctccggcatcgtcgccgtccccttctccgagtggctgcttggctctaagccggcttccggataccaggccccatatatccctagcactgaccctcaagattggttgacacagaagcagacgctggaaaacagccagactagctccagagcgtgcaacttttttaacaacgtcggtggaaacctgaaggggctcgaaaattggcttctgaaatctgagaagagctcctatcagaagtgtaactcacattccaccacatcaagctttagtattgagatggaaaaggtgggcgaccaagagctgccagatcaggacgagatggacctgagcgactggttagtcacccctcaggaaagtcataaactcaggaagcccgaaaatggctcaagggaaacgtcagagaaattcaagctcctgtttcagagctacaacgtcaacgactggctagtcaaaacggacagctgcacaaattgtcaggggaaccagccaaagggcgttgaaatcgaaaatctgggcaacctgaagtgcctgaacgaccacttggaggctaagaagcccctgtccacaccgtctatggtgacagaggattggttggttcagaatcaccaggatccgtgcaaggtggaagaagtgtgtcgggcaaacgagccctgtacctcttttgccgagtgtgtgtgcgatgaaaactgcgaaaaggaagcattgtacaaatggctgctcaaaaaggaaggcaaagacaagaacggaatgcccgttgaacccaaaccggagcccgagaagcacaaggatagcctgaacatgtggctgtgtcccaggaaagaggtgatagagcaaactaaggcgccaaaagccatgactccatcacgcatcgcggattcattccaggtgattaagaacagtcccctttccgagtggctcatcaggcctccctacaaggagggcagtcccaaagaggtgcctggaaccgaagatcgggcaggcaagcagaagttcaaaagtccaatgaacactagttggtgcagtttcaatacagccgactgggtattgccgggaaaaaagatggggaacctgtcacagctgtcttctggagaagacaagtggttgctgaggaaaaaggcacaagaggtcctccttaactcccctcttcaggaagagcacaactttccaccagatcactatgggctgccagctgtgtgtgatctgtttgcttgcatgcagctgaaagttgataaggaaaagtggctgtatcgaactcccctgcagatgtag

SEQ ID NO: 156056 - DNA, 1845 bp, Artificial Sequence
  derived and/or modified sequence
atgaacactttccaagatcaatccggcagcagcagtaaccgtgaaccgttacttcgctgtagtgacgcccgtcgtgacttggaactggccatcggcggagtactcagagcggagcaacagattaaagacaacctccgggaagttaaggctcagatccattcatgcatctctaggcacctggagtgtctccgctcccgcgaggtgtggctgtacgaacaggtggacctgatctaccagctgaaggaggaaaccttgcaacaacaggctcagcagctttattccctcctaggtcagttcaattgtctgactcaccaactggagtgcactcagaataaggatctcgcaaatcaggtgtcagtctgtctcgaaaggttaggcagcctgaccttgaagcctgaagactctacggttttgctctttgaggccgatactatcacactgcgccaaacaatcaccacgttcggcagcttaaagaccatccagatccctgaacacctcatggcccatgcgagttcagctaacatagggccattcttggaaaagagagggtgcatttccatgccagaacagaagagtgcctctggaatcgtcgcagtgccattcagtgaatggctgctgggttcaaaacctgcaagtggatatcaggcgccatacattcctagtacagatccacaggactggttaacccagaaacaaaccctggaaaattcccagactagcagccgtgcctgcaacttctttaacaatgtcggcggtaacctgaagggcctggagaactggctgttgaaaagtgagaagtcttcttatcaaaagtgcaacagccacagcacgaccagctccttttccatcgaaatggagaaggtgggtgaccaggagctgcccgaccaggatgagatggacttgtcagattggctcgtgacaccacaggagtcccacaagctgaggaagcccgagaacggctcgagagagacatccgaaaaatttaagctcctgtttcagtcatataacgttaatgactggctggttaaaaccgactcctgcaccaactgccagggaaaccagccgaagggagtcgagattgagaatctgggaaacctgaagtgtctgaatgaccatctggaggccaagaaaccgctgtccactccgtcgatggtgactgaggactggctggttcaaaatcaccaagacccttgcaaggtggaggaagtgtgcagagccaacgagccgtgcacaagcttcgccgagtgtgtttgtgacgagaactgtgaaaaagaagccctgtataaatggcttctgaaaaaggagggcaaggataagaacggaatgcccgtcgaaccaaagcccgaaccggagaagcacaaggactcactaaacatgtggctgtgccctaggaaggaagtcatcgagcagacaaaagccccaaaagctatgacacccagccggattgctgattcattccaagtgatcaagaacagcccattgtccgaatggctgatcaggcccccatacaaggagggaagcccgaaagaggtgcccggtaccgaagatcgcgctggcaagcagaaatttaagtctcccatgaatacatcttggtgcagtttcaacaccgcagactgggtgcttccaggcaagaaaatggggaatctgagtcagctcagctccggggaggacaagtggctgctgcgcaaaaaggcccaggaggtacttctgaactcccctcttcaggaggagcataattttccacccgatcattatggactgcctgcagtctgcgaccttttcgcatgtatgcagctgaaggttgataaggaaaagtggttgtacagaacgcccctgcagatgtag

SEQ ID NO: 156057 - DNA, 1845 bp, Artificial Sequence
  derived and/or modified sequence
atgaacacctttcaggaccagtccggatcaagctcaaatcgcgagcccttacttcgctgtagtgacgcacgccgtgacctcgaacttgccatagggggagtgctacgagccgaacaacagatcaaggacaacctgagggaagtaaaggcgcagatccactcatgtattagccggcatttagaatgcttgcggtccagggaggtgtggttatatgagcaagttgatctcatatatcagttgaaggaggaaactctacagcaacaggcacagcaattgtatagcctgcttgggcaattcaactgtctgacccatcagctggaatgcacacagaacaaggacctcgctaaccaggttagtgtttgcttggaacgtttagggtctctcactctgaaaccagaggattcaaccgtgttgttgtttgaggccgataccatcaccttgaggcagaccataacaacctttgggtcgctaaaaaccattcagatccctgaacatttgatggcacatgcatcctcagctaatatcggtcccttcctggagaaaaggggctgcatatcaatgcccgagcagaaaagtgcttctggaattgtggctgtgccgttcagcgagtggctcttgggctctaagcctgcttctggctaccaggccccatatattccttcgacagatcctcaagattggcttacgcaaaaacaaacacttgagaacagtcagacctcatcccgtgcctgtaactttttcaacaatgtggggggtaacctgaaaggccttgagaattggctgcttaagtccgaaaaaagtagctaccagaagtgcaattcccattccaccacaagctcattctcaatagagatggagaaagtaggcgatcaggaactcccagatcaggacgagatggacctatctgattggctggtgaccccacaagagtcccacaaacttcgtaagccagagaacggcagcagagagacaagcgagaagtttaaacttctattccaatcctataatgtcaatgactggctcgtcaaaacagattcatgtacaaattgccaaggaaaccagccaaaaggggtggagatcgaaaatttgggcaacctaaagtgtttgaacgatcatcttgaggcaaaaaagcctctaagcacgccatctatggttaccgaagattggttggttcaaaaccatcaggatccatgtaaagtggaggaggtgtgtcgggcaaacgaaccttgtaccagtttcgctgaatgtgtgtgtgacgagaattgcgaaaaagaagctctgtacaaatggctgcttaagaaggaaggcaaggacaagaacggaatgcccgtggagcccaagcccgagcccgaaaaacacaaagacagcttaaacatgtggctttgcccccgaaaagaggtgattgagcagaccaaggcgccaaaggccatgacacctagcaggatcgcagattcctttcaagtgattaagaactctcccctgagtgaatggctgatccgcccaccatacaaagaggggtcacctaaggaagtgccaggcactgaagaccgggctgggaagcagaaattcaaaagtccaatgaatactagctggtgctcctttaacactgccgactgggtgttaccaggaaagaaaatgggtaacctgagtcagctaagttccggggaggacaaatggctcctccgcaagaaggcgcaagaggtcctcctgaattcaccactccaggaggagcacaatttccctccagatcactatggactgccagctgtgtgtgacctcttcgcctgtatgcaactgaaggtggataaagagaagtggctgtacagaacccccctgcagatgtag

SEQ ID NO: 156058 - DNA, 864 bp, Artificial Sequence
  derived and/or modified sequence
atgaacacgtttcaggaccagtctggaagctcttccaacagagagccgctgctgcgatgtagtgacgctcggcgtgacctggagctcgccatagggggtgttttgcgggccgaacagcaaattaaggataatttaagagaagttaaagctcagattcacagttgtatatctagacacctcgagtgtttgagaagtcgcgaagtttggctgtacgagcaagtggacttaatataccagttaaaagaagaaactcttcaacaacaggcacagcagttatactctctgctaggccagttcaattgtctaactcaccagctggagtgcacccagaataaagacctggccaaccaggtgtctgtctgtctggagaggctgggctcactgacccttaagcctgaggatagcacagtgttgctctttgaggccgatacaatcacactacgccagaccataacgacctttggaagccttaagacaatacagattcccgagcacctaatggctcacgcctcctccgcgaacatcggaccatttctggaaaaaagggggtgcatctcaatgccagagcagaaatcagcatctggcatagtggccgtaccatttagcgagtggctgctcggaagcaagccggcctcaggttaccaggctccctacattccatctactgacccgcaggattggctgacgcagaagcagacactggagaactctcagcaggaggtgttgctgaactcccctctacaggaagagcacaactttccccccgaccactatggattacctgctgtctgtgacctcttcgcgtgtatgcagctgaaagtggacaaagagaagtggttatataggacaccccttcaggtttag

SEQ ID NO: 156059 - DNA, 1845 bp, Artificial Sequence
  derived and/or modified sequence
atgaacaccttccaagaccaatccggatcgtcgtcaaatagggagcctttactgaggtgtagcgacgcccggcgggatttggagctggcgatcggaggagtactgagggccgaacagcagattaaagataaccttagggaggttaaagcccaaattcatagttgcattagtcgtcatctggaatgcctgcggtctcgcgaagtctggctgtatgaacaagttgacctcatttaccagctaaaagaagagacactgcagcagcaggctcagcagctctattcattgctgggccaattcaattgtctgacccaccagctcgagtgtactcaaaataaggacctcgcaaatcaggtgtccgtgtgcctcgaacggttaggctccctaaccctgaaaccggaagacagcaccgtattactgttcgaagcagacaccatcactctcaggcagaccatcacgacattcgggagcctgaaaacgattcagatacctgaacatttgatggcccatgccagcagtgccaatatcggaccgtttctcgagaaaagggggtgcatatctatgcctgagcaaaagtccgctagcgggattgtcgcagtgccctttagcgagtggctgcttggatctaaaccagcctccggttaccaggcaccgtacataccctcaactgacccccaagattggcttacacagaagcagactctcgagaactctcagacaagttcccgtgcttgtaattttttcaacaacgtgggtggaaatctgaagggcctggagaactggttactgaagtcggaaaagagctcataccagaaatgtaactctcatagcaccacgtctagtttctctattgaaatggaaaaagtgggcgatcaggagcttcctgatcaagacgagatggatctgagtgactggctcgtcactccccaagagtcacataaactccgaaagcctgagaatgggagtagggaaacgagcgagaaatttaagctgctgttccagagttacaatgtgaacgactggctcgtgaagaccgactcttgcacgaactgccagggcaaccagcccaagggcgtagaaatagagaacttggggaacctcaaatgtctaaacgatcatctggaagccaagaaacccctgtctacccccagtatggtcacggaagattggctcgttcagaatcatcaagacccctgcaaggtggaggaagtctgcagggctaatgaaccctgcactagctttgcagaatgcgtgtgtgatgagaactgtgaaaaggaagcgctctacaagtggcttctgaagaaagaaggcaaagataagaacggtatgcctgtggaacccaaacctgagcccgaaaaacataaagattccctgaatatgtggctttgccctcggaaggaagtaatcgaacagactaaagccccaaaggccatgacaccaagccgcatcgctgattcatttcaagtaataaagaatagccccttatcagaatggctgatacgtcccccatataaagaaggctcgcccaaggaggtgcctggtaccgaagaccgagcaggtaagcagaaatttaaaagccctatgaacacttcttggtgctcgttcaacacggccgactgggtactccccggtaagaaaatgggcaacctctctcaactgtctagcggcgaagacaaatggctgctcagaaagaaggctcaggaagtcctgctgaacagccccctccaggaggagcacaactttccccccgaccattatggtctgccggcagtgtgcgacctctttgcttgcatgcagttgaaggtagacaaagagaagtggttatacaggaccccactgcagatgtag

SEQ ID NO: 156060 - DNA, 1728 bp, Artificial Sequence
  derived and/or modified sequence
atgaatacttttcaagatcagtctggatcttccagcaacagagaacccctgcttcgctgctctgacgcccgacgggacctggaactagcaatcggaggcgtgctgagagcagaacaacagattaaagataatttgcgggaggtaaaagcccagatccatagctgtatcagcaggcatctcgaatgccttaggtcccgggaagtctggttatacgaacaggtagacctgatataccagctcaaagaggagacgctgcagcaacaggcacaacagctatacagtctccttggtcagttcaactgcttgacacaccagctcgagtgcacacagaacaaggatctggcgaaccaggtcagcgtctgcttggagaggctgggctctctaactctcaagcctgaagactccaccgtcctcctattcgaagcagataccatcactctgcgccaaaccattactaccttcggatcactgaaaacaatccagattccagagcacttgatggctcacgcatctagtgccaacatcggcccattcctcgaaaaacgcggctgcatttctatgcctgagcagaagagtgccagtggaattgtcgccgtccccttttcggagtggctcttggggagtaagcccgcatcaggatatcaggcaccttatatcccatccaccgacccccaggattggctgactcagaaacagaccctggagaacagccagacatccagtcgtgcttgcaacttcttcaacaatgttggcggaaatctcaagggcctggaaaattggctgctgaaatcggaaaagagctcctaccagaagtgtaatagccattctactacctccagtttctcgatcgagatggaaaaggtaggcgatcaggagcttccagatcaagatgaaatggatttgagtgattggctggtaacaccccaggagtcacacaagcttaggaagcccgaaaacgggtcgagggagacttctgaaaagttcaaactcctgttccagtcgtacaatgtgaacgactggttggttaagacagactcctgtacgaattgtcagggtaaccaacctaagggagtggaaatagagaatctgggcaatctaaaatgcctgaatgaccatctagaggctaaaaagcccctctctaccccaagtatggtgaccgaggattggttagttcagaatcaccaggacccatgtaaggtggaagaggtctgtagggcaaatgagccatgtacctccttcgctgaatgtgtatgtgatgaaaattgcgagaaggaggccttatacaagtggctgctgaagaaagagggcaaagacaagaacggcatgccagtggagccaaagcctgagcctgagaaacacaaggatagcctgaatatgtggctgtgcccgagaaaggaggtcatagaacaaacaaaggcacctaaagccatgacgccctcccgaatcgctgactcattccaggtcatcaagaactccccgttgagcgagtggctaattcgacctccctataaagaaggcagcccaaaagaggtaccagggacggaggatagggccggaaaacagaaatactacctgatccacctgtataggaggaacatcacctcaccgcagaccatcatggcatctttacagtttgtgatatctctgcccgtatgctcattaaaactgattaaacgctctggatacatcgaactgctctatcgctgtgaaggtatggacaagtcctag

SEQ ID NO: 156061 - DNA, 1845 bp, Artificial Sequence
  derived and/or modified sequence
atgaacaccttccaggaccaatctgggagtagtagtaatagggagcccttattacgctgcagtgacgcaaggcgggatcttgagttggccatcgggggcgtgctaagggcggagcaacaaatcaaggacaacctccgagaggtcaaagcacagattcacagctgtatctcgcgccacttggaatgtctgcggtctagagaagtctggttgtacgaacaggttgacctgatttatcaactcaaggaggagacactgcagcagcaagcacagcagctatactccctccttgggcagttcaattgtctaacacaccagctggagtgcacccaaaataaggacttggcaaaccaagtgagcgtttgtttggaacgcctgggatcactgaccttgaaacctgaggatagcactgtgctgctgttcgaggcagataccatcacacttagacaaactatcactaccttcggcagtttaaagacaattcagattccagagcacttgatggcccatgcctctagtgccaatatcggcccatttttagaaaaaaggggctgtatcagcatgccggagcaaaaatctgccagcggcattgtagctgtccccttttccgaatggcttctcggctctaagcccgcaagcggctaccaagccccttatattccttcaaccgatccacaggactggctgacacagaagcagacccttgagaatagtcaaacctcttcgagggcgtgtaacttttttaacaatgttgggggtaacttgaagggcttagaaaactggctcctcaaatcggaaaagagcagctaccaaaaatgcaactcacattctactacaagttcttttagcatcgaaatggagaaggtaggggatcaggaactccccgatcaggatgaaatggacctatcagattggctagttaccccacaggagagccacaaactaaggaagcctgagaacggctcaagggagaccagcgagaaattcaaattgctgttccaaagctacaatgttaacgactggttggttaagaccgactcctgtaccaactgccaagggaaccaacctaaaggtgttgagatcgaaaacttgggtaacttgaaatgtctaaacgatcacctggaggctaagaaacccctctctactcctagcatggtgactgaggactggctcgtgcagaatcatcaggatccatgcaaagtagaggaggtgtgcagagcaaatgaaccttgcacatcattcgctgagtgtgtgtgtgacgaaaactgtgagaaggaggcactgtacaagtggctgcttaaaaaggaagggaaggacaagaatggaatgccagtggagcccaaaccggaaccagagaagcataaagatagcctcaatatgtggctgtgtccccgaaaggaagtcattgagcagaccaaggccccgaaggccatgactccgagcaggattgctgacagttttcaggtgattaagaattcgcctctaagcgagtggctcattagacccccctataaagaaggttcaccaaaagaggtccctggcaccgaggatagagccggtaagcagaaattcaagtctcccatgaatactagttggtgttccttcaatactgcggattgggtgttgccaggaaaaaaaatggggaatttgtcccagctctctagtggcgaggacaagtggctcctccggaagaaggcgcaggaagtgctgttgaacagtcccctgcaggaagaacataacttcccgcccgatcattacgggctcccagctgtctgcgacctattcgcgtgtatgcaactgaaggtagataaggagaaatggctttataggaccccactccagatgtag

SEQ ID NO: 156062 - DNA, 1347 bp, Artificial Sequence
  derived and/or modified sequence
atggcacatgcctcttcggcgaatattggtccgttcctcgagaaacggggttgcatctctatgcccgagcagaaatccgcatccgggattgtggcagtaccgttcagtgagtggctgctgggatctaagcccgcaagtggctaccaggccccatacatcccgtccaccgacccgcaggactggctgacccagaaacagaccttggaaaacagccaaaccagcagccgagcatgcaacttctttaataatgttggtgggaatctgaagggcctcgaaaattggctgcttaagagtgaaaaaagctcgtaccagaagtgtaacagtcacagcactacctcttctttctcaattgagatggagaaagtaggagatcaggaattaccagaccaggacgaaatggatctcagtgattggctagtgacccctcaagaatcacataaactgcggaaacccgaaaatgggtcacgggagacttctgagaaattcaagctgctgtttcaatcctacaacgttaacgactggctggtgaagaccgactcctgtactaattgtcagggtaatcagccaaagggtgtagaaattgaaaacttgggcaacctgaaatgcctgaatgaccacctcgaagctaagaaaccactttcaacgccctccatggtcactgaagactggctggtgcagaatcatcaagacccctgcaaagtggaggaggtgtgccgagcgaacgagccatgtacttcatttgctgaatgcgtctgcgatgagaattgtgagaaggaagccctgtacaaatggctgctcaagaaggaaggcaaagataagaacggcatgcctgtggagccgaaacctgagccagagaaacacaaagactccctgaacatgtggctgtgtcctcgtaaagaggtcatcgaacagacgaaggctccaaaagcgatgacccccagccggatcgctgatagcttccaggtcatcaaaaattcgcccctgtcagagtggctgatacggccgccgtataaggaagggagcccaaaagaagtccctggcaccgaggatcgcgccgggaagcaaaaatttaaatcaccaatgaacacgtcatggtgtagcttcaataccgccgactgggtgctgccaggtaagaagatgggaaatctctcccagttgtcttccggggaggacaaatggctgctcaggaaaaaggcgcaggaggtgctgctgaatagtcccctccaggaggagcacaatttcccccccgaccactatggcttgccagctgtatgcgatctgttcgcatgtatgcagttaaaggtggacaaagagaagtggttgtacaggacccctctacagatgtag

SEQ ID NO: 156063 - DNA, 1545 bp, Artificial Sequence
  derived and/or modified sequence
atgaacaggtggactctattcatttccttgaagcgccgccactttaattctaggttaagcagctccactcggttaggatccctgaccctgaagccagaggattcaaccgtcctcctgtttgaagccgacaccatcactctccgacagacaataaccaccttcgggtccctcaagactatccaaattccagaacacctgatggctcacgcctcaagcgcaaacattggaccctttctggagaaaagaggatgtatctctatgcccgagcagaagtccgccagcggaattgtagctgttccattctccgaatggttgttggggagtaaacctgcgtcaggataccaggcaccctatatccccagtactgacccacaagattggctgacccagaaacaaactctggagaacagccagactagtagccgggcttgcaactttttcaacaacgtgggtggtaacctgaagggactcgaaaattggcttctgaaaagtgagaaatcatcatatcagaaatgcaatagtcactccaccacctcctcattcagtattgagatggagaaggtaggagaccaagagctccccgaccaggacgagatggacctctctgattggctggtgacacctcaagaatctcataagctcaggaaacccgaaaatggctctagagagacatcggaaaaatttaagctgctgttccagtcttataatgttaatgattggttagtgaagactgactcctgtaccaactgtcagggcaatcagcctaaaggcgtggaaatagaaaacctcggtaatctgaagtgtttaaatgatcacttagaagcgaagaagcctttgtcgacaccatctatggtcactgaagactggctggtgcagaaccaccaggatccgtgcaaagtggaagaagtttgccgagcaaatgagccatgtacgtcttttgctgagtgtgtatgcgatgaaaactgtgaaaaggaagctctttacaagtggctcctgaaaaaagagggcaaggataagaacgggatgcccgtcgagccaaaaccagagcctgagaagcacaaagatagcctcaacatgtggctctgccctcgcaaagaggtcatcgaacagactaaagccccaaaggcaatgacaccttcgaggattgctgactcattccaagtgataaaaaactctccattaagtgaatggctaattcgacctccctataaagaagggtctcctaaggaggttccaggcaccgaagacagagcggggaaacagaagttcaagtctcctatgaacaccagctggtgctcatttaatactgccgattgggttctgccgggaaaaaaaatggggaacctgtcccagctatcctccggggaagacaagtggcttctgcgtaagaaggctcaggaagtattattgaattcccccctccaagaggaacacaacttcccgcctgatcattacggactgcctgccgtctgtgatttatttgcctgtatgcagctgaaagtagacaaggaaaaatggctgtaccggacgcccctgcaaatgtag

SEQ ID NO: 156064 - DNA, 795 bp, Artificial Sequence
  derived and/or modified sequence
taatgtacccctgcttgggctgccgagttggatagcgtctccaaacaaaaaaagaatccaaagcccacatttaagaaaaagactgaggagcggacctgtgaggtgaaaaaagtcagtcgactgggctctctgaccctgaaacctgaggactctacggtactacttttcgaagcggatacaataacgctcaggcagaccataaccactttcggttctctgaagactatccagattccagaacatttaatggctcatgccagcagcgcaaacatcgggcccttcctggaaaaacgaggctgtatcagcatgccggagcagaagtcggcttctggcatcgttgctgtgcctttctcagagtggctgttaggtagcaagccagcatccgggtaccaggctccttacatccccagcactgatccccaggattggctgactcagaaacaaaccctagaaaactctcagacatctagtagggcctgtaatttttttaataacgtgggcggtaatctgaagggactggagaattggctactgaagtctgagaagagcagctaccagaaatgtaattctcattccacaacaagcagtttttccatcgaaatggagaaggtgggggatcaggaactcccagatcaagatgagatggatctgagcgattggctggtgaccccccaggagagccataagctgcgaaagcctgaaaacgggtcccgagaaacgtcggaaaagtttaaacttctgttccagagttacaatgtgaacgactggcttgtaaaaaccgacagctgcacatag

SEQ ID NO: 156065 - DNA, 1845 bp, Artificial Sequence
  derived and/or modified sequence
atgaatactttccaggatcagtcaggatcctcttctaatagggaacccctgctgcggtgttcagacgcccgcagagatctagagctagccataggcggtgtgctgagggcagaacagcagatcaaagacaacctgcgggaggtgaaagcccaaatccattcctgcatctccagacatctcgagtgcttgaggtctcgagaagtgtggttgtacgaacaggtggatctaatttaccagctgaaagaagaaacactacagcagcaggctcagcagttgtactccctcctggggcagttcaactgtttaacccaccaattggaatgcacccagaacaaggacctggcaaaccaggtgtctgtctgtctggaacgtctggggtcgttaaccctgaagccggaggacagtactgttttgctgtttgaggccgacacaataactctcaggcagactattaccaccttcggaagccttaaaaccatccagatacctgagcatctcatggcgcatgcttcaagcgccaatatcggccccttcctggaaaaacgaggctgtatctccatgccagagcagaagtccgcctccggtattgtggctgtgcccttctcagagtggctcctgggtagtaagccagctagtggttaccaagcgccatatattccttcgacagatccacaggattggctgacccagaagcagaccctcgagaactctcaaacatcaagccgggcctgcaacttctttaacaatgttggggggaatttgaagggactggagaactggctgctgaagagcgagaagtctagctatcaaaagtgtaattcacactctactacctcgagtttttctattgaaatggagaaagtgggggaccaggagctgcccgaccaggacgaaatggacctgagtgactggttggtcacacctcaggagagccacaaattgcggaagccggaaaacggatcacgcgaaacctccgaaaaatttaagcttctgtttcagagttataacgtcaacgactggcttgtaaagaccgatagctgtacaaactgccagggcaatcaacccaagggggtggagatagagaacctcgggaacctcaagtgcttaaacgaccacctcgaagcaaaaaagcctttgtccacacccagcatggtgactgaagactggctggtgcagaatcatcaagacccctgcaaagtggaagaggtgtgtcgagcgaatgagccatgcaccagttttgcagagtgcgtgtgtgacgaaaattgcgaaaaggaggcactgtataagtggctgctgaaaaaggagggcaaagacaagaacggaatgcccgtggagccaaaacctgaacccgagaagcacaaagatagtctgaatatgtggctctgccctaggaaggaagttattgagcaaaccaaagccccaaaggctatgacccctagccgcatcgccgacagcttccaggtgattaagaacagcccactgagtgaatggctgatcaggcctccatacaaggagggctcacccaaggaagtacctggaaccgaggacagagccggtaaacagaagttcaaaagccccatgaacaccagctggtgctcctttaacaccgcggactgggtgctccccggcaaaaaaatgggtaatctttctcaactgtcctctggagaggacaagtggctgttaagaaaaaaagcccaggaggtcctgctcaactctcctctgcaggaagagcacaatttcccaccagaccactacggattacccgccgtgtgcgacctctttgcttgtatgcagctgaaagtcgacaaagaaaaatggctctatcgtacacctctacagatgtag

SEQ ID NO: 156066 - DNA, 864 bp, Artificial Sequence
  derived and/or modified sequence
atgaacaccttccaggaccagagcggcagcagcagcaaccgggagcccctgctgcgctgcagtgatgcccggcgggacctggagctggccatcggcggcgtgctgcgggcagagcagcagatcaaggacaacctgcgggaggtgaaggcccagatccacagctgcatcagccgccacctggagtgcctgcggagccgggaggtgtggctgtatgagcaggtggacctgatctaccagctgaaggaggagaccctgcagcagcaggcccagcagctgtacagcctgctgggccagttcaactgcctgacccaccagctggagtgcacccagaacaaggacctggccaaccaggtgtctgtgtgcctggagcggctgggcagcctgaccctgaagccagaggacagcacagtgctgctgtttgaggccgacaccatcaccctgcggcagaccatcaccaccttcggcagcctgaagaccatccagatccctgagcacctgatggcccacgccagcagcgccaacatcggccccttcctggagaagaggggctgcatctccatgcctgagcagaagagcgccagcggcatcgtggccgtgcccttcagcgagtggctgctgggcagcaagccagccagcggctaccaggccccctacatccccagcacagacccccaggactggctgacccagaagcagaccctggagaacagccagcaggaggtgctgctgaacagccccctgcaggaggagcacaacttccccccagaccactacggcctgcctgctgtgtgtgacctgtttgcctgcatgcagctgaaggtggacaaggagaagtggctgtaccgcacccccctgcaggtgtag

SEQ ID NO: 156067 - DNA, 1728 bp, Artificial Sequence
  derived and/or modified sequence
atgaacaccttccaggaccagagcggcagcagcagcaaccgggagcccctgctgcgctgcagtgatgcccggcgggacctggagctggccatcggcggcgtgctgcgggcagagcagcagatcaaggacaacctgcgggaggtgaaggcccagatccacagctgcatcagccgccacctggagtgcctgcggagccgggaggtgtggctgtatgagcaggtggacctgatctaccagctgaaggaggagaccctgcagcagcaggcccagcagctgtacagcctgctgggccagttcaactgcctgacccaccagctggagtgcacccagaacaaggacctggccaaccaggtgtctgtgtgcctggagcggctgggcagcctgaccctgaagccagaggacagcacagtgctgctgtttgaggccgacaccatcaccctgcggcagaccatcaccaccttcggcagcctgaagaccatccagatccctgagcacctgatggcccacgccagcagcgccaacatcggccccttcctggagaagaggggctgcatctccatgcctgagcagaagagcgccagcggcatcgtggccgtgcccttcagcgagtggctgctgggcagcaagccagccagcggctaccaggccccctacatccccagcacagacccccaggactggctgacccagaagcagaccctggagaacagccagaccagcagccgggcctgcaacttcttcaacaacgtgggcggcaacctgaagggcctggagaactggctgctgaagtctgagaagagcagctaccagaagtgcaacagccacagcaccaccagcagcttcagcattgagatggagaaggtgggggaccaggagctgcctgaccaggatgagatggacctgagtgactggctggtgaccccccaggagagccacaagctgaggaagccagaaaatggcagccgggagaccagcgagaagttcaagctgctcttccagagctacaacgtgaatgactggctggtgaagacagacagctgcaccaactgccagggcaaccagcccaagggcgtggagattgagaacctgggcaacctgaagtgcctgaatgaccacctggaggccaagaagcccctgagcacccccagcatggtgacagaggactggctggtgcagaaccaccaggacccctgcaaggtggaggaggtgtgccgggccaatgagccctgcaccagctttgctgaatgtgtgtgtgatgagaactgtgagaaggaggccctgtacaagtggctgctgaagaaggagggcaaggacaagaatggcatgcctgtggagcccaagccagagcctgagaagcacaaggacagcctgaacatgtggctgtgccccaggaaggaggtgattgagcagaccaaggcccccaaggccatgacccccagcagaattgctgacagcttccaggtgatcaagaacagccccctgtctgagtggctgatccggcccccctacaaggagggcagccccaaggaggtgcccggcacagaagatcgggccggcaagcagaagtactacctgatccacctgtacagaagaaacatcaccagcccccagaccatcatggccagcctgcagtttgtgatcagcctgcctgtgtgcagcctgaagctgatcaagaggagcggctacatcgagctgctgtaccgctgtgagggcatggacaagagctag

SEQ ID NO: 156068 - DNA, 1347 bp, Artificial Sequence
  derived and/or modified sequence
atggcccacgccagcagcgccaacatcggccccttcctggagaagaggggctgcatctccatgcctgagcagaagagcgccagcggcatcgtggccgtgcccttcagcgagtggctgctgggcagcaagccagccagcggctaccaggccccctacatccccagcacagacccccaggactggctgacccagaagcagaccctggagaacagccagaccagcagccgggcctgcaacttcttcaacaacgtgggcggcaacctgaagggcctggagaactggctgctgaagtctgagaagagcagctaccagaagtgcaacagccacagcaccaccagcagcttcagcattgagatggagaaggtgggggaccaggagctgcctgaccaggatgagatggacctgagtgactggctggtgaccccccaggagagccacaagctgaggaagccagaaaatggcagccgggagaccagcgagaagttcaagctgctcttccagagctacaacgtgaatgactggctggtgaagacagacagctgcaccaactgccagggcaaccagcccaagggcgtggagattgagaacctgggcaacctgaagtgcctgaatgaccacctggaggccaagaagcccctgagcacccccagcatggtgacagaggactggctggtgcagaaccaccaggacccctgcaaggtggaggaggtgtgccgggccaatgagccctgcaccagctttgctgaatgtgtgtgtgatgagaactgtgagaaggaggccctgtacaagtggctgctgaagaaggagggcaaggacaagaatggcatgcctgtggagcccaagccagagcctgagaagcacaaggacagcctgaacatgtggctgtgccccaggaaggaggtgattgagcagaccaaggcccccaaggccatgacccccagcagaattgctgacagcttccaggtgatcaagaacagccccctgtctgagtggctgatccggcccccctacaaggagggcagccccaaggaggtgcccggcacagaagatcgggccggcaagcagaagttcaagagccccatgaacacctcctggtgcagcttcaacacagctgactgggtgctgcccgggaagaagatgggcaacctgagccagctgagcagcggggaggacaagtggctgctgaggaagaaggcccaggaggtgctgctgaacagccccctgcaggaggagcacaacttccccccagaccactacggcctgcctgctgtgtgtgacctgtttgcctgcatgcagctgaaggtggacaaggagaagtggctgtaccgcacccccctgcagatgtag

SEQ ID NO: 156069 - DNA, 1545 bp, Artificial Sequence
  derived and/or modified sequence
atgaaccgctggaccctcttcatcagcctgaagaggaggcacttcaacagccggctgagcagcagcacccggctgggcagcctgaccctgaagccagaggacagcacagtgctgctgtttgaggccgacaccatcaccctgcggcagaccatcaccaccttcggcagcctgaagaccatccagatccctgagcacctgatggcccacgccagcagcgccaacatcggccccttcctggagaagaggggctgcatctccatgcctgagcagaagagcgccagcggcatcgtggccgtgcccttcagcgagtggctgctgggcagcaagccagccagcggctaccaggccccctacatccccagcacagacccccaggactggctgacccagaagcagaccctggagaacagccagaccagcagccgggcctgcaacttcttcaacaacgtgggcggcaacctgaagggcctggagaactggctgctgaagtctgagaagagcagctaccagaagtgcaacagccacagcaccaccagcagcttcagcattgagatggagaaggtgggggaccaggagctgcctgaccaggatgagatggacctgagtgactggctggtgaccccccaggagagccacaagctgaggaagccagaaaatggcagccgggagaccagcgagaagttcaagctgctcttccagagctacaacgtgaatgactggctggtgaagacagacagctgcaccaactgccagggcaaccagcccaagggcgtggagattgagaacctgggcaacctgaagtgcctgaatgaccacctggaggccaagaagcccctgagcacccccagcatggtgacagaggactggctggtgcagaaccaccaggacccctgcaaggtggaggaggtgtgccgggccaatgagccctgcaccagctttgctgaatgtgtgtgtgatgagaactgtgagaaggaggccctgtacaagtggctgctgaagaaggagggcaaggacaagaatggcatgcctgtggagcccaagccagagcctgagaagcacaaggacagcctgaacatgtggctgtgccccaggaaggaggtgattgagcagaccaaggcccccaaggccatgacccccagcagaattgctgacagcttccaggtgatcaagaacagccccctgtctgagtggctgatccggcccccctacaaggagggcagccccaaggaggtgcccggcacagaagatcgggccggcaagcagaagttcaagagccccatgaacacctcctggtgcagcttcaacacagctgactgggtgctgcccgggaagaagatgggcaacctgagccagctgagcagcggggaggacaagtggctgctgaggaagaaggcccaggaggtgctgctgaacagccccctgcaggaggagcacaacttccccccagaccactacggcctgcctgctgtgtgtgacctgtttgcctgcatgcagctgaaggtggacaaggagaagtggctgtaccgcacccccctgcagatgtag

SEQ ID NO: 156070 - DNA, 795 bp, Artificial Sequence
  derived and/or modified sequence
tgatgcaccccagcctgggccgctgagctggacagcgtgtccaagcagaagaagaaccccaagcccaccttcaagaagaagacagaggagaggacctgtgaggtgaagaaggtgtcccggctgggcagcctgaccctgaagccagaggacagcacagtgctgctgtttgaggccgacaccatcaccctgcggcagaccatcaccaccttcggcagcctgaagaccatccagatccctgagcacctgatggcccacgccagcagcgccaacatcggccccttcctggagaagaggggctgcatctccatgcctgagcagaagagcgccagcggcatcgtggccgtgcccttcagcgagtggctgctgggcagcaagccagccagcggctaccaggccccctacatccccagcacagacccccaggactggctgacccagaagcagaccctggagaacagccagaccagcagccgggcctgcaacttcttcaacaacgtgggcggcaacctgaagggcctggagaactggctgctgaagtctgagaagagcagctaccagaagtgcaacagccacagcaccaccagcagcttcagcattgagatggagaaggtgggggaccaggagctgcctgaccaggatgagatggacctgagtgactggctggtgaccccccaggagagccacaagctgaggaagccagaaaatggcagccgggagaccagcgagaagttcaagctgctcttccagagctacaacgtgaatgactggctggtgaagacagacagctgcacctag

SEQ ID NO: 156071 - DNA, 864 bp, Artificial Sequence
  derived and/or modified sequence
atgaacaccttccaggaccagagcggcagcagcagcaaccgggagcccttgctccggtgtagcgatgctcggcgtgacctcgagctggcgattggaggggttctgagagcagagcagcagatcaaggacaacctcagagaggtgaaggcccaaattcatagttgcatatcaaggcatctggagtgcctcagaagtcgagaggtgtggctctatgaacaagtggacctgatatatcaactgaaagaagaaactctgcagcagcaggcccagcagttgtattccctacttggccagttcaactgtctgacccatcagttagaatgcacacagaacaaagacctggccaaccaggtcagcgtatgcctcgaaaggctgggatccttaacgctaaagcctgaagactccaccgtcttattattcgaagcggacactatcacactgaggcagaccattacaacatttggctctctcaaaactattcagattccagaacacttaatggcacacgcttcatccgctaacataggtccgttcctggagaagcgtggctgcatctcaatgccagaacagaaatccgcctccggtattgtagccgtgcccttttcggaatggttactggggtccaagcccgcctcaggctaccaggctccttatatcccatccactgacccacaggactggctaacacaaaaacagactctcgaaaacagccagcaagaggtccttttaaacagccccttgcaagaggagcataacttccccccggatcattatggattgccagcagtttgcgatctcttcgcgtgcatgcagttaaaagtggacaaggaaaaatggctatacagaaccccccttcaggtctag

SEQ ID NO: 156072 - DNA, 1845 bp, Artificial Sequence
  derived and/or modified sequence
atgaacaccttccaggaccagagcggcagcagcagcaaccgggagcccctgttaaggtgctcagatgcgaggcgcgacctcgagttggccatcggcggagtcttacgcgctgaacagcagattaaggacaacctgcgggaggtaaaagcccagattcacagctgtatttcgagacatcttgagtgcctccgtagtagagaggtgtggctctatgagcaggtggatctaatctatcagctgaaagaagagacactgcagcagcaagcccagcagctctacagtttgctcggtcagttcaattgtctgacccaccagctggaatgcacccagaacaaggaccttgctaaccaggtcagcgtctgtttggagcgccttggctccctgaccttgaagccggaagacagtactgtgctgcttttcgaggccgacaccattacactccggcagacaattaccactttcgggagcctcaagaccattcagatccccgaacatctgatggcacacgctagctcggcaaacatcggaccctttttggagaagaggggctgcatcagtatgcctgaacaaaaatccgccagcggaatcgtggcagtacctttttcagagtggctgcttggatctaaacctgccagcggctatcaggccccatatatcccgtcaactgacccccaggactggctgacccagaagcagaccttagagaattcacaaacttcctctcgggcctgtaatttttttaataatgtgggcggcaatctgaagggacttgagaattggttgctaaaatcggaaaaaagcagttaccagaagtgcaacagtcacagtaccacgtcatcgttttccatagagatggagaaagtaggcgaccaggagctaccagaccaagacgagatggacctctctgattggctcgtaaccccgcaggaatcccataagctccggaaacctgagaacggtagtagggaaaccagtgagaaattcaagctgctcttccagagctacaacgtgaatgactggctggtgaagacagatagctgtaccaactgtcaagggaaccagccgaaaggagtcgaaatagaaaatctaggcaatctcaaatgtcttaacgaccatttagaagcaaagaaacctctttccaccccctctatggtcaccgaggactggctggttcagaatcaccaggacccctgcaaggttgaagaagtctgtcgcgcaaatgagccttgcacctcgtttgcagagtgtgtgtgcgatgagaactgtgagaaagaagccctgtataagtggctactgaaaaaggagggaaaggataaaaacggcatgcctgtcgaaccaaagcctgaacccgagaaacataaggactctttgaatatgtggctctgtccgcggaaggaagtgattgaacagactaaagcacccaaagctatgaccccaagccggatagccgacagctttcaagtaattaagaatagccctctatccgagtggctaatccgtcccccctataaagagggatcaccaaaggaagtgccaggcactgaggaccgtgcaggtaagcagaagttcaagtcaccaatgaacacttcctggtgcagctttaacactgcggactgggtgctgccggggaaaaagatgggaaacctgagccagctgagtagcggcgaggacaagtggctgttacgaaaaaaggctcaggaagtgctcttgaacagtccactgcaggaggagcacaacttccccccagaccactatggattaccggcagtctgcgatctcttcgcttgtatgcagctaaaagtagacaaggaaaagtggttgtacaggacacctctgcaaatgtag

SEQ ID NO: 156073 - DNA, 1728 bp, Artificial Sequence
  derived and/or modified sequence
atgaacaccttccaggaccagagcggcagcagcagcaaccgggagccactgctgaggtgttcagacgctcgcagagatctggagcttgcaatcgggggcgtattgcgggcggagcagcaaattaaggataatctgcgggaagtaaaagcccagatacactcttgtatttcgagacaccttgagtgccttaggagtcgtgaggtgtggctctacgagcaagtggatctgatttatcagctcaaggaagaaactctccaacagcaggctcagcagctctatagcttgcttggacagtttaattgccttacccatcagctcgaatgtacccagaataaagacctggctaatcaagtaagcgtctgtctggaacgcctcgggtctcttacactcaaaccagaggactctacagttttgctcttcgaggcggacaccataactttgagacaaacaatcacgacattcgggtcgctcaagacaatccaaatcccggagcatctgatggcccacgcttctagtgccaacattggccccttcctcgagaaacgtggctgcatttcaatgcccgaacagaaaagcgccagcggcattgtagccgtgcccttttcagagtggcttctgggatcaaagcccgccagtgggtaccaagctccatatattccctcaacagaccctcaggattggctcacacagaaacagacacttgagaatagccaaacgagtagccgggcatgcaatttctttaacaatgtgggtggcaatctgaaggggctggagaactggctcctcaagtctgagaaatccagttatcagaagtgcaatagtcactctaccacctcttctttcagtatcgagatggaaaaggtgggagaccaggagttgcccgaccaggatgagatggatctttccgactggttggttacccctcaggaatcccataaactgagaaagcctgagaatggatcccgggaaacatctgagaaattcaagctgctgtttcagagctataatgtgaatgactggctggtcaagacagacagctgtactaattgtcagggtaaccagccgaagggtgtggagattgaaaatcttggaaacctgaaatgcttgaatgatcacttagaagcaaagaagcctttgagcacaccctcgatggtgaccgaggactggctcgtccagaatcaccaagatccatgcaaagtcgaagaggtgtgcagagcgaacgagccatgcacttcgttcgccgagtgtgtgtgcgatgagaactgcgagaaagaggctctgtacaagtggctgctcaaaaaggagggcaaagataaaaacggaatgcctgtcgagcccaagcccgaaccagagaaacataaggattcgctgaatatgtggctctgcccaagaaaggaggtgatagaacagaccaaggccccaaaggccatgacaccttcccggatcgccgactctttccaggtaatcaagaactcacctctctccgagtggctaattcggcctccctacaaagagggcagtcccaaagaggttcccggcacagaggaccgggccggtaagcagaaatattatctgattcatctctatcggagaaatatcacaagtcctcagaccattatggccagtctccagtttgtgataagtctcccagtttgtagtctgaagctgattaaaagaagtgggtacatcgaactcctgtatcgatgcgaggggatggataagagttag

SEQ ID NO: 156074 - DNA, 1845 bp, Artificial Sequence
  derived and/or modified sequence
atgaacaccttccaggaccagagcggcagcagcagcaaccgggagccactgctcaggtgcagtgacgcccgtagagatcttgagctggccattggcggggtgctgagggccgagcaacagatcaaggacaatcttcgtgaggtgaaagcacagattcactcgtgcattagtagacatctggagtgtctgcgttcccgcgaagtttggctgtacgagcaggttgacttaatttaccagctcaaggaagaaactctccagcagcaggcacaacagctttatagtctgttaggccagtttaattgcctaacacaccagctcgaatgcacccaaaacaaggacctcgcaaatcaggtgagtgtgtgcctggagagattaggctcactgacgcttaagcccgaggatagtacggtgctgttattcgaggccgacacaattaccctgagacagaccattactacattcgggtccttgaagacaattcagattccagaacaccttatggcacatgcctcatctgcaaatatcggcccattcctcgagaagcggggatgtatcagtatgccagaacagaagtctgcatccggaattgtggccgttcccttcagcgagtggctgctcggcagtaaacccgcctccgggtaccaagccccgtacatccccagtactgacccccaggattggttgacgcaaaagcagacgctcgaaaattctcagaccagcagcagggcatgcaacttttttaataatgtgggcgggaaccttaaaggtttagaaaactggttgctgaagagtgaaaagagctcctatcagaaatgcaatagtcactccacaacgtcatctttttcaatagagatggagaaggtgggtgaccaggaactgccggaccaggacgagatggatctgtccgattggctagttactccccaggagagccataaactgagaaagcccgaaaatggcagtcgggaaacctcggagaagtttaagctcctcttccagtcatataacgtgaatgactggctggtgaagaccgatagctgtactaactgtcaggggaaccagcctaagggagtggagattgagaacctcgggaacttaaagtgtctgaacgaccatttagaagccaaaaagcccttgagcaccccatcaatggtaacagaggattggctggtgcagaaccaccaagatccatgtaaagtggaagaggtttgccgtgctaacgagccatgcacgtcgttcgcggaatgtgtatgcgatgagaattgcgagaaagaagcactgtacaagtggcttttgaaaaaagaggggaaggacaaaaacggcatgcctgttgagccaaagcctgagccggaaaagcacaaggactccctcaacatgtggctctgtccaaggaaggaggtgatcgagcagacaaaggcccctaaagcgatgacgccgagccgcatcgccgactcatttcaggtcattaaaaactcgcctttaagcgagtggctgattcgtccgccatataaggagggctcccctaaggaagtgccaggaaccgaagatcgagctgggaagcagaaatttaagtcccccatgaacaccagttggtgttcgttcaatacagcagactgggtgctgcctggtaagaagatgggaaatctgagtcaactatcgagcggcgaagacaagtggctcttgaggaagaaggcccaggaggttctgctcaattctccactgcaggaagagcacaactttccgcccgatcactacgggcttccagctgtgtgcgatttgttcgcatgtatgcagctgaaagtggacaaggaaaaatggttatatcggaccccactgcagatgtag

SEQ ID NO: 156075 - DNA, 1347 bp, Artificial Sequence
  derived and/or modified sequence
atggcccacgccagcagcgccaacatcggccccttcctggagaagagaggatgcatatccatgcccgaacaaaagagtgcttcaggtattgtggcagtacctttctccgaatggctcctgggatcgaaacctgcttccgggtaccaggcgccatacatacccagcactgacccacaggattggctgacacagaaacaaactctggagaactcccaaacctcttcacgggcctgcaatttcttcaacaatgtgggcggcaacctgaaaggtcttgagaattggctcctgaaaagcgagaaatctagttatcagaagtgcaacagccactccactacgtcttctttctctatcgaaatggagaaggtcggggatcaggaactccctgatcaggatgagatggatctgtctgattggctggtcactccccaggagtcccacaagttgaggaagccagaaaacgggagtcgggagacaagcgaaaaatttaagcttctgtttcagagttacaatgtgaatgattggctcgttaagactgactcttgcacaaactgccagggcaatcagcctaagggcgtggagattgagaatttagggaacctgaagtgcttgaacgatcatctggaggctaaaaaacctctgagtaccccaagcatggtaacagaagactggttagtgcagaaccatcaagatccatgcaaagttgaggaagtgtgcagggcaaatgaaccgtgtacctccttcgcagagtgtgtatgcgacgaaaattgcgaaaaggaagcgctctacaagtggctgttgaaaaaggaaggtaaggacaaaaatggcatgcctgtggagcctaaaccagaacccgaaaaacacaaagactcgttgaatatgtggctgtgtcccagaaaggaggtcatcgaacagaccaaggcccccaaagccatgactccctctcgaatcgctgattctttccaagtcatcaaaaacagcccactgtctgaatggctcattcgcccaccttacaaggaaggctctcccaaagaagttcccgggaccgaggatcgcgctggcaagcagaagttcaagtctccgatgaacacctcctggtgttcctttaacactgccgattgggtgctgccaggtaagaagatgggcaatctaagccagctctcaagtggtgaggacaaatggcttctgaggaaaaaagcgcaggaggtgctgttgaacagccctctccaggaggagcacaattttcctcccgaccactatgggctaccggcagtttgcgacctttttgcatgtatgcagttaaaagtggacaaggaaaagtggttgtaccgcacgcccctgcagatgtag

SEQ ID NO: 156076 - DNA, 1545 bp, Artificial Sequence
  derived and/or modified sequence
atgaaccggtggaccctgttcatcagcctgaagcggcggcacttcaattcacggctctcgtcaagcacccgcttggggtctctgactctcaaacccgaagacagtacggttttgctgttcgaggcggacacaatcacgctgcgtcaaacaataactacctttgggagcctgaagaccatccagattccagagcacttgatggctcacgccagtagcgcgaacatcggcccttttctggagaagcgggggtgcataagcatgccagagcaaaagagcgcatccggcatcgtcgccgtccccttctccgaatggctgctggggtcaaaacctgcttcaggatatcaggcgccttatataccttcaacagatcctcaggactggctcacacagaagcagactctggaaaatagccagacctcctctcgagcctgcaatttcttcaataacgtggggggtaacctgaaggggctggagaattggcttttgaaaagcgagaagtcatcctaccagaagtgcaatagccacagtacgactagcagtttttctattgaaatggagaaggtcggagaccaggaattgccggaccaggatgagatggacctgagtgactggctggttacacctcaggagtcccataaactgcgaaaacccgaaaacggctcccgagaaacaagtgagaaattcaaactactcttccagagttacaatgtgaatgattggcttgtcaagaccgactcctgtactaattgccagggcaaccagcccaaaggggtggagattgagaaccttggtaatcttaaatgcctgaatgatcacttggaggctaagaaacctctgtcaacgcctagtatggtgaccgaggactggctcgtgcaaaatcatcaggacccctgcaaagtggaagaggtctgtagggcgaatgagccatgcacctcgttcgcagaatgcgtatgtgatgaaaattgcgagaaggaagctctgtataagtggctgctgaagaaagaaggcaaggacaagaacgggatgcccgtcgagccaaagcctgaaccagagaaacacaaggacagcctgaatatgtggttgtgtccacggaaggaggttattgagcagacgaaggcccctaaagccatgacaccctccaggatagctgacagctttcaggtcattaaaaattctccactgagtgaatggctgattcgccccccatacaaggagggcagccccaaggaagtgccaggcaccgaagatcgggctggaaagcaaaaattcaaatctcctatgaacacctcatggtgctctttcaacacagctgattgggtacttcctggcaaaaaaatggggaacctgagtcagctgagctctggagaggacaagtggttacttcgaaagaaagcccaggaggtactgctcaactcacctctccaggaggaacacaacttcccacctgaccactatggactgcctgccgtctgtgacttatttgcctgtatgcagcttaaagtggataaagagaagtggctgtatcgcactcctttgcagatgtag

SEQ ID NO: 156077 - DNA, 795 bp, Artificial Sequence
  derived and/or modified sequence
tgatgcacccccgcctgggccgccgagctggacagcgtgagcaagcagaagaaaaatccaaaaccgacattcaaaaagaagacagaagaaaggacctgtgaagttaagaaggtctcccgtctgggatcactcacacttaaacccgaggactccactgtcttgttgtttgaggccgacacgatcacattgcgccaaacaattactacgtttggcagtctgaaaacaattcagatccccgagcatctgatggcccacgcaagctccgcaaacatcggcccctttttagagaagcgcggctgtataagtatgcccgagcaaaagagtgcttcaggcatcgtggccgtacctttttccgagtggttgctgggttccaagcccgcgagcggctaccaagccccctatatcccatctactgacccccaggactggctcacccagaaacagacgctggagaacagccaaacttcctcccgggcctgtaatttcttcaacaacgtcggcggcaacctcaagggtctggagaactggctactgaagtctgaaaagtcctcttatcagaagtgcaacagccactcaaccacaagctccttttctatcgaaatggaaaaagtaggcgaccaggaactcccggatcaggacgagatggatttgtcggattggctcgtgacccctcaggagagccacaagctgaggaagcctgagaacggctcaagagagacaagcgaaaagtttaaacttctttttcaaagttataatgtgaatgactggttggtcaagactgacagctgcacttag

SEQ ID NO: 156078 - DNA, 1845 bp, Artificial Sequence
  derived and/or modified sequence
atgaacaccttccaggaccagagcggcagcagcagcaaccgggagccattacttcgatgctctgacgcaaggagggatcttgaactggctatcggcggcgtgttgagagcagagcaacagattaaggataatctgcgggaggtaaaggcacagatccacagctgcatctctcggcatctggagtgtctaagaagtagggaagtgtggttgtatgagcaggtagatctgatctaccagctgaaggaagaaaccctccaacagcaggcgcagcagctgtactccctcctggggcaattcaattgcctgacccaccagctagaatgcacgcagaacaaagatctggccaaccaagtatctgtctgtctggagcgcctggggagcttgaccctgaagcctgaggatagcaccgtgctactgttcgaagcagacactattaccttaagacaaacaatcaccacctttggtagcctgaaaaccatccagattcctgagcacttaatggcgcacgcctctagtgcaaatatcggccccttcttggaaaagcggggctgtatatcgatgcctgagcagaaatctgcgagcggcatcgtagccgtccctttttccgaatggttattggggagcaagccagcatcgggatatcaggccccctatattccatcgaccgacccacaagactggctgacccaaaaacagacattagagaactcccagacatcgtcccgggcttgtaacttcttcaacaacgtgggtgggaacctgaaaggcctggaaaattggctgcttaaaagtgaaaagagctcataccaaaaatgcaactcacattccacgacatcttccttttccattgagatggagaaagtgggtgatcaggaattacccgatcaggatgagatggatctgtcagattggctggtgacgcctcaggagtcccacaaactgcgcaaacccgagaacggtagccgggaaaccagtgaaaaattcaaactcctattccagtcctataacgtgaacgactggctggtgaagacggactcttgtactaactgtcagggcaaccagccaaagggagtagaaattgaaaatctagggaacttaaagtgtctcaatgatcatctggaagcaaagaaacccttgagtaccccatctatggttaccgaggactggttggtgcagaaccaccaggatccctgtaaagttgaggaagtgtgtcgtgccaacgagccctgcacctcatttgccgagtgcgtctgtgacgagaactgtgagaaagaagctctgtataaatggctgttgaagaaggaagggaaagataagaatggcatgcccgtggaaccaaagccagaacctgagaagcataaagacagcctcaatatgtggctgtgtcctcggaaagaagtgattgagcagaccaaagctccaaaggcaatgacgcctagtcgcatcgccgattctttccaggttattaaaaattcacctttgtccgagtggctcatcaggccaccgtataaggagggaagtcctaaggaggtccccggcaccgaggatcgtgccggaaagcagaagtttaagtcccccatgaacactagttggtgctcattcaacacggctgactgggtcctccctggaaaaaagatgggcaatttatctcaactgtcgtccggggaggacaagtggctcctgcgaaaaaaggcccaggaagtcttgttgaactcacccctgcaggaggagcacaatttcccaccagatcactatggcttgcccgctgtctgcgatttattcgcttgcatgcagctgaaagtggacaaggagaagtggctgtacagaacacccctgcaaatgtag

SEQ ID NO: 156079 - DNA, 1755 bp, Artificial Sequence
  derived and/or modified sequence
tagtgtggggccgtgtctcagtccacccaaggtctcctcggatcgcctggagaggcactcggacctgactgggcagtttgacccttaagcctgaagattcaactgtcctgctctttgaagctgacacaattactctgcgccagaccatcaccacatttgggtctctcaaaaccattcaaattcctgagcacttgatggctcatgctagttcagcaaatattgggcccttcctggagaagagaggctgtatctccatgccagagcagaagtcagcatccggtattgtagctgtccctttcagcgaatggctccttggaagcaaacctgccagtggttatcaagctccttacatacccagcaccgacccccaggactggcttacccaaaagcagaccttggagaacagtcagacttcttccagagcctgcaatttcttcaataatgtcgggggaaacctaaagggcttagaaaactggctcctcaagagtgaaaaatcaagttatcaaaagtgtaacagccattccactactagttctttctccattgaaatggaaaaggttggagatcaagagcttcctgatcaagatgagatggacctatcagattggctagtgactccccaggaatcccataagctgcggaagcctgagaatggcagtcgtgaaaccagtgagaagtttaagctcttattccagtcctataatgtgaatgattggcttgtcaagactgactcctgtaccaactgtcagggaaaccagcccaaaggtgtggagattgaaaacctgggcaatctgaagtgcctgaatgaccacttggaggccaagaaaccattgtccacccccagcatggttacagaggattggcttgtccagaaccatcaggacccatgtaaggtagaggaggtgtgcagagccaatgagccctgcacaagctttgcagagtgtgtgtgtgatgagaattgtgagaaggaggctctgtataagtggcttctgaagaaagaaggaaaggataaaaatgggatgcctgtggaacccaaacctgagcctgagaagcataaagattccctgaatatgtggctctgtcctagaaaagaagtaatagaacaaactaaagcaccaaaggcaatgactccttctagaattgctgattccttccaagtcataaagaacagccccttgtcggagtggcttatcaggcccccatacaaagaaggaagtcccaaggaagtgcctggtactgaagacagagctggcaaacagaagtttaaaagccccatgaatacttcctggtgttcctttaacacagctgactgggtcctgccaggaaagaagatgggcaacctcagccagttatcttctggagaagacaagtggctgcttcgaaagaaggcccaggaagtattacttaattcacctctacaggaggaacataacttccccccagaccattatggcctccctgcagtttgtgatctctttgcctgtatgcagcttaaagttgataaagagaagtggttatatcgaactcctctacagatgtgaaggaatggacaagagttgagcagcctttctgctgattatcacacatcatgagctgagtgactgcagcttgccaaatctttgtgtttctgggtctgaccaattagcttagttcttctcctgcctaattttgaactagtaaagcaaagtgagtcatcagattatgagttactgtttaaaagaaaaatgctgtttattcatgctgaggtgattcagt

SEQ ID NO: 156080 - DNA, 2124 bp, Artificial Sequence
  derived and/or modified sequence
aactctgcctttgggccgtaggttagtgtggggccgtgtctcagtccacccaaggtctcctcggatcgcctggagaggcactcggacctggtcaaagctcagattcacagttgcataagccgtcacctggaatgtcttagaagccgtgaggtatggctgtatgaacaggtggaccttatttatcagcttaaagaggagacacttcaacagcaggctcagcagctctactcgactgggcagtttgacccttaagcctgaagattcaactgtcctgctctttgaagctgacacaattactctgcgccagaccatcaccacatttgggtctctcaaaaccattcaaattcctgagcacttgatggctcatgctagttcagcaaatattgggcccttcctggagaagagaggctgtatctccatgccagagcagaagtcagcatccggtattgtagctgtccctttcagcgaatggctccttggaagcaaacctgccagtggttatcaagctccttacatacccagcaccgacccccaggactggcttacccaaaagcagaccttggagaacagtcagacttcttccagagcctgcaatttcttcaataatgtcgggggaaacctaaagggcttagaaaactggctcctcaagagtgaaaaatcaagttatcaaaagtgtaacagccattccactactagttctttctccattgaaatggaaaaggttggagatcaagagcttcctgatcaagatgagatggacctatcagattggctagtgactccccaggaatcccataagctgcggaagcctgagaatggcagtcgtgaaaccagtgagaagtttaagctcttattccagtcctataatgtgaatgattggcttgtcaagactgactcctgtaccaactgtcagggaaaccagcccaaaggtgtggagattgaaaacctgggcaatctgaagtgcctgaatgaccacttggaggccaagaaaccattgtccacccccagcatggttacagaggattggcttgtccagaaccatcaggacccatgtaaggtagaggaggtgtgcagagccaatgagccctgcacaagctttgcagagtgtgtgtgtgatgagaattgtgagaaggaggctctgtataagtggcttctgaagaaagaaggaaaggataaaaatgggatgcctgtggaacccaaacctgagcctgagaagcataaagattccctgaatatgtggctctgtcctagaaaagaagtaatagaacaaactaaagcaccaaaggcaatgactccttctagaattgctgattccttccaagtcataaagaacagccccttgtcggagtggcttatcaggcccccatacaaagaaggaagtcccaaggaagtgcctggtactgaagacagagctggcaaacagaagtttaaaagccccatgaatacttcctggtgttcctttaacacagctgactgggtcctgccaggaaagaagatgggcaacctcagccagttatcttctggagaagacaagtggctgcttcgaaagaaggcccaggaagtattacttaattcacctctacaggaggaacataacttccccccagaccattatggcctccctgcagtttgtgatctctttgcctgtatgcagcttaaagttgataaagagaagtggttatatcgaactcctctacagatgtgaaggaatggacaagagttgagcagcctttctgctgattatcacacatcatgagctgagtgactgcagcttgccaaatctttgtgtttctgggtctgaccaattagcttagttcttctcctgcctaattttgaactagtaaagcaaagtgagtcatcagattatgagttactgtttaaaagaaaaatgctgtttattcatgctgaggtgattcagttccctccttcttacagaagtattttaattcaccccacactagaaatgcagcatctttgtggacgtctttttcacaagcctccaaggctccttagattgggtcgttactaaaagtacattaaaacactcttgtttatcgaagtatattgatgtattctaaagctagtaaacttccctaacgtttaattgccctacagatgcttctc

SEQ ID NO: 156081 - DNA, 792 bp, Artificial Sequence
  derived and/or modified sequence
ctgcactccagcctgggcggcagagctagactccgtctcaaaacaaaaaaaaaacccaaaaccaacctttaaaaaaaagacggaagaaagaacgtgtgaagtgaaaaaagtctcaagactgggcagtttgacccttaagcctgaagattcaactgtcctgctctttgaagctgacacaattactctgcgccagaccatcaccacatttgggtctctcaaaaccattcaaattcctgagcacttgatggctcatgctagttcagcaaatattgggcccttcctggagaagagaggctgtatctccatgccagagcagaagtcagcatccggtattgtagctgtccctttcagcgaatggctccttggaagcaaacctgccagtggttatcaagctccttacatacccagcaccgacccccaggactggcttacccaaaagcagaccttggagaacagtcagacttcttccagagcctgcaatttcttcaataatgtcgggggaaacctaaagggcttagaaaactggctcctcaagagtgaaaaatcaagttatcaaaagtgtaacagccattccactactagttctttctccattgaaatggaaaaggttggagatcaagagcttcctgatcaagatgagatggacctatcagattggctagtgactccccaggaatcccataagctgcggaagcctgagaatggcagtcgtgaaaccagtgagaagtttaagctcttattccagtcctataatgtgaatgattggcttgtcaagactgactcctgtaccaa

SEQ ID NO: 156082 - DNA, 864 bp, Artificial Sequence
  derived and/or modified sequence
atgaacacattccaggatcagtctggtagtagcagcaaccgcgaaccgctgctgcgatgcagtgatgctagacgtgacctggagctggccattgggggtgttcttagggctgaacagcaaatcaaggataacctgcgagaagtgaaagcccaaattcactcctgcatatccaggcatttggaatgcctgagatcacgcgaggtgtggttgtatgaacaggtcgatctgatctatcaactgaaagaagaaaccttgcagcaacaggcccagcagctttattcactcctcggtcagttcaactgcttgacccatcaactagaatgtacacagaacaaggacctcgctaaccaggtttcagtctgcctagagcgcctcgggtctctgactttaaagcctgaagattccaccgtgctccttttcgaagctgataccatcaccttacgacagacaatcaccactttcggatccctgaaaacgattcaaatccctgagcacctcatggcgcacgctagcagcgcaaacatcgggccatttcttgagaaacgtggctgtatctccatgcccgagcagaaaagcgcctccggtattgttgcggtcccattttccgaatggctgcttgggtcaaagccagcctcaggataccaggctccctatattccttctacggatccgcaggattggctgacgcagaagcagaccctggagaattctcagcaggaagtcctgctgaactctcccctgcaggaggaacataattttccaccggaccattacgggttgcctgccgtgtgcgatctgttcgcctgtatgcagctgaaggtagacaaggagaagtggctatacaggacccctctccaggtgtag

SEQ ID NO: 156083 - DNA, 1845 bp, Artificial Sequence
  derived and/or modified sequence
atgaacacttttcaagaccagagcggctccagttctaaccgggagcctctgctccgttgttcggatgcaaggagggacctcgaacttgcaatcggcggagtgctgcgcgctgagcagcaaatcaaagacaatctaagagaggttaaggcccaaattcactcttgtattagtcggcatctcgagtgcctgcgtagccgtgaagtgtggctttatgagcaagtggatctgatataccagcttaaggaagagacccttcagcaacaggcgcagcaactttattctctgctggggcagttcaactgtctgacccaccagctcgaatgcacccagaacaaggacttagctaatcaggtgtccgtgtgtctggaaagattgggatctctgacactgaagccagaagattcaaccgttctcctttttgaagccgataccattactcttcgccagacaattacgacattcggctccctcaagactatccagattccggaacacctgatggcccacgcctcttcggcaaacatcggtcccttccttgagaagaggggttgcatctctatgccagaacagaaatccgccagtggaatcgttgccgtgccttttagtgaatggctgctggggagcaagccagcatctgggtaccaggcaccttacataccgagtactgacccccaggattggctgacacaaaaacagaccctcgaaaattcccagacttctagtcgggcatgcaactttttcaacaatgtcggaggcaacctgaaagggctcgagaactggctgctgaagtccgaaaaaagcagctatcagaaatgcaattctcacagtactacctcgtcatttagtatagaaatggagaaagtcggggaccaggagctccccgaccaggatgagatggatctctccgattggcttgttacgccacaggagtcacataagctgaggaaacctgagaatggcagtagagagacctcagagaaattcaagctgctgtttcaaagctacaacgtcaatgactggctggttaagacggacagctgcaccaactgtcagggaaaccagccaaaaggggtggaaatagagaacttagggaatctgaaatgtcttaacgaccacttggaggctaagaaacctctttcgactccctctatggtcacagaagattggctcgtgcaaaaccaccaggacccatgcaaggtggaagaggtgtgccgggctaacgagccctgcaccagcttcgcagaatgcgtttgtgacgagaattgtgagaaggaagctctgtataaatggctgctgaaaaaagagggtaaagataaaaatggcatgcctgtcgagcccaaaccagagcctgagaaacacaaagactctctgaatatgtggctgtgccctagaaaagaggttatagagcagacaaaagcgcctaaggcgatgacaccatctaggatagcagattcatttcaggtcataaagaactcccctctctcagaatggctgatcaggcctccttataaggaaggttctcctaaagaagtgcccggaactgaggatcgcgctgggaagcaaaagttcaaatctccaatgaacacttcatggtgttcgtttaatactgccgactgggtccttcccggaaagaagatgggcaatctctcccaactaagttcaggagaagataaatggctcctgcgaaagaaagcccaggaggtcctcctaaattcacccctccaggaagagcacaacttcccacccgatcattatggactgccagctgtgtgtgacctgttcgcctgtatgcaattgaaagtggacaaagagaagtggctttacaggacacctcttcagatgtag

SEQ ID NO: 156084 - DNA, 1728 bp, Artificial Sequence
  derived and/or modified sequence
atgaacacattccaggaccaatccggatcttccagtaacagagaaccactgctcaggtgtagcgatgcgcgacgagacttggagctcgctattggcggagttctgcgggctgagcaacagatcaaggataacttacgggaggtgaaagcgcagatccattcctgtattagtcgccacctggaatgcctgcgtagtcgcgaggtctggctgtacgagcaggttgacctcatctatcagctgaaggaggaaacactccaacagcaggcccagcagttatacagcttactcgggcaattcaattgccttacacaccagctggagtgtacacagaataaggatttggctaatcaggtgtcagtatgcctagaacgactcggatccctgaccctcaagcccgaggacagcaccgttctgctttttgaagcagatacaatcactctgagacagacaattactaccttcggatccttgaagacaatacagattcccgagcatctcatggctcacgcctcttccgctaacatcggtcctttcctggaaaaacgtggctgtatctcaatgcctgaacagaagtcggcctctggaatcgtagccgtgccgttctctgagtggctattaggtagtaaacccgcaagcggttatcaagcaccctacatcccatcaacagacccacaggactggttgactcaaaaacagacattggaaaattcccagacctctagtcgggcttgcaacttctttaataacgtcggtggcaacctcaagggactcgagaactggttattaaagagcgaaaagagctcatatcaaaagtgtaacagccactctacaactagctcctttagtattgagatggaaaaagtaggggaccaagaactcccagatcaagatgagatggatttgtctgactggctggtcactccgcaagagtcacacaagctgaggaagcctgagaatgggtcaagagaaacaagtgaaaaatttaagttgttattccagtcttacaatgttaatgattggctggtgaagacggacagttgcaccaactgccaggggaaccagcccaaaggcgtagagatcgagaacctcgggaacttgaagtgtctgaacgatcacctggaggccaaaaagccactctccaccccaagcatggtaaccgaagattggttggtgcagaaccaccaggacccctgtaaagtggaagaggtatgtagggccaacgagccatgtacctcttttgcagagtgcgtgtgcgatgagaattgtgagaaggaggccctgtacaagtggttgctgaaaaaagaaggaaaagacaaaaacggaatgcctgtggagcccaaaccggaaccagagaagcataaggactctctcaacatgtggctgtgccctcgcaaagaggtgattgagcagacaaaagccccaaaggcaatgaccccaagtagaatcgcagacagtttccaggtgattaaaaacagccccctgtccgagtggctgattcgtcctccttataaagagggctcccctaaggaggttccagggaccgaggatagagccggaaaacaaaagtattaccttatccacctttatcggaggaacatcacaagcccccaaacaatcatggcctccctgcagtttgtgatcagcctgcccgtgtgctccctcaagctcataaaacggtcaggctacattgagttgctgtatcggtgcgagggtatggacaagagttag

SEQ ID NO: 156085 - DNA, 1845 bp, Artificial Sequence
  derived and/or modified sequence
atgaatactttccaggaccaaagcgggtcctcgtccaatcgcgaaccactgctgcgatgtagtgatgctaggagagatctggagctcgccattggaggagtactaagggcagagcagcagatcaaggacaacttaagagaggtgaaagctcaaattcactcatgtatctctcgtcacctagaatgcctacggtcccgggaggtgtggttgtatgaacaggtggacctcatctatcagctgaaggaagagacgttgcagcagcaggctcaacagctgtactccctactgggccaattcaactgtctcacacaccagctggagtgcacccaaaacaaagacctagctaatcaggtcagtgtctgcttggagcgcctgggtagtcttacattgaaaccggaagactcaactgtgctgctgttcgaggcggacacaataaccctgcggcagactatcactacctttggctctctcaaaacaatccagatccccgagcacctcatggcacatgccagctctgcgaatatcggaccattcttagagaagcgcggatgcatttcgatgcctgaacagaagtccgcttccggaatcgtagcggtcccattttccgaatggcttcttggctcgaaaccagcctctgggtaccaggcgccttacattccctctaccgacccccaggactggctgacccaaaagcagacactggagaactctcagacgtcctcccgtgcgtgtaattttttcaataatgtggggggaaatctgaaagggctggagaactggctgctgaagagcgaaaaaagtagttatcagaagtgcaacagtcactctactacttcttcattctctattgagatggagaaggtgggtgaccaggaacttcccgatcaagatgagatggacttgtccgactggctggtaacaccacaggagagccacaagctccgaaagcccgagaacggcagccgagagacttccgagaaatttaaactgctcttccagtcatacaatgtgaatgactggctcgtgaagacggatagttgtactaattgtcagggaaatcagcctaagggtgtcgaaatcgaaaacctcggtaacctgaagtgcctaaacgatcatcttgaggccaaaaagcctctgagcacaccctcaatggtgacggaagactggctggtgcagaaccatcaggatccatgcaaggtggaggaggtttgtagagcaaatgagccatgcactagtttcgctgagtgcgtctgcgatgaaaattgtgaaaaagaggccctttacaaatggctgctgaaaaaagagggaaaggacaagaatgggatgcctgtagagcctaaacccgagcccgagaagcacaaggactccctgaacatgtggttgtgccccaggaaagaggtgattgagcaaaccaaggcccctaaggccatgacacctagcagaattgctgatagctttcaggtgatcaagaattcgccgctgtctgaatggctcattagacccccatataaagagggctcccccaaggaggtacctggcaccgaagatcgggctgggaagcagaagttcaaatcacctatgaataccagctggtgcagtttcaatacggccgactgggtcctgcctggcaaaaagatgggtaacttgtctcagctgtcctccggtgaggacaagtggctcctcaggaaaaaagctcaggaagtgctcttgaattcacctctgcaggaggaacacaattttcctcccgatcattacggactgccagctgtatgtgatctgttcgcatgcatgcagctgaaagtggataaagaaaagtggctttaccggactccgctgcagatgtag

SEQ ID NO: 156086 - DNA, 1347 bp, Artificial Sequence
  derived and/or modified sequence
atggctcatgcaagctccgccaatatcgggcctttcctggaaaaacggggttgtattagtatgccagagcagaaatccgcttcgggtattgttgcagtgccattctccgagtggctgctcggtagcaagcccgcatctgggtatcaagctccttacattcccagcaccgatccacaggactggctgacccaaaaacagacacttgagaactcccaaactagttcgagagcatgcaatttttttaacaacgtcggaggtaatcttaagggcctcgagaactggttactgaagtcagaaaagagctcataccagaaatgcaatagtcactctaccacgtcatcgttctccattgagatggagaaggtaggagaccaggagctacctgaccaggatgagatggatctatccgactggcttgttaccccgcaggagtcccacaaacttcgcaaacccgagaatggctcaagggagacctccgagaaatttaagctgttgttccagtcctataacgtcaatgactggctcgtgaagacggacagttgcaccaactgtcaaggcaaccagcctaaaggtgtggaaattgaaaacttaggtaatttgaaatgtctcaatgaccacctggaagccaagaagccattgtcgactccaagcatggtgactgaagactggttggtgcagaaccaccaagacccatgcaaggtcgaggaggtctgtagagctaacgaaccgtgtacttcatttgccgaatgcgtctgcgatgaaaattgtgagaaggaggctctgtataagtggttactgaaaaaagagggcaaagacaagaacgggatgccagttgagccaaagcccgagcctgagaagcataaggacagtttaaacatgtggttatgcccgagaaaggaggttatcgagcagacaaaagcacctaaagctatgactcccagccgcattgccgacagcttccaggtgattaaaaactcccctctatcagaatggctcatacgacctccatacaaggaaggctccccgaaggaggtccccggtactgaggatcgcgctgggaagcaaaaatttaaatcaccgatgaacactagctggtgctcgtttaacacagccgattgggtgctgccaggaaagaagatgggtaacctgtcacaactgagcagcggagaggataaatggctcctgcggaaaaaagcccaagaagttctgctgaattccccactgcaggaggagcacaattttccaccagatcactatggcttgccagccgtctgcgatttgttcgcctgcatgcaactcaaggtcgacaaggagaagtggttatatagaaccccactgcagatgtag

SEQ ID NO: 156087 - DNA, 1545 bp, Artificial Sequence
  derived and/or modified sequence
atgaacaggtggacactgttcatcagcctcaagagaagacacttcaacagtagactgtctagctcaacacgtctgggcagcctaactctaaaaccagaggattccacagtgctgcttttcgaggctgacaccataactttacgacagaccatcactacctttgggtcattgaagaccatccagatccccgagcacttaatggctcacgcaagctcagccaacataggcccattcctggagaaaaggggctgcatcagcatgcccgaacagaagagtgcgagcggcatcgtagctgttcccttctcagagtggcttctcggctccaagcccgcttccggttatcaagcaccctatatcccaagtacggaccctcaggactggctcacccagaagcagacactggagaatagccaaacatcatcgcgagcatgcaacttctttaataatgtgggcggaaacctgaaggggctggaaaactggttgttaaagtccgaaaaatctagctatcagaaatgcaacagtcactctaccacttcatcattctctatagaaatggagaaggttggcgatcaggaactcccagaccaggatgagatggatctttccgattggctggtgacccctcaggaaagtcacaaactgagaaagccagaaaacggctcccgggagacctccgagaagttcaagttgctgtttcagagctacaacgtgaatgactggctcgtgaaaacagatagttgcaccaactgtcaggggaaccagcccaaaggagtggaaattgaaaatctgggcaatttaaagtgcctcaacgatcacctagaagccaagaagcccctatcgacaccaagcatggtgactgaggactggttggtccaaaaccaccaggatccgtgcaaggtggaggaggtgtgccgtgccaacgagccctgtacttcctttgctgaatgtgtctgcgacgagaattgcgaaaaggaggctctgtacaaatggttgttgaaaaaggaaggaaaggataaaaacggaatgccagtggaaccgaaacccgaaccagaaaagcataaggacagcctcaacatgtggctctgccctcgcaaagaggttatcgagcagacaaaggcgcctaaagctatgaccccttctagaattgcggactcatttcaggtcatcaagaacagccccctgagcgagtggctgatcaggccaccatacaaggaggggagccccaaagaagtgccgggaacggaagatcgcgctggcaagcaaaaatttaagtccccaatgaacacaagctggtgcagcttcaatacagccgattgggtgctgccgggaaaaaagatgggcaaccttagccagctgtcttctggcgaggacaaatggcttttgagaaagaaagcacaggaggtcctgcttaattctcccctgcaggaagagcacaacttcccgcctgaccattatggccttcccgcagtgtgcgatttgttcgcttgcatgcagctcaaagtggataaggaaaagtggctataccggactcctctacagatgtag

SEQ ID NO: 156088 - DNA, 795 bp, Artificial Sequence
  derived and/or modified sequence
tgatgcacacctgcttgggcagcagagttggattcagtgagtaaacaaaaaaaaaatccgaagcctacctttaaaaaaaaaactgaagagagaacctgtgaggttaagaaggtgagcagactcggctctctgacacttaagcctgaagactctacagtgcttcttttcgaagctgacaccatcactctgcgacagacaattaccaccttcggctctttgaaaaccatacagattcctgagcacctgatggctcacgcctcatcagctaatatcggtccattcttagagaaaaggggttgcatcagtatgcccgaacagaaaagcgcttctgggatcgtagccgtgccattctccgagtggttactggggagcaagcccgcttccgggtaccaagcaccatatataccctccacggacccacaagattggctgactcagaagcagaccctggagaattcccagacaagtagtagagcctgtaattttttcaataacgtcgggggtaacctgaagggcctcgagaactggctcttgaagtctgagaagagctcctaccagaagtgtaactcccacagtacaacgagttcgtttagcatcgagatggaaaaggtgggagaccaggagctgcccgatcaggatgagatggacctgtcggattggctggtgacaccccaagagtcgcacaaactgcggaaacctgaaaacgggtcgagggagaccagcgagaagtttaaattgctgttccagagctacaacgttaatgactggctcgtcaagacggacagctgcacctag

SEQ ID NO: 156089 - DNA, 1845 bp, Artificial Sequence
  derived and/or modified sequence
atgaacacatttcaagatcaaagcggatcatcctcgaatcgtgaaccgctcctgagatgcagtgatgccagacgagatctggaattagccatcggaggggtcctgagggctgaacagcagatcaaggacaatctgcgcgaggttaaggcccaaattcattcctgtatctctagacacctcgaatgtctcaggtcacgagaggtgtggctttatgagcaagtagacctaatttatcagctgaaggaggagaccctccagcagcaggctcagcagctatactccctactagggcagttcaactgcctgacccaccagctggaatgtacccagaacaaggacctggctaaccaggtttcagtttgcctggagcgtttagggtctctcactttaaagcccgaagatagcacggtcctcctgttcgaggctgatacaattactttgcgacaaaccattactacctttgggagcttgaagacgattcaaatcccagagcatctgatggcacacgctagttccgcgaacataggcccattcctcgagaagagaggctgtatctctatgccagagcaaaaaagcgcgagcggcatagttgcagttccttttagtgagtggcttctaggcagtaagcctgcctctggctatcaggcaccatacatcccgtcaactgatccacaggattggttgacccagaagcagaccctagagaacagccaaacaagctctagagcctgcaattttttcaataatgtcggagggaacctgaaagggctcgagaattggctgctgaaatctgagaaatccagctaccagaagtgcaactctcattccacaacttcttccttctctattgaaatggagaaggtgggggatcaggaactacccgatcaagatgaaatggatctttcagattggctggtcactccgcaggaaagtcataagttgcgtaaacctgaaaatggctcccgcgagaccagcgagaagttcaagctgcttttccagtcatataacgtgaacgactggctggtaaagacagattcctgtaccaactgtcagggcaatcaaccaaagggagtggagatcgagaatctgggtaacctgaaatgccttaacgaccacttggaagccaagaagccactgagcacaccttcaatggtgactgaggattggcttgtgcagaaccatcaagacccatgcaaggtggaggaagtgtgccgggcaaacgagccctgtacttcatttgcagagtgcgtatgcgatgagaattgtgagaaggaagctctgtataagtggctgctaaaaaaggaggggaaagacaagaatggtatgccggtagagcccaagcctgaacccgaaaaacataaagattcactgaacatgtggctgtgccctcgtaaggaggtgattgaacaaacaaaagcacccaaagccatgacgcccagtaggatcgccgattctttccaggttataaagaattcgccattgtcagagtggctgatccgcccaccatacaaggaggggtcgcccaaagaagtgccgggaaccgaggacagagcaggcaagcaaaagttcaaaagtcctatgaacacatcttggtgctcatttaatacagcagactgggtgctcccaggtaaaaaaatgggtaacctgagtcagctgtcatccggcgaagacaagtggctgcttcgtaaaaaggcccaggaggtgctgcttaactcccccctgcaagaagagcacaattttccccctgatcattacggccttcccgctgtgtgtgatctgttcgcctgtatgcagctgaaagtggataaagagaaatggctctacagaactcctttgcaaatgtag

SEQ ID NO: 156090 - DNA, 864 bp, Artificial Sequence
  derived and/or modified sequence
atgaacaccttccaggaccagagcggcagcagcagcaacagagagcccctgctgagatgcagcgacgccagaagagacctggagctggccatcggcggcgtgctgagagccgagcagcagatcaaggacaacctgagagaggtgaaggcccagatccacagctgcatcagcagacacctggagtgcctgagaagcagagaggtgtggctgtacgagcaggtggacctgatctaccagctgaaggaggagaccctgcagcagcaggcccagcagctgtacagcctgctgggccagttcaactgcctgacccaccagctggagtgcacccagaacaaggacctggccaaccaggtgagcgtgtgcctggagagactgggcagcctgaccctgaagcccgaggacagcaccgtgctgctgttcgaggccgacaccatcaccctgagacagaccatcaccaccttcggcagcctgaagaccatccagatccccgagcacctgatggcccacgccagcagcgccaacatcggccccttcctggagaagagaggctgcatcagcatgcccgagcagaagagcgccagcggcatcgtggccgtgcccttcagcgagtggctgctgggcagcaagcccgccagcggctaccaggccccctacatccccagcaccgacccccaggactggctgacccagaagcagaccctggagaacagccagcaggaggtgctgctgaacagccccctgcaggaggagcacaacttcccccccgaccactacggcctgcccgccgtgtgcgacctgttcgcctgcatgcagctgaaggtggacaaggagaagtggctgtacagaacccccctgcaggtgtag

SEQ ID NO: 156091 - DNA, 1728 bp, Artificial Sequence
  derived and/or modified sequence
atgaacaccttccaggaccagagcggcagcagcagcaacagagagcccctgctgagatgcagcgacgccagaagagacctggagctggccatcggcggcgtgctgagagccgagcagcagatcaaggacaacctgagagaggtgaaggcccagatccacagctgcatcagcagacacctggagtgcctgagaagcagagaggtgtggctgtacgagcaggtggacctgatctaccagctgaaggaggagaccctgcagcagcaggcccagcagctgtacagcctgctgggccagttcaactgcctgacccaccagctggagtgcacccagaacaaggacctggccaaccaggtgagcgtgtgcctggagagactgggcagcctgaccctgaagcccgaggacagcaccgtgctgctgttcgaggccgacaccatcaccctgagacagaccatcaccaccttcggcagcctgaagaccatccagatccccgagcacctgatggcccacgccagcagcgccaacatcggccccttcctggagaagagaggctgcatcagcatgcccgagcagaagagcgccagcggcatcgtggccgtgcccttcagcgagtggctgctgggcagcaagcccgccagcggctaccaggccccctacatccccagcaccgacccccaggactggctgacccagaagcagaccctggagaacagccagaccagcagcagagcctgcaacttcttcaacaacgtgggcggcaacctgaagggcctggagaactggctgctgaagagcgagaagagcagctaccagaagtgcaacagccacagcaccaccagcagcttcagcatcgagatggagaaggtgggcgaccaggagctgcccgaccaggacgagatggacctgagcgactggctggtgaccccccaggagagccacaagctgagaaagcccgagaacggcagcagagagaccagcgagaagttcaagctgctgttccagagctacaacgtgaacgactggctggtgaagaccgacagctgcaccaactgccagggcaaccagcccaagggcgtggagatcgagaacctgggcaacctgaagtgcctgaacgaccacctggaggccaagaagcccctgagcacccccagcatggtgaccgaggactggctggtgcagaaccaccaggacccctgcaaggtggaggaggtgtgcagagccaacgagccctgcaccagcttcgccgagtgcgtgtgcgacgagaactgcgagaaggaggccctgtacaagtggctgctgaagaaggagggcaaggacaagaacggcatgcccgtggagcccaagcccgagcccgagaagcacaaggacagcctgaacatgtggctgtgccccagaaaggaggtgatcgagcagaccaaggcccccaaggccatgacccccagcagaatcgccgacagcttccaggtgatcaagaacagccccctgagcgagtggctgatcagacccccctacaaggagggcagccccaaggaggtgcccggcaccgaggacagagccggcaagcagaagtactacctgatccacctgtacagaagaaacatcaccagcccccagaccatcatggccagcctgcagttcgtgatcagcctgcccgtgtgcagcctgaagctgatcaagagaagcggctacatcgagctgctgtacagatgcgagggcatggacaagagctag

SEQ ID NO: 156092 - DNA, 1347 bp, Artificial Sequence
  derived and/or modified sequence
atggcccacgccagcagcgccaacatcggccccttcctggagaagagaggctgcatcagcatgcccgagcagaagagcgccagcggcatcgtggccgtgcccttcagcgagtggctgctgggcagcaagcccgccagcggctaccaggccccctacatccccagcaccgacccccaggactggctgacccagaagcagaccctggagaacagccagaccagcagcagagcctgcaacttcttcaacaacgtgggcggcaacctgaagggcctggagaactggctgctgaagagcgagaagagcagctaccagaagtgcaacagccacagcaccaccagcagcttcagcatcgagatggagaaggtgggcgaccaggagctgcccgaccaggacgagatggacctgagcgactggctggtgaccccccaggagagccacaagctgagaaagcccgagaacggcagcagagagaccagcgagaagttcaagctgctgttccagagctacaacgtgaacgactggctggtgaagaccgacagctgcaccaactgccagggcaaccagcccaagggcgtggagatcgagaacctgggcaacctgaagtgcctgaacgaccacctggaggccaagaagcccctgagcacccccagcatggtgaccgaggactggctggtgcagaaccaccaggacccctgcaaggtggaggaggtgtgcagagccaacgagccctgcaccagcttcgccgagtgcgtgtgcgacgagaactgcgagaaggaggccctgtacaagtggctgctgaagaaggagggcaaggacaagaacggcatgcccgtggagcccaagcccgagcccgagaagcacaaggacagcctgaacatgtggctgtgccccagaaaggaggtgatcgagcagaccaaggcccccaaggccatgacccccagcagaatcgccgacagcttccaggtgatcaagaacagccccctgagcgagtggctgatcagacccccctacaaggagggcagccccaaggaggtgcccggcaccgaggacagagccggcaagcagaagttcaagagccccatgaacaccagctggtgcagcttcaacaccgccgactgggtgctgcccggcaagaagatgggcaacctgagccagctgagcagcggcgaggacaagtggctgctgagaaagaaggcccaggaggtgctgctgaacagccccctgcaggaggagcacaacttcccccccgaccactacggcctgcccgccgtgtgcgacctgttcgcctgcatgcagctgaaggtggacaaggagaagtggctgtacagaacccccctgcagatgtag

SEQ ID NO: 156093 - DNA, 1545 bp, Artificial Sequence
  derived and/or modified sequence
atgaacagatggaccctgttcatcagcctgaagagaagacacttcaacagcagactgagcagcagcaccagactgggcagcctgaccctgaagcccgaggacagcaccgtgctgctgttcgaggccgacaccatcaccctgagacagaccatcaccaccttcggcagcctgaagaccatccagatccccgagcacctgatggcccacgccagcagcgccaacatcggccccttcctggagaagagaggctgcatcagcatgcccgagcagaagagcgccagcggcatcgtggccgtgcccttcagcgagtggctgctgggcagcaagcccgccagcggctaccaggccccctacatccccagcaccgacccccaggactggctgacccagaagcagaccctggagaacagccagaccagcagcagagcctgcaacttcttcaacaacgtgggcggcaacctgaagggcctggagaactggctgctgaagagcgagaagagcagctaccagaagtgcaacagccacagcaccaccagcagcttcagcatcgagatggagaaggtgggcgaccaggagctgcccgaccaggacgagatggacctgagcgactggctggtgaccccccaggagagccacaagctgagaaagcccgagaacggcagcagagagaccagcgagaagttcaagctgctgttccagagctacaacgtgaacgactggctggtgaagaccgacagctgcaccaactgccagggcaaccagcccaagggcgtggagatcgagaacctgggcaacctgaagtgcctgaacgaccacctggaggccaagaagcccctgagcacccccagcatggtgaccgaggactggctggtgcagaaccaccaggacccctgcaaggtggaggaggtgtgcagagccaacgagccctgcaccagcttcgccgagtgcgtgtgcgacgagaactgcgagaaggaggccctgtacaagtggctgctgaagaaggagggcaaggacaagaacggcatgcccgtggagcccaagcccgagcccgagaagcacaaggacagcctgaacatgtggctgtgccccagaaaggaggtgatcgagcagaccaaggcccccaaggccatgacccccagcagaatcgccgacagcttccaggtgatcaagaacagccccctgagcgagtggctgatcagacccccctacaaggagggcagccccaaggaggtgcccggcaccgaggacagagccggcaagcagaagttcaagagccccatgaacaccagctggtgcagcttcaacaccgccgactgggtgctgcccggcaagaagatgggcaacctgagccagctgagcagcggcgaggacaagtggctgctgagaaagaaggcccaggaggtgctgctgaacagccccctgcaggaggagcacaacttcccccccgaccactacggcctgcccgccgtgtgcgacctgttcgcctgcatgcagctgaaggtggacaaggagaagtggctgtacagaacccccctgcagatgtag

SEQ ID NO: 156094 - DNA, 795 bp, Artificial Sequence
  derived and/or modified sequence
tgatgcacccccgcctgggccgccgagctggacagcgtgagcaagcagaagaagaaccccaagcccaccttcaagaagaagaccgaggagagaacctgcgaggtgaagaaggtgagcagactgggcagcctgaccctgaagcccgaggacagcaccgtgctgctgttcgaggccgacaccatcaccctgagacagaccatcaccaccttcggcagcctgaagaccatccagatccccgagcacctgatggcccacgccagcagcgccaacatcggccccttcctggagaagagaggctgcatcagcatgcccgagcagaagagcgccagcggcatcgtggccgtgcccttcagcgagtggctgctgggcagcaagcccgccagcggctaccaggccccctacatccccagcaccgacccccaggactggctgacccagaagcagaccctggagaacagccagaccagcagcagagcctgcaacttcttcaacaacgtgggcggcaacctgaagggcctggagaactggctgctgaagagcgagaagagcagctaccagaagtgcaacagccacagcaccaccagcagcttcagcatcgagatggagaaggtgggcgaccaggagctgcccgaccaggacgagatggacctgagcgactggctggtgaccccccaggagagccacaagctgagaaagcccgagaacggcagcagagagaccagcgagaagttcaagctgctgttccagagctacaacgtgaacgactggctggtgaagaccgacagctgcacctag

SEQ ID NO: 156095 - protein, 271 aa, Artificial Sequence
  derived and/or modified sequence
MFRDFGEPGPSSGNGGGYGGPAQPPAAAQAAQQKFHLVPSINTMSGSQELQWMVQPHFLGPSSYPRPLTYPQYSPPQPRPGVIRALGPPPGVRRRPCEQISPEEEERRRVRRERNKLAAAKCRNRRKELTDFLQAETDKLEDEKSGLQREIEELQKQKERLELVLEAHRPICKIPEGAKEGDTGSTSGTSSPPAPCRPVPCISLSPGPVLEPEALHTPTLMTTPSLTPFTPSLVFTYPSTPEPCASAHRKSSSSSGDPSSDPLGSPTLLAL

SEQ ID NO: 156096 - protein, 116 aa, Artificial Sequence
  derived and/or modified sequence
MFRDFGEPGPSSGNGGGYGGPAQPPAAAQAAQQKFHLVPSINTMSGSQELQWMVQPHFLGPSSYPRPLTYPQYSPPQPRPGVIRALGPPPGVRRRPCEQISPEEEESWQPRDFVDP

SEQ ID NO: 156097 - DNA, 1668 bp, Artificial Sequence
  derived and/or modified sequence
acgggccaaggcggcgcgtctcgggggtggagcctggaggtgaccgcgccgctgcaacgcccccaccccccgcggtcgcagtggttcagcccgagaacttttcattcataaaaagaaaagactccgcacggcgcgggtgagtcagaacccagcagccgtgtaccccgcagagccgccagccccgggcatgttccgagacttcggggaacccggcccgagctccgggaacggcggcgggtacggcggccccgcgcagcccccggccgcagcgcaggcagcccagcagaagttccacctggtgccaagcatcaacaccatgagtggcagtcaggagctgcagtggatggtacagcctcatttcctggggcccagcagttaccccaggcctctgacctaccctcagtacagccccccacaaccccggccaggagtcatccgggccctggggccgcctccaggggtacgtcgaaggccttgtgaacagatcagcccggaggaagaggagcgccgccgagtaaggcgcgagcggaacaagctggctgcggccaagtgcaggaaccggaggaaggaactgaccgacttcctgcaggcggagactgacaaactggaagatgagaaatctgggctgcagcgagagattgaggagctgcagaagcagaaggagcgcctagagctggtgctggaagcccaccgacccatctgcaaaatcccggaaggagccaaggagggggacacaggcagtaccagtggcaccagcagcccaccagccccctgccgccctgtaccttgtatctccctttccccagggcctgtgcttgaacctgaggcactgcacacccccacactcatgaccacaccctccctaactcctttcacccccagcctggtcttcacctaccccagcactcctgagccttgtgcctcagctcatcgcaagagtagcagcagcagcggagacccatcctctgacccccttggctctccaaccctcctcgctttgtgaggcgcctgagccctactccctgcagatgccaccctagccaatgtctcctccccttcccccaccggtccagctggcctggacagtatcccacatccaactccagcaacttcttctccatccctctaatgagactgaccatattgtgcttcacagtagagccagcttggggccaccaaagctgcccactgtttctcttgagctggcctctctagcacaatttgcactaaatcagagacaaaatatttcccatttgtgccagaggaatcctggcagcccagagactttgtagatccttagaggtcctctggagccctaaccccttccagatcactgccacactctccatcaccctcttcctgtgatccacccaaccctatctcctgacagaaggtgccactttacccacctagaacactaactcaccagccccactgccagcagcagcaggtgattggaccaggccattctgccgccccctcctgaaccgcacagctcaggaggcgcccttggcttctgtgatgagctgatctgcggatctcagctttgagaagccttcagctccagggaatccaagcctccacagcgagggcagctgctatttattttcctaaagagagtatttttatacaaacctaccaaaatggaataaaaggcttgaagctgtg

SEQ ID NO: 156098 - DNA, 1669 bp, Artificial Sequence
  derived and/or modified sequence
acgggccaaggcggcgcgtctcgggggtggagcctggaggtgaccgcgccgctgcaacgcccccaccccccgcggtcgcagtggttcagcccgagaacttttcattcataaaaagaaaagactccgcacggcgcgggtgagtcagaacccagcagccgtgtaccccgcagagccgccagccccgggcatgttccgagacttcggggaacccggcccgagctccgggaacggcggcgggtacggcggccccgcgcagcccccggccgcagcgcaggcagcccagcagaagttccacctggtgccaagcatcaacaccatgagtggcagtcaggagctgcagtggatggtacagcctcatttcctggggcccagcagttaccccaggcctctgacctaccctcagtacagccccccacaaccccggccaggagtcatccgggccctggggccgcctccaggggtacgtcgaaggccttgtgaacagatcagcccggaggaagaggagcgccgccgagtaaggcgcgagcggaacaagctggctgcggccaagtgcaggaaccggaggaaggaactgaccgacttcctgcaggcggagactgacaaactggaagatgagaaatctgggctgcagcgagagattgaggagctgcagaagcagaaggagcgcctagagctggtgctggaagcccaccgacccatctgcaaaatcccggaaggagccaaggagggggacacaggcagtaccagtggcaccagcagcccaccagccccctgccgccctgtaccttgtatctccctttccccagggcctgtgcttgaacctgaggcactgcacacccccacactcatgaccacaccctccctaactcctttcacccccagcctggtcttcacctaccccagcactcctgagccttgtgcctcagctcatcgcaagagtagcagcagcagcggagacccatcctctgacccccttggctctccaaccctcctcgctttgtgaggcgcctgagccctactccctgcagatgccaccctagccaatgtctcctccccttcccccaccggtccagctggcctggacagtatcccacatccaactccagcaacttcttctccatccctctaatgagactgaccatattgtgcttcacagtagagccagcttggggccaccaaagctgcccactgtttctcttgagctggcctctctagcacaatttgcactaaatcagagacaaaatatttcccatttgtgccagaggaatcctggcagcccagagactttgtagatccttagaggtcctctggagccctaaccccttccagatcactgccacactctccatcaccctcttcctgtgatccacccaaccctatctcctgacagaaggtgccactttacccacctagaacactaactcaccagccccactgccagcagcagcaggtgattggaccaggccattctgccgccccctcctgaaccgcacagctcaggaggcgcccttggcttctgtgatgagctgatctgcggatctcagctttgagaagccttcagctccagggaatccaagcctccacagcgagggcagctgctatttattttcctaaagagagtatttttatacaaacctaccaaaatggaataaaaggcttgaagctgtgg

SEQ ID NO: 156099 - DNA, 970 bp, Artificial Sequence
  derived and/or modified sequence
gagtcagaacccagcagccgtgtaccccgcagagccgccagccccgggcatgttccgagacttcggggaacccggcccgagctccgggaacggcggcgggtacggcggccccgcgcagcccccggccgcagcgcaggcagcccagcagaagttccacctggtgccaagcatcaacaccatgagtggcagtcaggagctgcagtggatggtacagcctcatttcctggggcccagcagttaccccaggcctctgacctaccctcagtacagccccccacaaccccggccaggagtcatccgggccctggggccgcctccaggggtacgtcgaaggccttgtgaacagatcagcccggaggaagaggaatcctggcagcccagagactttgtagatccttagaggtcctctggagccctaaccccttccagatcactgccacactctccatcaccctcttcctgtgatccacccaaccctatctcctgacagaaggtgccactttacccacctagaacactaactcaccagccccactgccagcagcagcaggtgattggaccaggccattctgccgccccctcctgaaccgcacagctcaggaggcgcccttggcttctgtgatgagctgatctgcggatctcagctttgagaagccttcagctccagggaatccaagcctccacagcgagggcagctgctatttattttcctaaagagagtatttttatacaaacctaccaaaatggaataaaaggcttgaagctgtggcctgagtgcctcactggacccagaggccaatgggagagtatttggagccctaggtcccagccttagctctacagactcactgcatgaccttggacaaattctttgatatttttggactttgtcttatctgacaagtggggctacatccgctcggcctcatctccgggactgaggggagacagtcctctggggtaaaagcga

SEQ ID NO: 156100 - DNA, 816 bp, Artificial Sequence
  derived and/or modified sequence
atgtttcgcgatttcggtgagccaggcccttcctccggaaatggcggtggatacggcggaccagctcaaccgcccgcagccgcacaagcagcccagcagaaatttcaccttgtgccgagtattaatactatgtctggctcccaggagctgcagtggatggtgcagccacactttctgggtccaagctcctacccgcgcccactgacctatccacaatatagtccgccccagccacgacctggtgttatcagagctctaggtccaccgccaggagttcggagacgcccttgcgagcagataagtcctgaggaggaggaacgaagaagggttagacgtgagaggaacaagctcgctgctgctaaatgccgtaacaggcgcaaggaactaactgactttctccaagccgaaaccgacaaattggaagacgagaagtcgggactgcaacgcgagatcgaagagctccagaaacaaaaggaacggctagaactcgtcttagaggctcatcggccaatctgcaaaataccagaaggggccaaggaaggggataccggcagcacgtctgggacaagctcaccaccagctccatgccgccccgtgccttgcatcagcctctcccctggaccagtactcgaaccagaggccctacatacgccaacactaatgacaacaccctcactgacaccttttaccccgagccttgtgttcacttacccctccacacccgagccctgcgcaagcgctcacaggaaaagctcctctagtagtggcgacccatccagtgacccactgggtagccccacacttttggccctgtag

SEQ ID NO: 156101 - DNA, 351 bp, Artificial Sequence
  derived and/or modified sequence
atgttccgcgacttcggcgaacctggcccatcaagcgggaacggaggaggctatgggggaccagcccagccacctgccgcggcccaggcagctcaacagaagtttcacctggtccccagcatcaataccatgtctggctcgcaggaacttcaatggatggttcaaccgcattttctgggaccctcctcttaccctaggcccttgacgtatccacaatactcaccaccccaacccaggcccggagttatccgggcactgggtccacctccaggcgtgcgacgcaggccatgcgaacagatttcacctgaagaagaggagtcgtggcagccccgggatttcgttgacccgtag

SEQ ID NO: 156102 - DNA, 816 bp, Artificial Sequence
  derived and/or modified sequence
atgttccgggactttggagagcccggccccagcagtggaaatggaggcggctacggcggccctgcccagcccccagctgctgcccaggccgcccagcagaagttccacctggtgcccagcatcaacaccatgagcggcagccaggagctgcagtggatggtgcagccccacttcctgggccccagcagctacccccggcccctgacctacccccagtacagccccccccagcccaggcctggggtcatccgggccctgggccccccacctggggtgagaagaagaccctgtgagcagatcagccctgaggaggaggagcggcggcgggtgagaagagagaggaacaagctggccgccgccaagtgcaggaacagaaggaaggagctgacagacttcctgcaggccgagacagacaagctggaggatgagaagagcggcctgcagcgggagattgaggagctgcagaagcagaaggagcggctggagctggtgctggaggcccaccggcccatctgcaagatccctgagggcgccaaggagggggacaccggcagcaccagcggcaccagcagccccccagccccctgcaggcctgtgccctgcatcagcctgagccctggccctgtgctggagcctgaggccctgcacacccccaccctgatgaccacccccagcctgacccccttcacccccagcctggtgttcacctaccccagcaccccagagccctgtgccagcgcccacaggaagagcagcagcagcagcggggaccccagcagtgaccccctgggcagccccaccctgctggccctgtag

SEQ ID NO: 156103 - DNA, 351 bp, Artificial Sequence
  derived and/or modified sequence
atgttccgggactttggagagcccggccccagcagtggaaatggaggcggctacggcggccctgcccagcccccagctgctgcccaggccgcccagcagaagttccacctggtgcccagcatcaacaccatgagcggcagccaggagctgcagtggatggtgcagccccacttcctgggccccagcagctacccccggcccctgacctacccccagtacagccccccccagcccaggcctggggtcatccgggccctgggccccccacctggggtgagaagaagaccctgtgagcagatcagccctgaggaggaggagagctggcagccccgggactttgtggacccctag

SEQ ID NO: 156104 - DNA, 816 bp, Artificial Sequence
  derived and/or modified sequence
atgttccgggacttcggcgagcccggccccagcagcggcaacggcggaggatacggaggccctgcacaaccaccggctgcagctcaggcagcccagcagaagtttcacctcgttccttccatcaacacgatgtcaggtagccaagaactgcagtggatggttcagccccatttcctggggccgagttcctatcccaggcctttaacctacccacagtatagcccccctcagcctcgacctggagtgatacgtgctctgggccccccccctggcgtcaggcgacgtccgtgtgagcagattagcccggaagaagaagagcgacgccgggtacgccgggaaagaaacaaattagccgctgcaaaatgcagaaatagacgcaaggagctcacggacttcctccaggctgaaaccgataagctcgaggacgaaaagtcaggcttacagcgtgagatagaggaactgcaaaagcagaaagagcggctggaattagtcctggaggcacatagacccatctgcaaaattcctgagggagccaaggagggtgatacgggttcaacatcgggaacctcctctccacccgctccatgccgccctgtcccatgcatctcactgtccccaggaccagtactcgaaccagaggcccttcatacccccactctgatgaccacaccgtcactaactccattcaccccctctttggtgtttacatacccatcaactcccgagccctgtgcgagcgcccaccgtaaatcctcctcttcctctggagaccccagcagtgatcctttgggctctccgacactgctggctctttag

SEQ ID NO: 156105 - DNA, 351 bp, Artificial Sequence
  derived and/or modified sequence
atgttccgggacttcggcgagcccggccccagcagcggcaacggcggtggctatgggggacccgcccagccacccgccgctgcccaggcggcgcaacagaaattccacttggttccctctattaataccatgagcggtagccaggagctgcagtggatggtgcagccccacttcctgggcccctccagctacccaagacccttgacttatccccaatactctcccccgcagccaaggcctggtgtgatcagagcattaggtcctccaccaggagttcgtcgccggccttgtgagcagatcagccctgaagaagaggagagttggcagccgagggattttgtggatccatag

SEQ ID NO: 156106 - DNA, 816 bp, Artificial Sequence
  derived and/or modified sequence
atgttccgtgatttcggcgagccaggccctagcagcggcaacggaggaggatacggcggtccagcccaacctcccgcagctgcccaagccgctcaacagaagtttcacctagtgccaagcatcaacaccatgtctgggtctcaggagctgcagtggatggtgcagccgcatttcttggggcctagcagctacccgagaccactaacctacccgcagtattcccccccacagccccgacccggtgtgatacgcgcattgggccctccacccggagtgagacggagaccctgcgaacaaatctcaccagaagaagaggaaaggcggagagtgcggagagagcgcaataagcttgccgctgctaagtgccgaaatagacggaaagagcttacggatttcctccaggccgagactgacaaattggaggatgagaagtccgggcttcaaagggagattgaggaactccagaagcagaaagagcggctggagcttgtactggaggcgcaccgtcctatatgcaaaattcccgagggcgctaaagagggcgataccggaagcacatccgggacttctagccctcctgctccctgtaggcctgttccttgtattagtttatcccctggacccgtccttgaaccagaagccttgcacacccccacacttatgactaccccatcactgacaccctttacaccctctcttgtgtttacttacccttccacacctgagccctgtgcatcagcgcatcggaagtcatcgtcgagtagcggcgaccccagtagcgacccattgggctcacccactctgctggccctctag

SEQ ID NO: 156107 - DNA, 351 bp, Artificial Sequence
  derived and/or modified sequence
atgttccgagactttggcgagcctgggccttctagcgggaacggagggggttacgggggtcccgctcagccacctgccgcagcccaggctgcccagcaaaagttccacttggttccgtccatcaataccatgtccggatctcaagagctgcagtggatggtccagccacactttctaggccctagttcataccctcgccctctcacttatccccaatactccccccctcagcccaggccaggagtgattcgcgctctgggcccaccacctggggtgcggaggcgtccatgtgaacagatctcccctgaggaagaagagagctggcaacctcgggactttgtagacccgtag

SEQ ID NO: 156108 - DNA, 816 bp, Artificial Sequence
  derived and/or modified sequence
atgttcagagacttcggcgagcccggccccagcagcggcaacggcggcggctacggcggccccgcccagccccccgccgccgcccaggccgcccagcagaagttccacctggtgcccagcatcaacaccatgagcggcagccaggagctgcagtggatggtgcagccccacttcctgggccccagcagctaccccagacccctgacctacccccagtacagccccccccagcccagacccggcgtgatcagagccctgggccccccccccggcgtgagaagaagaccctgcgagcagatcagccccgaggaggaggagagaagaagagtgagaagagagagaaacaagctggccgccgccaagtgcagaaacagaagaaaggagctgaccgacttcctgcaggccgagaccgacaagctggaggacgagaagagcggcctgcagagagagatcgaggagctgcagaagcagaaggagagactggagctggtgctggaggcccacagacccatctgcaagatccccgagggcgccaaggagggcgacaccggcagcaccagcggcaccagcagcccccccgccccctgcagacccgtgccctgcatcagcctgagccccggccccgtgctggagcccgaggccctgcacacccccaccctgatgaccacccccagcctgacccccttcacccccagcctggtgttcacctaccccagcacccccgagccctgcgccagcgcccacagaaagagcagcagcagcagcggcgaccccagcagcgaccccctgggcagccccaccctgctggccctgtag

SEQ ID NO: 156109 - DNA, 351 bp, Artificial Sequence
  derived and/or modified sequence
atgttcagagacttcggcgagcccggccccagcagcggcaacggcggcggctacggcggccccgcccagccccccgccgccgcccaggccgcccagcagaagttccacctggtgcccagcatcaacaccatgagcggcagccaggagctgcagtggatggtgcagccccacttcctgggccccagcagctaccccagacccctgacctacccccagtacagccccccccagcccagacccggcgtgatcagagccctgggccccccccccggcgtgagaagaagaccctgcgagcagatcagccccgaggaggaggagagctggcagcccagagacttcgtggacccctag

SEQ ID NO: 156110 - protein, 248 aa, Artificial Sequence
  derived and/or modified sequence
MFRFMRDVEPEDPMFLMDPFAIHRQHMSRMLSGGFGYSPFLSITDGNMPGTRPASRRMQQAGAVSPFGMLGMSGGFMDMFGMMNDMIGNMEHMTAGGNCQTFSSSTVISYSNTGDGAPKVYQETSEMRSAPGGIRETRRTVRDSDSGLEQMSIGHHIRDRAHILQRSRNHRTGDQEERQDYINLDESEAAAFDDEWRRETSRFRQQRPLEFRRLESSGAGGRRAEGPPRLAIQGPEDSPSRQSRRYDW

SEQ ID NO: 156111 - DNA, 747 bp, Artificial Sequence
  derived and/or modified sequence
atgttccggttcatgcgcgatgtcgagcccgaagatccaatgtttttgatggatccctttgcaattcatcggcagcatatgtcacggatgttgagcgggggatttgggtactccccattcctgagcatcacagacgggaacatgcctgggacacgccctgcgtcaaggcggatgcaacaggccggggccgtgagcccattcggcatgctaggaatgtcagggggctttatggatatgtttggaatgatgaatgatatgatcggaaacatggagcatatgaccgccggtggaaactgccagactttttcctcctctacagtcatttcttacagtaataccggggatggagctccgaaggtctatcaagagacgtcagaaatgcggtccgcaccaggcggaattcgcgaaacaaggaggacagttcgggatagcgactcgggactagagcagatgtctatcggacaccacatccgggatagggcacatattctccagaggagccgcaaccatcgaactggtgaccaggaggagagacaggactacatcaaccttgatgagtctgaggccgccgccttcgacgacgaatggcgtagggagacatcacgcttcagacagcagaggcctcttgaatttcgccggctagaaagcagcggggccggagggaggcgtgcagagggtccccccagacttgctatccagggaccagaggacagcccctctcggcagtccaggagatatgattggtag

SEQ ID NO: 156112 - DNA, 747 bp, Artificial Sequence
  derived and/or modified sequence
atgttccggtttatgagagacgttgaacccgaagaccctatgttcttaatggatcctttcgccatacatagacagcacatgtccagaatgctgagcggcggattcgggtatagcccctttctttcaatcacagatggtaatatgcctggtactcgccccgcgagccgcaggatgcagcaggctggcgccgtgtcgccattcggtatgctggggatgtctggcggatttatggatatgtttggaatgatgaatgatatgatcggcaacatggagcacatgacggccggaggcaactgtcaaactttctcgtcgagtactgtgatcagttactccaacactggcgacggggcacctaaagtataccaggaaacttctgagatgagatctgcacccggggggattcgagagactcggcgcaccgtgcgggacagcgattcagggctggaacagatgtcgattggacaccacattcgagatcgagcccacattctgcagcgttctagaaatcacagaacaggggaccaggaggagcgccaggattatattaatctggacgagagtgaagccgcagccttcgatgacgaatggaggcgagaaacaagcagattcagacagcagaggccgctggagtttagaagactagaatcatctggcgcgggaggtaggcgggcagagggccccccccggctggccatacagggtcctgaggattcaccgtcaagacaatcgcgacggtatgactggtag

SEQ ID NO: 156113 - DNA, 747 bp, Artificial Sequence
  derived and/or modified sequence
atgtttaggtttatgcgagatgttgagccagaagatccgatgtttctaatggatccgttcgctattcacagacagcatatgtccaggatgctgagcggaggattcgggtactctcccttcctgtcaatcacagatggcaatatgcccggtacccgacccgcgagtagacgcatgcaacaagctggggctgtgtccccattcggcatgcttggcatgtccggcggttttatggatatgtttggaatgatgaatgacatgattggtaacatggagcatatgactgcagggggtaattgccagacgttctccagctctactgtgatttcctacagcaacactggggatggagcccctaaggtgtaccaggaaacgtcagagatgcggagcgccccaggggggatccgcgaaacacgacgcacagtgcgggattccgatagcggtctggaacaaatgtcaatcggccatcatattagagacagggcccacattctacagagatcccggaaccacagaactggcgaccaagaggagcggcaggattacatcaatttagacgaaagcgaagcggccgcgttcgatgacgagtggagacgtgaaacttcccgcttcagacagcagcgcccactcgagtttcgccgcttagagagttcgggcgctggagggcgccgtgcagaaggtccaccaaggctggcaatccaggggcccgaggacagcccgagcagacaaagccgccggtatgactggtag

SEQ ID NO: 156114 - DNA, 747 bp, Artificial Sequence
  derived and/or modified sequence
atgtttcggttcatgagagatgtggaacctgaagatcccatgtttctgatggatccattcgctattcaccggcaacacatgagtagaatgttgagcggcggatttgggtactctccattccttagcatcaccgacggcaatatgcccgggacccggccggcttctcgcagaatgcagcaggctggcgcggtgagcccatttggcatgcttggaatgagtggtgggtttatggacatgttcgggatgatgaatgacatgatcggaaacatggaacacatgactgccggcggcaattgccagactttcagctcatctaccgtgatcagttatagcaatactggtgatggagctccaaaagtgtaccaggaaaccagcgagatgagaagcgccccgggggggatccgggagacacgccgaactgtccgcgatagcgactctggactggaacagatgagtatagggcaccacatccgcgatagggcacatattctacaaagatcgcgcaaccatcggaccggtgaccaggaagaaagacaggactacataaacctggatgaatcagaagctgctgcctttgacgatgaatggcgtagagaaacctcgagatttcgtcaacaaagacccctcgaattccggcgcttagagtctagtggcgccggcgggagacgggcggaagggccccctcgtctggctattcaaggccctgaggattctccatccaggcagtcgcggagatacgattggtag

SEQ ID NO: 156115 - DNA, 747 bp, Artificial Sequence
  derived and/or modified sequence
atgttccgcttcatgagagatgtggagcctgaggaccccatgttcctgatggacccctttgccatccaccggcagcacatgagcaggatgctgagcggcggcttcggctacagccccttcctgagcatcacagatggcaacatgcctggcaccaggcctgccagcaggaggatgcagcaggccggggctgtgagccccttcggcatgctgggcatgtctgggggcttcatggacatgtttggcatgatgaatgacatgattggcaacatggagcacatgacagctgggggcaactgccagaccttcagcagcagcaccgtcatctcctacagcaacacaggagatggagcccccaaggtgtaccaggagaccagcgagatgaggtctgcccctgggggcatccgggagaccaggagaacagtgcgggacagcgacagcggcctggagcagatgagcatcggccaccacatccgggaccgggcccacatcctgcagaggagcaggaaccacaggactggagaccaggaggagcggcaggactacatcaacctggatgaaagtgaagctgctgcctttgatgatgagtggaggcgggagaccagccgcttccggcagcagaggcccctggagttccggcggctggagagcagtggagctgggggccggcgggcagagggccccccccggctggccatccagggccctgaggacagccccagccggcagagccgccgctatgactggtag

SEQ ID NO: 156116 - DNA, 1958 bp, Artificial Sequence
  derived and/or modified sequence
aaagctccccccagggatccgccccgcctcgtcgcccacagagcgcccgcctctccccaaggggcatctgcccctcgtcctccagtttccccttgaggagggagagagaacgtgctgcactgcgcccccaggttcaacctccaacccggtccctcccgaagaatggattcctcttctccttctcctcccctgccttatgggagcctcttccagtccacagaacccaaatcgaggttactaatgagctccccttcttcgtgcccaggggacccctctcggcctcaggctctgctcccctgagcttggcccatggccccggcgcccctgggactcggccccagccatctcaccacccgcgccagggggcggggctcccacggcccggccccgggtgggcgggtctatcgtgacgtcacttccgcccgggcctggccgaggttcgggctccgttggccgagggggccgtacggaggtggcagctgtgggaggaggcggcgtggaaggccgaggagctcaagcccggaccaatccccacgttccgggccgcgaccctgaccctgcagcgtaccgggaagcgaaaccggccggatgggccgctgagcccgaatcgggcactgtgtggagccccctggagctgagatcaggatgttccgcttcatgagggacgtggagcctgaggatcccatgttcctgatggatccctttgctattcaccgtcagcatatgagccgtatgttgtcaggtggctttggatatagccccttcctcagcatcacagatggcaacatgccagggaccaggcctgccagccgccggatgcagcaggctggagctgtctccccctttgggatgctgggaatgtcgggtggtttcatggacatgtttgggatgatgaatgacatgattggaaacatggaacacatgacagctggaggcaattgccagaccttctcatcttccactgtcatctcctactccaatacgggtgatggtgcccccaaggtctaccaagagacatcagagatgcgctcggcaccaggcgggatccgggagacacggaggactgttcgggattcagacagtggactggagcagatgtccattgggcatcacatccgggacagggctcacatcctccagcgctcccgaaaccatcgcacgggggaccaggaggagcggcaggactatatcaacctggatgagagtgaggccgcagcgtttgatgacgagtggcggcgggagacctcccgattccggcagcagcgtcccctggagtttcggcggcttgagtcctcaggggctgggggacgaagggcggaggggcctccccgcctggccatccagggacctgaggactccccttcccgacagtcccgccgctatgactggtgagggccccgggccctcagcctctcttgtacaggctgagaggctgagaaatcatcccctgaataactttttcctctcgattcccatccccaatttaatattaaattaacaggcaagccggcccccacctctccctgggggtctcagggagaacctttcacggcaccctttccctaccttttccttctttaatctcctggtttaccattgatgacttcgcctctgcatctactgacttgatttttcattctgccactccatcttcaaaccccctcacctttcccatcctactcctgccatgcattgaagggtcaatgcattttggggtgagctctgggtttaggggccccctccatccctcagctaccctggatctttgcccacctcttcctcagagcccccactgaggggccgtagccctatctagggctgtggaaggagcagactggttcctaactctctccctcctcctgcccacacacatcaaaagaatcttccctacacccttctctgcctttattttttgatttgtgcaacttgtaactaggtgtttatggaataaaggagaa

SEQ ID NO: 156117 - DNA, 1379 bp, Artificial Sequence
  derived and/or modified sequence
agccccggacgggagcgggcccacggggctgcaggtgtggagccccctggagctgagatcaggatgttccgcttcatgagggacgtggagcctgaggatcccatgttcctgatggatccctttgctattcaccgtcagcatatgagccgtatgttgtcaggtggctttggatatagccccttcctcagcatcacagatggcaacatgccagggaccaggcctgccagccgccggatgcagcaggctggagctgtctccccctttgggatgctgggaatgtcgggtggtttcatggacatgtttgggatgatgaatgacatgattggaaacatggaacacatgacagctggaggcaattgccagaccttctcatcttccactgtcatctcctactccaatacgggtgatggtgcccccaaggtctaccaagagacatcagagatgcgctcggcaccaggcgggatccgggagacacggaggactgttcgggattcagacagtggactggagcagatgtccattgggcatcacatccgggacagggctcacatcctccagcgctcccgaaaccatcgcacgggggaccaggaggagcggcaggactatatcaacctggatgagagtgaggccgcagcgtttgatgacgagtggcggcgggagacctcccgattccggcagcagcgtcccctggagtttcggcggcttgagtcctcaggggctgggggacgaagggcggaggggcctccccgcctggccatccagggacctgaggactccccttcccgacagtcccgccgctatgactggtgagggccccgggccctcagcctctcttgtacaggctgagaggctgagaaatcatcccctgaataactttttcctctcgattcccatccccaatttaatattaaattaacaggcaagccggcccccacctctccctgggggtctcagggagaacctttcacggcaccctttccctaccttttccttctttaatctcctggtttaccattgatgacttcgcctctgcatctactgacttgatttttcattctgccactccatcttcaaaccccctcacctttcccatcctactcctgccatgcattgaagggtcaatgcattttggggtgagctctgggtttaggggccccctccatccctcagctaccctggatctttgcccacctcttcctcagagcccccactgaggggccgtagccctatctagggctgtggaaggagcagactggttcctaactctctccctcctcctgcccacacacatcaaaagaatcttccctacacccttctctgcctttattttttgatttgtgcaacttgtaactaggtgtttatggaataaaggagaatgg

SEQ ID NO: 156118 - DNA, 1110 bp, Artificial Sequence
  derived and/or modified sequence
gcgaacggatggggccggggaagggagctgatgagggcgaggacagctcgacgcaatgccatgcaatgcccagcctcggctttttcgaaggctagtcctgccccgcttctaatttttaggaattcgagattctttcagtgtgtatgcgggaaggggacgatgaagagaaaagaaagctgaaagccagctgaggggagggaacgagaaaacagaggcggccgccgtccggggagagaagcgagcgacggtcgggccgcggggaggggcccggaggagcagcctccagggagagtcctgtttacacttgaggatctcaaaccgcttagcgaggaaagtgtggagccccctggagctgagatcaggatgttccgcttcatgagggacgtggagcctgaggatcccatgttcctgatggatccctttgctattcaccgtcagcatatgagccgtatgttgtcaggtggctttggatatagccccttcctcagcatcacagatggcaacatgccagggaccaggcctgccagccgccggatgcagcaggctggagctgtctccccctttgggatgctgggaatgtcgggtggtttcatggacatgtttgggatgatgaatgacatgattggaaacatggaacacatgacagctggaggcaattgccagaccttctcatcttccactgtcatctcctactccaatacgggtgatggtgcccccaaggtctaccaagagacatcagagatgcgctcggcaccaggcgggatccgggagacacggaggactgttcgggattcagacagtggactggagcagatgtccattgggcatcacatccgggacagggctcacatcctccagcgctcccgaaaccatcgcacgggggaccaggaggagcggcaggactatatcaacctggatgagagtgaggccgcagcgtttgatgacgagtggcggcgggagacctcccgattccggcagcagcgtcccctggagtttcggcggcttgagtcctcaggggctgggggacgaagggcggaggggcctccccgcctggccatccagggacctgaggactccccttcccgacagtcccgccgctatgactggtga

SEQ ID NO: 156119 - DNA, 838 bp, Artificial Sequence
  derived and/or modified sequence
agccccggacgggagcgggcccacggggctgcaggtgtggagccccctggagctgagatcaggatgttccgcttcatgagggacgtggagcctgaggatcccatgttcctgatggatccctttgctattcaccgtcagcatatgagccgtatgttgtcaggtggctttggatatagccccttcctcagcatcacagatggcaacatgccagggaccaggcctgccagccgccggatgcagcaggctggagctgtctccccctttgggatgctgggaatgtcgggtggtttcatggacatgtttgggatgatgaatgacatgattggaaacatggaacacatgacagctggaggcaattgccagaccttctcatcttccactgtcatctcctactccaatacgggtgatggtgcccccaaggtctaccaagagacatcagagatgcgctcggcaccaggcgggatccgggagacacggaggactgttcgggattcagacagtggactggagcagatgtccattgggcatcacatccgggacagggctcacatcctccagcgctcccgaaaccatcgcacgggggaccaggaggagcggcaggactatatcaacctggatgagagtgaggccgcagcgtttgatgacgagtggcggcgggagacctcccgattccggcagcagcgtcccctggagtttcggcggcttgagtcctcaggggctgggggacgaagggcggaggggcctccccgcctggccatccagggacctgaggactccccttcccgacagtcccgccgctatgactggtgagggccccgggccctcagcctctcttgta

SEQ ID NO: 156120 - DNA, 747 bp, Artificial Sequence
  derived and/or modified sequence
atgttccggttcatgcgggacgtggagcccgaggaccccatgttcctaatggatccattcgctatccatcgccagcatatgtcaagaatgttatccggcggtttcggatactcccctttcctttctatcactgatgggaatatgccgggcactcgcccagcaagcagacgcatgcagcaggccggcgccgtgtccccgtttggtatgctgggtatgtcaggaggattcatggacatgttcggaatgatgaacgatatgatcggcaacatggagcatatgacagccggtggaaattgccagacattctcctcttcgaccgtgatttcgtatagcaacaccggggacggcgcccctaaagtgtatcaggagactagcgaaatgaggtctgcccccggtggtatccgtgaaacacgacggacagtgcgagactctgactcgggcttggagcagatgtcgatcggtcaccatatcagagatcgcgcccatatcctgcagcgctctaggaatcacagaaccggtgaccaagaggagcggcaggactatattaatctggacgagtccgaggcggctgcctttgatgacgagtggcggcgagaaaccagtaggtttaggcagcagcgcccattggagtttcgtaggcttgagtcgtccggtgccggcggccgaagagccgagggtcctcctagacttgccattcagggcccagaggattctccatccagacagtcacgtcggtatgactggtag

SEQ ID NO: 156121 - DNA, 747 bp, Artificial Sequence
  derived and/or modified sequence
atgttccggttcatgcgggacgtggagcccgaggaccccatgttcctgatggacccattcgctatccaccgtcagcatatgagccgcatgctgagcggaggcttcggctactccccctttctgtcaatcaccgatggtaacatgccgggaactcggccggcctcaagacggatgcaacaggccggagctgtgtcacctttcgggatgctggggatgtcaggagggttcatggacatgtttggcatgatgaacgatatgattggtaacatggagcatatgaccgccggtggtaactgccagacattctcctcatccactgtgattagctatagcaacactggagacggtgcgcccaaagtgtaccaggagacctctgaaatgcgctcggccccaggtgggatccgtgaaaccaggcgaactgtgagggactctgacagtggccttgaacagatgtctataggtcaccacatccgggatagagcccacatcctccaaagatctcggaatcacaggaccggggaccaggaagaacgtcaggattacatcaatctggatgaaagtgaggcggcagcctttgacgacgaatggagacgcgagaccagtcgcttcaggcaacagcggccgctggaatttcgtaggcttgagagcagcggagccgggggcagacgggctgaggggcccccacggctagcaatccaggggcctgaggactccccgtctcgacagagcaggagatatgattggtag

SEQ ID NO: 156122 - DNA, 747 bp, Artificial Sequence
  derived and/or modified sequence
atgttccggttcatgcgggacgtggagcccgaggaccccatgttccttatggacccctttgccattcatcgacagcatatgtcacgcatgctgtccggcggattcggctattctcctttcttgtctatcacagacggaaacatgcctggcacacggccggcctctagacgaatgcagcaagccggggctgtttctccatttgggatgctggggatgagtggaggcttcatggacatgtttgggatgatgaacgacatgattgggaatatggagcacatgaccgccggcggtaattgccagacatttagctccagcacagtgatctcatacagtaacaccggcgacggggcgcccaaagtttaccaagagacatcagagatgaggagtgcccccggtggcattcgggaaactcggcgaacggttagagacagcgatagtgggctggagcagatgtcaatcggacaccacattagagaccgggcacacatccttcagcgaagcagaaatcaccgcaccggggatcaggaggagagacaggattatattaatctggacgagagcgaggccgccgcgttcgatgatgagtggcggagagagacgtccaggttccggcagcagagacccctggagttcaggagacttgaaagtagcggggctgggggccgacgcgcagagggaccccctagattggccatccaggggccggaagattctccttcacggcagagcagacgctacgactggtag

SEQ ID NO: 156123 - DNA, 747 bp, Artificial Sequence
  derived and/or modified sequence
atgttccggttcatgcgggacgtggagcccgaggaccccatgttccttatggaccccttcgcaatccaccggcagcacatgtccaggatgcttagtggcggttttggttactctcctttcctttccattactgacgggaacatgccaggcacccgtccagccagccgacggatgcaacaggctggtgcagtctcaccgtttggtatgctgggcatgagcggaggcttcatggacatgtttggtatgatgaatgatatgattggcaacatggagcatatgacagctggcggaaactgccaaacctttagtagcagtaccgtgattagctacagtaatacaggggatggcgcccctaaggtctaccaggaaacttcggagatgcgaagtgctccaggcggcatccgggagacacgccggacagtacgggacagcgactctggcctggagcagatgtcgatcggtcaccacatcagagacagggcccacattctccaacgttctcgcaatcaccgaacgggcgaccaggaggagcggcaggactacattaacctggatgaatccgaggccgccgcgtttgacgacgagtggaggcgtgaaacctcccgtttcagacagcaacgaccattggaatttcgaaggctcgaaagctcaggagctggaggccgacgggcggagggaccccctagactggctattcagggacctgaagactcccccagccgtcagtcccgtaggtatgactggtag

SEQ ID NO: 156124 - DNA, 747 bp, Artificial Sequence
  derived and/or modified sequence
atgtttcggtttatgcgggacgtggaacctgaggatccgatgttcttgatggacccatttgctatccaccggcaacacatgagtagaatgctgagcggcggatttgggtatagccctttcctgtctataacagacggaaatatgcctggaacgcggccagccagtagaaggatgcagcaagcgggagccgtgtctccattcggtatgcttggcatgtccgggggattcatggacatgttcgggatgatgaatgatatgataggaaacatggaacacatgacagccggaggcaattgccagactttctcctcgagtactgtaatatcctactctaacactggcgacggcgcacccaaggtctaccaggaaacatccgaaatgcgcagtgcacccggaggcatccgggaaaccagacggaccgtccgggacagcgatagcggcctcgaacagatgagtattggccatcacataagggatagggcccacatcttacaacgtagccgcaatcacagaaccggggaccaggaagagaggcaggactatataaatctggacgaaagcgaagcagcagcatttgacgatgaatggaggagagagacgagtcggtttaggcagcagaggcccctggaatttaggcgcctcgagtcctccggtgctggagggcgaagagctgaaggtcccccacgattagcaattcaagggcctgaggactccccttctcggcaaagccgtaggtatgactggtag

SEQ ID NO: 156125 - DNA, 747 bp, Artificial Sequence
  derived and/or modified sequence
atgttccggttcatgcgagatgtcgagcccgaagaccctatgtttcttatggacccttttgccattcatagacagcacatgagccggatgctttcaggcggattcggttattctccctttcttagcatcactgacgggaatatgccaggtactcgcccagcgtcccggaggatgcagcaggccggtgccgtaagcccctttggtatgttgggcatgagtggaggttttatggatatgtttggcatgatgaacgatatgattggaaacatggagcacatgaccgcaggcggaaattgtcagactttcagctcctcaacggttatttcgtactcaaacactggagatggcgctcctaaagtttatcaggaaacatccgagatgaggtccgccccaggcggaatcagggaaactcgacgcacagtgcgcgacagcgacagcgggttggaacagatgtctataggacaccacattagggatagggcgcacatactgcagaggtccagaaatcaccgaaccggggatcaggaagaaaggcaagactacattaaccttgatgaatctgaggctgccgcttttgatgacgaatggaggcgagagacgagccgcttccggcagcagcgtcctttagaattccgacggcttgagtccagtggagccggaggaaggagagccgaagggccaccgagactcgccattcagggcccagaggacagcccctccaggcagtcgaggagatacgactggtag

SEQ ID NO: 156126 - DNA, 747 bp, Artificial Sequence
  derived and/or modified sequence
atgttccgttttatgcgggacgtggaacccgaggatcctatgttcctgatggatccattcgcaatccaccgccaacatatgtccagaatgctcagcgggggatttgggtacagcccttttctttctataactgacggaaacatgcctggcacaaggcccgcaagcagacggatgcagcaggcgggtgcagtctcaccattcggaatgctgggcatgtctggagggtttatggacatgtttggaatgatgaacgatatgatcggcaatatggaacatatgacagccggtgggaattgccagaccttcagtagctccacagtaattagttattccaacactggtgatggcgctccgaaggtgtaccaagaaacttcagagatgcgctccgcccctggtggcattcgggaaacgcgtcgcaccgttcgcgattctgattccggattggagcagatgagcatcggacaccatattagggaccgagctcatattctccaacgatcacgaaatcacagaacaggcgaccaggaagagaggcaggactacatcaacttggacgaatccgaagcagccgctttcgatgacgaatggaggcgggagacctcccgctttcgccagcagcgcccactggaattcaggagactggagtcctccggcgctggcggtaggagggctgagggccctccaagattggctattcaggggccagaagattccccctctagacaaagtcgacgatacgattggtag

SEQ ID NO: 156127 - DNA, 747 bp, Artificial Sequence
  derived and/or modified sequence
atgtttagattcatgcgagatgttgaacccgaggaccccatgtttcttatggatcccttcgccattcaccgtcagcacatgagccgtatgctttcagggggattcggctatagcccctttttgagcatcactgacggaaacatgcccggtacccggccagcatcacggagaatgcaacaggcaggcgctgtaagccccttcggcatgctgggtatgtctggcggtttcatggacatgttcgggatgatgaatgacatgataggaaatatggagcatatgaccgcgggtggcaattgccaaacattttcgtcaagcacagttattagctatagcaataccggggacggcgcaccaaaggtctaccaagagacctccgagatgcgatccgccccaggtggcatcagggaaactcgccgaacagtgagagactccgattccggtttggagcagatgagcataggccaccacatcagggaccgcgctcatatcctccagagatcgaggaatcaccgcaccggtgatcaagaggaacggcaggattatatcaatcttgacgagtcggaggctgcagcctttgacgatgagtggcgcagggagaccagtcggtttagacaacagcggccactggagtttcggcgtttggaatcaagtggcgcagggggtcggagggccgaaggtccgcctcgattagccatacaaggcccagaggactctcctagccggcagagccggaggtacgactggtag

SEQ ID NO: 156128 - DNA, 747 bp, Artificial Sequence
  derived and/or modified sequence
atgttcagattcatgagagacgtggagcccgaggaccccatgttcctgatggaccccttcgccatccacagacagcacatgagcagaatgctgagcggcggcttcggctacagccccttcctgagcatcaccgacggcaacatgcccggcaccagacccgccagcagaagaatgcagcaggccggcgccgtgagccccttcggcatgctgggcatgagcggcggcttcatggacatgttcggcatgatgaacgacatgatcggcaacatggagcacatgaccgccggcggcaactgccagaccttcagcagcagcaccgtgatcagctacagcaacaccggcgacggcgcccccaaggtgtaccaggagaccagcgagatgagaagcgcccccggcggcatcagagagaccagaagaaccgtgagagacagcgacagcggcctggagcagatgagcatcggccaccacatcagagacagagcccacatcctgcagagaagcagaaaccacagaaccggcgaccaggaggagagacaggactacatcaacctggacgagagcgaggccgccgccttcgacgacgagtggagaagagagaccagcagattcagacagcagagacccctggagttcagaagactggagagcagcggcgccggcggcagaagagccgagggcccccccagactggccatccagggccccgaggacagccccagcagacagagcagaagatacgactggtag

SEQ ID NO: 156129 - protein, 559 aa, Artificial Sequence
  derived and/or modified sequence
MKVITCEIAWHNKEPVYSLDFQHGTAGRIHRLASAGVDTNVRIWKVEKGPDGKAIVEFLSNLARHTKAVNVVRFSPTGEILASGGDDAVILLWKVNDNKEPEQIAFQDEDEAQLNKENWTVVKTLRGHLEDVYDICWATDGNLMASASVDNTAIIWDVSKGQKISIFNEHKSYVQGVTWDPLGQYVATLSCDRVLRVYSIQKKRVAFNVSKMLSGIGAEGEARSYRMFHDDSMKSFFRRLSFTPDGSLLLTPAGCVESGENVMNTTYVFSRKNLKRPIAHLPCPGKATLAVRCCPVYFELRPVVETGVELMSLPYRLVFAVASEDSVLLYDTQQSFPFGYVSNIHYHTLSDISWSSDGAFLAISSTDGYCSFVTFEKDELGIPLKEKPVLNMRTPDTAKKTKSQTHRGSSPGPRPVEGTPASRTQDPSSPGTTPPQARQAPAPTVIRDPPSITPAVKSPLPGPSEEKTLQPSSQNTKAHPSRRVTLNTLQAWSKTTPRRINLTPLKTDTPPSSVPTSVISTPSTEEIQSETPGDAQGSPPELKRPRLDENKGGTESLDP

SEQ ID NO: 156130 - DNA, 1680 bp, Artificial Sequence
  derived and/or modified sequence
atgaaagtgattacatgcgaaattgcctggcacaacaaggagccagtgtattccttggatttccagcacggcacagcagggagaatccaccggctggcttcagccggagtcgacaccaatgtgagaatctggaaggttgaaaaggggcccgacggcaaggccatcgtggaatttctgtctaacctcgccaggcacacaaaggccgttaacgttgtccggtttagcccgacaggagagatccttgcttccggaggggacgatgcagtaatattgctgtggaaagtgaacgataataaggagccagagcaaatagcgttccaggacgaggatgaagcacagctaaacaaggagaattggaccgttgtgaaaacactccggggacatctagaggatgtgtatgacatttgctgggccacggacggcaatctcatggcttctgcatctgtagacaatactgccatcatctgggatgtgtcaaagggacaaaagatctcaatatttaacgaacacaagtcttacgttcaaggcgtaacctgggaccctctcggccagtatgttgccaccctgagctgcgacagagtgctacgagtatactctatccagaagaagcgtgtcgctttcaacgttagcaagatgttatccgggattggagccgagggggaggcgcgtagctatcgcatgtttcatgacgactctatgaaatccttctttcgccggttatcatttacgcccgatggaagtctgctcttgactcccgccggctgtgtggaaagtggtgagaacgtgatgaatactacatacgtcttttcacgcaaaaatctgaaaaggcctatcgcacacctgccttgcccaggaaaggctacactggccgtgcgttgctgtcctgtctatttcgagctgagacctgtagttgaaaccggagtcgagcttatgtcgctgccgtacaggctggtcttcgctgttgcttcagaagactcagtgctgctgtacgacacacagcaatccttccccttcggatacgtgtcaaatatccactatcacacactgtctgatatatcctggagcagtgacggcgcgttcttagcgattagttccaccgacggctactgtagctttgttaccttcgaaaaagatgagcttggtatcccgctgaaagaaaaaccagtgttgaacatgcgtaccccggataccgcgaaaaagactaagtctcagacgcatagaggttcctcaccgggtccaagacccgtagaggggacccccgcctcaagaacgcaggacccgagctctcctggtactacaccaccacaggctagacaggcaccagcccctacggttataagggaccccccttcaattaccccagctgtgaagagcccccttccaggcccctccgaggaaaaaacactgcagccaagctcccagaatacgaaagcccacccttccaggcgcgtaacgttaaacaccttgcaggcctggtcaaagaccacaccccgacgcattaacttgacaccccttaaaaccgatacgccccccagctcagtgccaacatccgtcatctccactccatcaacagaagagattcagagtgagacgccaggcgacgcccaaggaagccctcccgaactaaaaagaccgagactggacgaaaacaaaggtggcacagaatctcttgatccatag

SEQ ID NO: 156131 - DNA, 1680 bp, Artificial Sequence
  derived and/or modified sequence
atgaaggtgatcacctgtgagatcgcctggcacaacaaggagcctgtgtacagcctggacttccagcacggcacagctggccgcatccaccggctggccagcgctggggtggacaccaacgtgcgcatctggaaggtggagaagggcccagatggcaaggccatcgtggagttcctgagcaacctggcccggcacaccaaggctgtgaatgtggtgcgcttcagccccactggagagatcctggccagcggaggagatgatgctgtgatcctgctgtggaaggtgaatgacaacaaggagcctgagcagatcgccttccaggatgaagatgaggcccagctgaacaaggagaactggacagtggtgaagaccctgcggggccacctggaggatgtgtatgacatctgctgggccacagatggcaacctgatggccagcgcctctgtggacaacacagccatcatctgggatgtgtccaagggccagaagatcagcatcttcaatgagcacaagagctatgtgcagggcgtgacctgggaccccctgggccagtatgtggccaccctgagctgtgacagagtgctgcgggtgtacagcatccagaagaagagggtggccttcaacgtgtccaagatgctgagcggcatcggggctgagggggaggcccggagctacaggatgtttcatgatgacagcatgaagagcttcttccggcggctgtccttcaccccagatggcagcctgctgctgaccccagctggctgtgtggagagcggggagaatgtgatgaacaccacctacgtgttcagcaggaagaacctgaagaggcccatcgcccacctgccctgccctgggaaggccaccctggccgtgcgctgctgccctgtgtactttgagctgcggcctgtggtggagaccggggtggagctgatgagcctgccctaccgcctggtgtttgctgtggccagcgaggacagcgtgctgctgtatgacacccagcagagcttccccttcggctacgtgagcaacatccactaccacaccctgagtgacatctcctggagcagtgatggagccttcctggccatcagcagcacagatggctactgcagctttgtgacctttgagaaggatgagctgggcatccccctgaaggagaagcctgtgctgaacatgaggaccccagacacagccaagaagaccaagagccagacccaccggggcagcagccctggccccaggcctgtggagggcaccccagccagcaggacccaggaccccagcagccctggcaccaccccaccccaggcccggcaggccccagcccccaccgtcatccgggaccccccatccatcaccccagctgtgaagagccccctgcccggccccagcgaggagaagaccctgcagcccagcagccagaacaccaaggcccaccccagccggcgggtgaccctgaacaccctgcaggcctggagcaagaccaccccccggcgcatcaacctgacccccctgaagacagacaccccacccagctctgtgcccaccagcgtcatcagcacccccagcacagaggagatccagagcgagaccccaggagatgcccagggcagccccccagagctgaagaggccccggctggatgaaaataaaggaggaacagagagcctggacccctag

SEQ ID NO: 156132 - DNA, 1680 bp, Artificial Sequence
  derived and/or modified sequence
atgaaggtgatcacctgcgagatcgcctggcacaacaaggagcccgtgtatagcctggactttcaacacggaactgctgggcggattcatcgcctggcttcagccggtgtcgatactaacgtccgtatttggaaggtggaaaaaggaccagatgggaaagccatcgtcgagttcttgtccaacctggccagacataccaaggctgtgaatgtggtccgtttctctccaacaggagaaattctggcctccggcggcgacgacgccgtcatcctgctgtggaaggtgaatgacaacaaagaaccagagcagatagcctttcaagacgaggatgaggcacagctgaataaagagaattggaccgtcgtgaagacattgaggggccacttagaagatgtatacgatatctgctgggcgactgacggaaatctcatggccagcgcctcggtagataataccgccatcatctgggatgtaagtaagggacagaagatctccatattcaacgagcataaatcgtatgtgcagggcgtgacctgggaccccctgggacagtacgttgcgaccctgtcctgtgacagggtgctgcgggtctactcaatacagaaaaagcgcgtggcgtttaacgtgtcaaagatgttatcagggatcggcgcagagggggaagctagaagttaccgcatgtttcatgacgactccatgaaatctttcttccgacgcttatcttttactcctgacggatccctgctgctgacacccgccggctgcgtggaatccggagagaacgttatgaatacaacctatgtattctcacgaaagaacctcaagagaccgatcgctcatctgccatgccctggtaaggcgacattagctgtccggtgctgccccgtgtacttcgaactgcgcccggtggtggaaacaggtgtcgagctgatgagtctgccctatcggttggtattcgcagtagccagcgaagactctgtgttactgtacgacacacagcagtccttcccctttgggtatgtttccaatattcactaccatacactttcagacatctcttggtcctccgacggagcatttctagccattagcagcactgacggttattgtagctttgtaaccttcgaaaaggacgaacttggtatcccccttaaggaaaaacctgtgctgaatatgcgaacacctgacaccgcaaaaaagacgaagtcccagacacatcgaggttcgtccccaggcccccgtccagtggaggggactccagcctctagaacccaggacccgtctagcccaggcaccacaccaccacaagctaggcaggcccccgcccccactgtgatccgggacccacctagcatcacccccgcagtgaagtcccctctgcccggtccttcggaggaaaagactctgcagccttcatcgcaaaacacaaaggcgcatccatccagaagagtgaccctcaacacgttgcaggcttggtctaaaactactccaaggcggatcaatctcacccctctgaaaaccgacactccaccaagtagtgttcctaccagcgtgatttccacacctagcactgaggagatccagtctgagacccccggtgatgcccagggcagtcctcctgagctgaagcgccccagactagatgagaacaagggggggaccgaatccttggatccttag

SEQ ID NO: 156133 - DNA, 1680 bp, Artificial Sequence
  derived and/or modified sequence
atgaaggtcatcacctgtgaaatcgcatggcacaacaaggagcctgtatatagtctcgatttccagcatggaaccgccggaaggatccaccggctggcatccgcgggtgttgatactaatgtgcgtatatggaaggtggaaaagggaccagacggtaaggctattgtggaatttctcagtaacctggccagacacacaaaggccgtaaacgtggtaagattcagtcccaccggcgaaatcttagcgtctggaggcgacgacgccgtgatcctgctctggaaagtgaatgacaacaaggaacctgagcaaatcgcttttcaagatgaagatgaagcgcagctcaataaagagaactggaccgtagtgaaaacgctcagaggtcacctggaagacgtgtacgatatttgttgggctactgatggtaacctgatggcttctgccagcgtggacaacaccgccatcatttgggatgtgtccaagggtcagaaaatctcaatctttaacgagcataaaagttatgttcagggggttacgtgggaccccctggggcaatatgtggcaactctcagctgcgatcgcgtgctgcgtgtgtatagcattcagaaaaagcgggttgccttcaacgtatcgaagatgctcagcggcatcggggcagagggcgaggcccgaagttatcgaatgtttcacgacgatagtatgaagtcatttttcagacgcctgtctttcaccccagacggctctctgctgctgactccggcaggttgtgtagaaagcggcgaaaacgttatgaacacgacctacgtcttcagccggaagaatctgaagcggcctattgcccacctcccctgccccggaaaggctaccttagccgtaaggtgctgccctgtctacttcgagctccgaccagttgtggagacaggagtggagttaatgtcactcccctaccgcttggtatttgctgtggctagcgaggattctgttttgctgtatgatacccagcaatcatttcccttcggttacgtgtcgaacatccactatcatacgctgagcgacatttcctggtcttccgacggagcatttctggctattagctctaccgacggatactgcagctttgtgacatttgagaaagatgagctcggcatcccactaaaagaaaaacccgtgttaaatatgcgcacccctgatacggcaaagaaaaccaagagtcagacccacagaggtagttccccgggaccaaggcccgtcgaaggtactcctgcttctcgtacccaagatccgtcctccccaggaactactccacctcaggcgaggcaggcaccagcacccacggtgataagagacccccctagtattacccccgcagttaagagtcccctgcctggaccttccgaggagaagacactgcagccgtccagtcagaacactaaggcacatccctcaaggagggtgaccttgaatactcttcaggcttggtcaaaaactactcctcggaggataaatctgacaccccttaagactgatactcctccctctagtgtgcccacatcagtcatctctactccatccactgaggagatccagtctgaaacacccggtgatgcacagggatctcccccagagctcaagcggcctcgcttagatgagaacaaagggggtaccgaaagtttggatccctag

SEQ ID NO: 156134 - DNA, 2292 bp, Artificial Sequence
  derived and/or modified sequence
ggcctgcggcgcgcgggaagcggcgcgcgctgcgcgggaggtgacggtgcctctgactgtccgggtccctccagcattttgcagctttctcctgtcttgaagaagtagaacggtgcccgagaaacgtttttccccttcgagactcaggaggatgaaagtcatcacttgtgaaatagcctggcacaacaaggagcccgtgtacagcctggacttccagcatgggacggctgggaggatccacagactggcgtctgccggcgtggacaccaatgtcaggatctggaaggtagaaaagggaccagatggaaaagccatcgtggaatttttgtccaatcttgctcgtcataccaaagccgtcaatgttgtgcgtttttctccaactggggaaattttagcatcgggaggagatgatgctgtcatcctattgtggaaggtgaatgataacaaggagccggagcagatcgcttttcaggatgaggacgaggcccagctgaacaaggagaactggacggttgtgaagactctgcggggccacttagaagatgtgtatgatatttgctgggcaactgatgggaatttaatggcttctgcctctgtggataacacagccatcatatgggatgtcagcaaaggacaaaagatatcaatttttaatgaacataaaagttatgtccaaggagtaacctgggaccctttgggtcaatatgttgctactctgagctgtgacagggtgctgcgagtatacagtatacagaagaagcgtgtggctttcaatgtttcgaagatgctgtctggaataggggctgaaggagaggcaagaagctaccggatgtttcacgacgacagcatgaagtctttcttccgtagactgagtttcactcccgacggatctttgcttctcacgccagctggatgtgtggaatctggtgaaaatgtaatgaataccacttatgttttctccaggaagaatcttaaaaggcccatcgctcatcttccatgtcctggaaaagccactcttgctgttcgctgctgtccggtctactttgaactgaggccagtggtggaaacaggtgtggagctgatgagtctgccctaccgcctggtgtttgctgtggcctcggaggattccgtgcttctgtatgacacccagcagtccttcccttttggttacgtgtctaatatacattaccacaccctcagtgacatttcatggtccagcgatggtgccttcctggccatttcttccacggacggttactgctcatttgtgacatttgagaaagatgaacttggaattcctttgaaagagaagccagttttgaacatgagaactcctgatacagcaaagaaaaccaagagtcagacacatcgagggtcttcgccaggacccagaccggtagagggaacccctgccagcagaacccaagaccccagcagccccggcacgactccccctcaggccagacaggccccagccccaacagtcatcagggaccctccctccatcactcctgctgtcaaaagccccttgccggggccttcggaggagaagaccctgcagcccagtagtcaaaacacaaaagcccacccatcccggagggtcactctgaacacactgcaagcctggagcaagacaacaccccggagaataaacttaacacccttaaagacggacactccaccaagttctgtaccaaccagtgtgatttccaccccttctacagaagaaattcagtcagagacgcctggagacgctcagggcagtcccccagagctaaagcggcccagactcgatgaaaacaaaggaggcacggaaagtctggacccttgatgggacctcggcttctgctcgaagcctaccaggctcccggtgtgtgcagggagacggtaaagctggaggtgcctgagaccagggcttccatggagcgggacacactgtaaatggatttctataacagaagtgacatgtgtactgatttttctccagaaatatggatgctgttgtattcagtatccatttttaacttgggacatgaacgttttaacgtagtaaatcctctttttgatgagtttctgaaactggagcggttcaacgttatccagtgtgaaaatcagtgagtcctccctggcatcctcgtgaaagtgcacacacttcatggagggactccttttcaataagaattaggaagatgagaaagtaatttgagattttactctgtcgaattttagagtatttgaagtgattgttagatttcacttctaaggagttgattgattaaactttggaaggta

SEQ ID NO: 156135 - DNA, 1680 bp, Artificial Sequence
  derived and/or modified sequence
atgaaggtgatcacctgcgagatcgcctggcacaacaaggagcccgtgtacagcctggacttccagcacggcaccgccggcagaatccacagactggccagcgccggcgtggacaccaacgtgagaatctggaaggtggagaagggccccgacggcaaggccatcgtggagttcctgagcaacctggccagacacaccaaggccgtgaacgtggtgagattcagccccaccggcgagatcctggccagcggcggcgacgacgccgtgatcctgctgtggaaggtgaacgacaacaaggagcccgagcagatcgccttccaggacgaggacgaggcccagctgaacaaggagaactggaccgtggtgaagaccctgagaggccacctggaggacgtgtacgacatctgctgggccaccgacggcaacctgatggccagcgccagcgtggacaacaccgccatcatctgggacgtgagcaagggccagaagatcagcatcttcaacgagcacaagagctacgtgcagggcgtgacctgggaccccctgggccagtacgtggccaccctgagctgcgacagagtgctgagagtgtacagcatccagaagaagagagtggccttcaacgtgagcaagatgctgagcggcatcggcgccgagggcgaggccagaagctacagaatgttccacgacgacagcatgaagagcttcttcagaagactgagcttcacccccgacggcagcctgctgctgacccccgccggctgcgtggagagcggcgagaacgtgatgaacaccacctacgtgttcagcagaaagaacctgaagagacccatcgcccacctgccctgccccggcaaggccaccctggccgtgagatgctgccccgtgtacttcgagctgagacccgtggtggagaccggcgtggagctgatgagcctgccctacagactggtgttcgccgtggccagcgaggacagcgtgctgctgtacgacacccagcagagcttccccttcggctacgtgagcaacatccactaccacaccctgagcgacatcagctggagcagcgacggcgccttcctggccatcagcagcaccgacggctactgcagcttcgtgaccttcgagaaggacgagctgggcatccccctgaaggagaagcccgtgctgaacatgagaacccccgacaccgccaagaagaccaagagccagacccacagaggcagcagccccggccccagacccgtggagggcacccccgccagcagaacccaggaccccagcagccccggcaccacccccccccaggccagacaggcccccgcccccaccgtgatcagagacccccccagcatcacccccgccgtgaagagccccctgcccggccccagcgaggagaagaccctgcagcccagcagccagaacaccaaggcccaccccagcagaagagtgaccctgaacaccctgcaggcctggagcaagaccacccccagaagaatcaacctgacccccctgaagaccgacaccccccccagcagcgtgcccaccagcgtgatcagcacccccagcaccgaggagatccagagcgagacccccggcgacgcccagggcagcccccccgagctgaagagacccagactggacgagaacaagggcggcaccgagagcctggacccctag

SEQ ID NO: 156136 - protein, 686 aa, Artificial Sequence
  derived and/or modified sequence
MQLGEQLLVSSVNLPGAHFYPLESARGGSGGSAGHLPSAAPSPQKLDLDKASKKFSGSLSCEAVSGEPAAASAGAPAAMLSDTDAGDAFASAAAVAKPGPPDGRKGSPCGEEELPSAAAAAAAAAAAAAATARYSMDSLSSERYYLQSPGPQGSELAAPCSLFPYQAAAGAPHGPVYPAPNGARYPYGSMLPPGGFPAAVCPPGRAQFGPGAGAGSGAGGSSGGGGGPGTYQYSQGAPLYGPYPGAAAAGSCGGLGGLGVPGSGFRAHVYLCNRPLWLKFHRHQTEMIITKQGRRMFPFLSFNINGLNPTAHYNVFVEVVLADPNHWRFQGGKWVTCGKADNNMQGNKMYVHPESPNTGSHWMRQEISFGKLKLTNNKGANNNNTQMIVLQSLHKYQPRLHIVEVTEDGVEDLNEPSKTQTFTFSETQFIAVTAYQNTDITQLKIDHNPFAKGFRDNYDSSHQIVPGGRYGVQSFFPEPFVNTLPQARYYNGERTVPQTNGLLSPQQSEEVANPPQRWLVTPVQQPGTNKLDISSYESEYTSSTLLPYGIKSLPLQTSHALGYYPDPTFPAMAGWGGRGSYQRKMAAGLPWTSRTSPTVFSEDQLSKEKVKEEIGSSWIETPPSIKSLDSNDSGVYTSACKRRRLSPSNSSNENSPSIKCEDINAEEYSKDTSKGMGGYYAFYTTP

SEQ ID NO: 156137 - DNA, 2756 bp, Artificial Sequence
  derived and/or modified sequence
atgcagttaggggagcagctcttggtgagctcagtgaacctgcctggcgcgcacttctacccgctggagagtgcgcgaggcggcagcggcgggagcgctggccacctccccagcgcggccccctctcctcagaagttggacttagacaaagcgtccaagaagttttccggcagtctctcctgcgaggcggtgagcggggagcccgcagccgccagcgcaggggcccccgcggccatgcttagtgacaccgacgccggggacgcatttgccagcgctgcggcagtggccaagccggggcccccggacggccgcaagggctccccctgcggggaggaggagctgccctccgccgctgcagccgccgccgccgccgccgccgcggctgcggccactgcgcgctactccatggacagcctgagctccgagcggtactacctccagtcccccggtcctcaggggtcggagctggctgcgccctgctcactcttcccgtaccaggcggcggctggggcgccccacggacctgtgtacccggctcctaacggggcgcgctacccctacggctccatgctgccccccggcggcttccccgcggctgtgtgcccacccgggagggcgcagttcggcccaggagccggtgcgggcagtggcgcgggcggtagcagcggcgggggcggcggcccgggcacctatcagtacagccagggggctccgctctacgggccgtaccctggagccgcagcggcgggatcttgcggaggactggggggcctgggggttccaggttctggcttccgtgcccacgtctacctgtgcaaccggcctctgtggctcaaattccaccgccaccaaactgagatgatcattacgaaacagggcaggcgcatgtttcctttcttgagcttcaacataaacggactcaatcccactgcccactacaatgtgttcgtagaggtggtgctggcggaccccaaccactggcgcttccaggggggcaaatgggtgacctgtggcaaagccgacaataacatgcagggcaacaaaatgtatgttcacccagagtctcctaatactggttcccactggatgagacaggagatttcattcgggaaattaaaactcaccaataacaaaggcgcaaataacaacaacacccagatgatagtcttacaatccttacacaaataccaaccccgactgcatattgttgaagttacagaggatggcgtggaggacttgaatgagccctcaaagacccagacttttaccttctcagaaacgcaattcattgcagtgactgcctaccaaaacaccgatattactcaactaaagattgatcataacccctttgcaaaaggcttcagagacaactatgattcatcccatcagattgtccctggaggtcggtacggcgttcaatccttcttcccggagccctttgtcaacactttacctcaagcccgctattataatggcgagagaaccgtgccacagaccaacggcctcctttcaccccaacagagcgaagaggtggccaaccctccccagcggtggcttgtcacgcctgtccagcaacctgggaccaacaaactagacatcagttcctatgaatctgaatatacttctagcacattgctcccatatggcattaaatccttgccccttcagacatcccatgccctggggtattacccagacccaacctttcctgcaatggcagggtggggaggtcgaggttcttaccagaggaagatggcagctggactaccatggacctccagaacaagccccactgtgttctctgaagatcagctctccaaggagaaagtgaaagaggaaattggctcttcttggatagagacacccccttccatcaaatctctagattccaatgattcaggagtatacaccagtgcttgtaagcgaaggcggctgtctcctagcaactccagtaatgaaaattcaccctccataaagtgtgaggacattaatgctgaagagtatagtaaagacacctcaaaaggcatgggagggtattatgctttttacacaactccctaaagagttattttaacctcaaaaattagctaactttttgcagatggacttggtggtgttttttgttgtcttctttgcctaggttgccaaaaagatgtttgccttccaccttgatgcatcctgttttgtgcaattctctaaaagaaggtgccaaagctttttgattgctgcaggtaactgaaacaaacctagcatttttaaaaaataagattaatggaagactttaaggtattttaaaattcgaagggtatccaaggttctgtatttatttattggggagacactaacccttcaaagaagcaggctgtgaacattgggtgcccagtgctatcagatgagttaaaacctttgattctcatttctatttgtaaattcttaagcaaatagaagccgagtgttaaggtgttttgcttctgaaagagggctgtgccttccgtttcagaaggagacattttgctgttacattctgccaggggcaaaagatactaggcccaggagtcaagaaaagcttttgtgaaagtgatagtttcacctgactttgattccttaacccccggcttttggaacaagccatgtttgccctagtccaggattgcctcacttgagacttgctaggcctctgctgtgtgctggggtggccagtgggactcaggagagagcaagctaaggagtcaccaaaaaaaaaaaaaaaaaaaaaa

SEQ ID NO: 156138 - DNA, 2061 bp, Artificial Sequence
  derived and/or modified sequence
atgcaattaggtgaacagctattagtgtcctctgtgaatctgcccggtgctcatttttacccactggaaagcgctcgcggagggagcggaggatcagcaggccatctgccctccgccgccccttccccccagaagctcgatctagataaggcttcaaaaaaatttagcggcagcctcagctgtgaagccgtgtctggcgagcctgcggccgcctctgctggcgcacctgccgctatgttgtccgatacggatgccggagatgcctttgccagcgccgcggcagttgcaaagccaggaccacccgacggccggaagggaagtccatgtggggaggaggaactcccctctgcagcggcagccgccgcggcagcagcggccgctgccgccgctactgcacggtatagcatggactcattatcatcagaacggtactacctgcaaagccctggcccacaaggcagtgagctcgctgctccttgtagcctgtttccgtaccaggccgccgccggggctccacacggccctgtgtatcccgctccgaacggagcacggtacccctatggaagtatgttgccccccggcggattccccgccgccgtatgcccccccggcagggcccagtttggccccggggccggcgctggcagcggcgccggtgggtcaagcggaggaggggggggacccggaacttaccagtacagtcagggagccccactgtacggaccgtacccgggcgctgctgcagccggctcctgcggggggcttggtggactgggagtccctgggtccggctttagggcacacgtctatttgtgcaacagaccactctggctaaagttccataggcatcagacggaaatgatcataaccaaacagggccggcggatgtttccttttctgagctttaacatcaacggcctgaatcctaccgcccattacaatgtctttgtggaggtggttcttgccgacccaaaccattggagattccagggtgggaaatgggtcacatgcggtaaagcggataacaacatgcagggtaataagatgtatgtgcaccccgaaagtcccaataccggttcccattggatgagacaggagattagtttcggcaaactgaagttaacaaacaacaaaggagcgaacaataacaacacccagatgattgtgttgcagtccttgcacaagtatcagcccaggctgcacatagtcgaggtgacagaggacggtgtagaagatctgaatgagcctagtaagacacaaacgttcacctttagcgagacacagttcatagctgtcactgcttaccagaacacagatataactcagctgaaaattgatcacaaccctttcgcaaagggattccgtgataactacgacagctcccaccagattgtgcccggcggccgctacggcgtgcagtcgttctttcctgagccctttgttaatacgctgccccaggcaaggtactacaatggcgagcggactgtaccccaaacaaacggactgctgtctccccaacaatcagaagaagtagcgaatcccccacagcgctggctggtgactcccgtacagcaacccgggaccaataagctagacatttcctcctacgagtcagagtacaccagctctactctgctgccatacgggatcaaaagcctgccccttcagacttcccatgcgttaggatattatccagatcccacattcccagccatggctggctggggtgggcgtggatcatatcaacggaagatggctgcgggtctgccttggaccagtcgcacctccccaacggtgttttcagaggaccaactgtcgaaggaaaaggtgaaagaggaaataggctcttcgtggattgagacacccccgagcattaagtcactcgatagcaacgatagcggtgtgtatacgtcagcctgtaaacgcagacgcctgagcccttctaatagttcaaacgaaaattcaccttcaatcaaatgtgaggacattaatgctgaggagtattcaaaggacacatcaaaaggcatggggggctactacgctttctacacgactccgtag

SEQ ID NO: 156139 - DNA, 2061 bp, Artificial Sequence
  derived and/or modified sequence
atgcagctgggggagcagctgctggtgtcctctgtgaacctgcccggggcccacttctaccccctggagagcgcccggggcggcagcggcggcagcgctggccacctgcccagcgctgcccccagcccccagaagctggacctggacaaggccagcaagaagttcagcggcagcctgagctgtgaggccgtgtctggagagcctgctgctgccagcgctggggccccagctgccatgctgagtgacacagatgctggagatgcctttgccagcgctgctgctgtggccaagccaggccccccagatggcaggaagggcagcccctgtggggaggaggagctgcccagcgctgctgctgctgctgctgctgctgctgctgctgctgctgccacagcccgctacagcatggacagcctgagcagcgagcgctactacctgcagagccctggcccccagggcagcgagctggccgccccctgcagcctcttcccctaccaggccgctgctggggcccctcatggccctgtgtacccagccccaaatggagcccgctacccctacggctccatgctgcccccaggcggcttccctgctgctgtgtgccccccaggccgggcccagtttggacctggggccggggccggcagcggggccggcggcagcagcggcggcggcggcggccctggcacctaccagtacagccagggcgcccccctgtatggcccctacccaggagctgctgctgctggcagctgtggcggcctgggcggcctgggcgtgcccggcagcggcttccgggcccacgtgtacctgtgcaaccggcccctgtggctgaagttccaccgccaccagacagagatgatcatcaccaagcagggccgcaggatgttccccttcctgtccttcaacatcaatggcctgaaccccacagcccactacaacgtgtttgtggaggtggtgctggccgaccccaaccactggaggttccagggcggcaagtgggtgacctgtgggaaggctgacaacaacatgcagggcaacaagatgtatgtgcaccctgagagccccaacacaggcagccactggatgaggcaggagatcagctttgggaagctgaagctgaccaacaacaagggggccaacaacaacaacacccagatgattgtgctgcagagcctgcacaagtaccagccccggctgcacatcgtggaggtgacagaagatggagtggaggacctgaatgagcccagcaagacccagaccttcaccttcagcgagacccagttcatcgctgtgacagcctaccagaacacagacatcacccagctgaagattgaccacaacccctttgccaagggcttccgggacaactatgacagcagccaccagatcgtgcctgggggccgctatggagtgcagagcttcttccctgagccctttgtgaacaccctgccccaggcccgctactacaatggagagaggacagtgccccagaccaacggcctgctgagcccccagcagagcgaggaggtggccaaccccccccagcgctggctggtgacccctgtgcagcagcccggcaccaacaagctggacatcagcagctatgagagcgagtacaccagcagcaccctgctgccctacggcatcaagagcctgcccctgcagaccagccacgccctgggctactacccagaccccaccttccctgccatggccggctggggcggccggggcagctaccagaggaagatggctgctggcctgccctggaccagcaggaccagccccaccgtcttcagcgaggaccagctgagcaaggagaaggtgaaggaggagatcggcagctcctggattgagaccccacccagcatcaagagcctggacagcaatgattctggagtgtacaccagcgcctgcaagagaagaaggctgagccccagcaacagcagcaatgaaaacagccccagcatcaagtgtgaggacatcaatgctgaggagtacagcaaggacaccagcaagggcatgggcggctactatgccttctacaccaccccctag

SEQ ID NO: 156140 - DNA, 2061 bp, Artificial Sequence
  derived and/or modified sequence
atgcagctgggcgagcagctgctggtgagcagcgtgaacctgcccggagcacatttctatcccctcgaatccgctcgtggaggcagtggcgggtccgcaggtcatctgcctagcgcggccccatccccacagaagctggacctcgacaaggccagcaaaaagttttctggatctttgagctgtgaggccgtatcgggagagcctgcggccgcgagcgcaggagcacccgcggcaatgctgtcagataccgatgccggcgatgctttcgcttccgcagccgcagtagccaaacccgggccccccgacggaaggaaaggcagtccttgtggcgaggaggagttgccgtcagctgcggccgctgccgccgcagctgcagccgcagctgcagccacagccagatacagcatggattccctctcttctgagcggtactacctgcaatcgccaggaccgcaggggagtgaactggccgctccttgctccttgttcccctaccaggcagcggcaggtgcccctcacggccccgtgtaccctgcccccaacggcgccaggtacccatatggatctatgctccctccaggtgggtttccagccgcggtgtgtccaccaggtcgagcccagtttggaccgggcgccggagccgggtccggggccgggggatcttctggggggggggggggacctggtacataccagtactcacagggcgcacccctgtatggcccctacccaggtgcggcagctgcgggaagctgcggaggcctgggcgggttgggcgttcctgggagcggtttcagagcacatgtctatctctgtaatagacccctgtggcttaaattccatagacatcagacagagatgatcatcacaaagcaaggtagacgcatgtttccgtttctgtccttcaatatcaacggccttaaccctactgctcattacaacgttttcgtcgaggtcgtactcgccgacccaaatcactggcgctttcagggaggcaagtgggtgacatgtggaaaggctgataacaatatgcagggaaacaaaatgtacgtgcatcccgagagccctaataccgggtctcactggatgaggcaggagatttcctttggtaagttgaagctgacgaacaataaaggcgccaacaataacaatactcaaatgattgtgttgcagtccctgcacaagtaccagcccagacttcacattgtcgaagtaaccgaagacggtgtggaggacctgaatgagccctccaaaactcaaacctttacattttccgaaacgcaattcatcgctgtcacggcctaccagaatacagacatcactcagctgaagatcgaccacaacccgtttgctaagggattccgagataactatgactcctctcaccagattgtgcctgggggacgatacggcgtgcagtctttttttcctgaaccttttgtcaataccttgcctcaggctaggtactataatggggagcggaccgtccctcaaacaaatggactgctgagcccacagcaaagcgaagaggtggctaaccccccacagcgctggctcgttacccccgtgcaacaaccggggacaaataaactggatatatcaagttacgagagcgaatatacatcatccacactgttgccctacggaatcaagtcactccctctgcagacctcccatgcgcttggctactatcctgaccccactttccccgccatggccgggtggggaggtcgtggctcttatcagaggaagatggctgctggcttgccatggacctctcggacctcccccacggtgttttctgaggatcaactgtccaaagaaaaggtcaaagaagaaataggatctagctggatcgagaccccaccctccatcaagtccctagacagcaatgattctggggtttacacctccgcttgcaagcgaagaaggctgtcgccatctaattcgtctaatgagaactcccccagcatcaaatgtgaggacatcaatgctgaagaatattccaaggacacttctaaggggatgggaggttattatgcgttttatacaacaccctag

SEQ ID NO: 156141 - DNA, 2061 bp, Artificial Sequence
  derived and/or modified sequence
atgcaactgggtgagcagctgctggtcagcagtgtgaacctccccggagcacacttttacccactcgagtcagcaagagggggtagcgggggttctgcaggtcatctgccatccgcggctccgtcacctcaaaaactcgacctcgataaggcctcaaagaagttctccggcagtctgtcttgcgaggcggtcagtggggagcccgcagccgcaagtgccggagcacccgctgctatgttgtccgatactgatgccggagatgctttcgcgagcgcggcagccgtggcgaagccaggaccacctgatggtagaaaggggtcaccttgcggcgaggaggagctacccagcgcagcggctgcagccgcagccgcagccgcagccgctgccgcaacagcgcgttactcgatggacagtttgtccagtgagagatactacctgcaatcacccggaccccaggggtctgagctcgccgcaccatgctcgctctttccgtaccaggcagcggcaggggcaccgcatggcccagtgtacccagccccaaatggcgcacgctacccctatggatctatgcttccgccaggaggctttccagcggctgtgtgtccccctgggagagcccagttcggtcctggggcaggtgccggatcaggtgccggaggatcttcaggcggagggggtgggccaggcacctaccagtacagccagggagctcctctctacggcccttatccaggcgcagccgctgccggatcgtgcgggggactgggcggtctcggcgtgcctggttccggcttcagagcccacgtctatctctgtaacaggcccctttggttaaagttccaccgacaccagactgagatgattatcacaaaacaaggacgtcgcatgttccctttcctgagctttaatattaacggactcaaccccactgcccattacaatgtgtttgtcgaggtggttttggccgaccctaaccactggaggttccaagggggaaaatgggtaacctgtggtaaggcagataacaatatgcaggggaacaaaatgtatgtgcacccggagagtcctaacactggatcccattggatgcggcaagagattagcttcggaaaactgaaactaactaataacaaaggtgccaacaacaacaacacgcagatgattgttcttcaatctctgcataagtaccagcccaggctccacattgtggaagtcactgaggatggagtagaggatctgaacgagcccagtaagacacagactttcactttctctgagactcagttcatagccgtcactgcctaccagaacacagacatcacacagctgaagatcgatcataatccattcgctaaaggcttccgcgataattatgattcctcacaccagatcgtgccagggggacgatacggggtgcaatccttctttcccgaacctttcgtcaataccctgcctcaagccagatactacaatggagagaggactgttccacagacaaacggacttctctcgccacaacagtccgaagaggttgcaaatccaccgcagcgctggctagttactcccgtgcagcaaccaggcacaaacaagttggatataagctcctatgagtcagagtatacgtcaagtaccctcctgccctatggcattaagagcctgcccctgcagacttcacacgccctgggctactatcctgaccctaccttcccggcaatggccggatggggtgggaggggatcataccaacgcaagatggcagcgggactcccttggacttccagaacaagcccgaccgtgttctctgaggaccagttgtctaaggaaaaggttaaggaggaaattgggtccagttggatagagacgccgccaagtatcaaatccttggactccaatgactccggcgtctacacatctgcgtgcaaaaggagacgattaagcccatcaaattcaagcaatgaaaattcccctagtatcaagtgtgaggatatcaatgcagaggaatattcaaaagacaccagcaaggggatgggaggatactatgctttttatactacaccctag

SEQ ID NO: 156142 - DNA, 2061 bp, Artificial Sequence
  derived and/or modified sequence
atgcagctgggcgagcagctgctggtgagcagcgtgaacctgcccggcgcccacttctaccccctggagagcgccagaggcggcagcggcggcagcgccggccacctgcccagcgccgcccccagcccccagaagctggacctggacaaggccagcaagaagttcagcggcagcctgagctgcgaggccgtgagcggcgagcccgccgccgccagcgccggcgcccccgccgccatgctgagcgacaccgacgccggcgacgccttcgccagcgccgccgccgtggccaagcccggcccccccgacggcagaaagggcagcccctgcggcgaggaggagctgcccagcgccgccgccgccgccgccgccgccgccgccgccgccgccgccaccgccagatacagcatggacagcctgagcagcgagagatactacctgcagagccccggcccccagggcagcgagctggccgccccctgcagcctgttcccctaccaggccgccgccggcgccccccacggccccgtgtaccccgcccccaacggcgccagatacccctacggcagcatgctgccccccggcggcttccccgccgccgtgtgcccccccggcagagcccagttcggccccggcgccggcgccggcagcggcgccggcggcagcagcggcggcggcggcggccccggcacctaccagtacagccagggcgcccccctgtacggcccctaccccggcgccgccgccgccggcagctgcggcggcctgggcggcctgggcgtgcccggcagcggcttcagagcccacgtgtacctgtgcaacagacccctgtggctgaagttccacagacaccagaccgagatgatcatcaccaagcagggcagaagaatgttccccttcctgagcttcaacatcaacggcctgaaccccaccgcccactacaacgtgttcgtggaggtggtgctggccgaccccaaccactggagattccagggcggcaagtgggtgacctgcggcaaggccgacaacaacatgcagggcaacaagatgtacgtgcaccccgagagccccaacaccggcagccactggatgagacaggagatcagcttcggcaagctgaagctgaccaacaacaagggcgccaacaacaacaacacccagatgatcgtgctgcagagcctgcacaagtaccagcccagactgcacatcgtggaggtgaccgaggacggcgtggaggacctgaacgagcccagcaagacccagaccttcaccttcagcgagacccagttcatcgccgtgaccgcctaccagaacaccgacatcacccagctgaagatcgaccacaaccccttcgccaagggcttcagagacaactacgacagcagccaccagatcgtgcccggcggcagatacggcgtgcagagcttcttccccgagcccttcgtgaacaccctgccccaggccagatactacaacggcgagagaaccgtgccccagaccaacggcctgctgagcccccagcagagcgaggaggtggccaaccccccccagagatggctggtgacccccgtgcagcagcccggcaccaacaagctggacatcagcagctacgagagcgagtacaccagcagcaccctgctgccctacggcatcaagagcctgcccctgcagaccagccacgccctgggctactaccccgaccccaccttccccgccatggccggctggggcggcagaggcagctaccagagaaagatggccgccggcctgccctggaccagcagaaccagccccaccgtgttcagcgaggaccagctgagcaaggagaaggtgaaggaggagatcggcagcagctggatcgagaccccccccagcatcaagagcctggacagcaacgacagcggcgtgtacaccagcgcctgcaagagaagaagactgagccccagcaacagcagcaacgagaacagccccagcatcaagtgcgaggacatcaacgccgaggagtacagcaaggacaccagcaagggcatgggcggctactacgccttctacaccaccccctag

SEQ ID NO: 156143 - DNA, 3386 bp, Artificial Sequence
  derived and/or modified sequence
tttccttccggaaaggacgctggattcagggcgcgccagtacgcgcagtagcggcccgcgagtcggcaggtgggtagccccggcgcgggaggaaggggaagttaccttcccctcggaagagggcgctggctcccccatcctgcctttataataaggccaccggaggagaggaagcagccagctgccgtctgcgctttgcaaagcatgcagttaggggagcagctcttggtgagctcagtgaacctgcctggcgcgcacttctacccgctggagagtgcgcgaggcggcagcggcgggagcgctggccacctccccagcgcggccccctctcctcagaagttggacttagacaaagcgtccaagaagttttccggcagtctctcctgcgaggcggtgagcggggagcccgcagccgccagcgcaggggcccccgcggccatgcttagtgacaccgacgccggggacgcatttgccagcgctgcggcagtggccaagccggggcccccggacggccgcaagggctccccctgcggggaggaggagctgccctccgccgctgcagccgccgccgccgccgccgccgcggctgcggccactgcgcgctactccatggacagcctgagctccgagcggtactacctccagtcccccggtcctcaggggtcggagctggctgcgccctgctcactcttcccgtaccaggcggcggctggggcgccccacggacctgtgtacccggctcctaacggggcgcgctacccctacggctccatgctgccccccggcggcttccccgcggctgtgtgcccacccgggagggcgcagttcggcccaggagccggtgcgggcagtggcgcgggcggtagcagcggcgggggcggcggcccgggcacctatcagtacagccagggggctccgctctacgggccgtaccctggagccgcagcggcgggatcttgcggaggactggggggcctgggggttccaggttctggcttccgtgcccacgtctacctgtgcaaccggcctctgtggctcaaattccaccgccaccaaactgagatgatcattacgaaacagggcaggcgcatgtttcctttcttgagcttcaacataaacggactcaatcccactgcccactacaatgtgttcgtagaggtggtgctggcggaccccaaccactggcgcttccaggggggcaaatgggtgacctgtggcaaagccgacaataacatgcagggcaacaaaatgtatgttcacccagagtctcctaatactggttcccactggatgagacaggagatttcattcgggaaattaaaactcaccaataacaaaggcgcaaataacaacaacacccagatgatagtcttacaatccttacacaaataccaaccccgactgcatattgttgaagttacagaggatggcgtggaggacttgaatgagccctcaaagacccagacttttaccttctcagaaacgcaattcattgcagtgactgcctaccaaaacaccgatattactcaactaaagattgatcataacccctttgcaaaaggcttcagagacaactatgattcatcccatcagattgtccctggaggtcggtacggcgttcaatccttcttcccggagccctttgtcaacactttacctcaagcccgctattataatggcgagagaaccgtgccacagaccaacggcctcctttcaccccaacagagcgaagaggtggccaaccctccccagcggtggcttgtcacgcctgtccagcaacctgggaccaacaaactagacatcagttcctatgaatctgaatatacttctagcacattgctcccatatggcattaaatccttgccccttcagacatcccatgccctggggtattacccagacccaacctttcctgcaatggcagggtggggaggtcgaggttcttaccagaggaagatggcagctggactaccatggacctccagaacaagccccactgtgttctctgaagatcagctctccaaggagaaagtgaaagaggaaattggctcttcttggatagagacacccccttccatcaaatctctagattccaatgattcaggagtatacaccagtgcttgtaagcgaaggcggctgtctcctagcaactccagtaatgaaaattcaccctccataaagtgtgaggacattaatgctgaagagtatagtaaagacacctcaaaaggcatgggagggtattatgctttttacacaactccctaaagagttattttaacctcaaaaattagctaactttttgcagatggacttggtggtgttttttgttgtcttctttgcctaggttgccaaaaagatgtttgccttccaccttgatgcatcctgttttgtgcaattctctaaaagaaggtgccaaagctttttgattgctgcaggtaactgaaacaaacctagcatttttaaaaaataagattaatggaagactttaaggtattttaaaattcgaagggtatccaaggttctgtatttatttattggggagacactaacccttcaaagaagcaggctgtgaacattgggtgcccagtgctatcagatgagttaaaacctttgattctcatttctatttgtaaattcttaagcaaatagaagccgagtgttaaggtgttttgcttctgaaagagggctgtgccttccgtttcagaaggagacattttgctgttacattctgccaggggcaaaagatactaggcccaggagtcaagaaaagcttttgtgaaagtgatagtttcacctgactttgattccttaacccccggcttttggaacaagccatgtttgccctagtccaggattgcctcacttgagacttgctaggcctctgctgtgtgctggggtggccagtgggactcaggagagagcaagctaaggagtcaccaaaaaaaaaaaaaaaaaaaagggagaatttaaaagtgtacagttgtgtgtttagatacactatagaataatgtggtatatattgtacaaatagtctacataggtgtctgggataatgtaaaactggtgctttggctttgtaaagaatttgcaaatcacttaacagctgcaggggcaaggggagagtttcatcatccccatgatatttgggaatattctgtttacttcttagatagttaagaatgtattcagctactatgtactaacttgaaccgtgtttaaggaaaactcctatttcatcctcttcttgcgccatcccctctccctaacttggtaatgtgaagaaactaaaacctgataccacagctcctataggcattttagagatcttggatttttatgtacagtcttagtcatttttaataaatgtggttcagtaagggaacgga

SEQ ID NO: 156144 - protein, 624 aa, Artificial Sequence
  derived and/or modified sequence
MEIPGSLCKKVKLSNNAQNWGMQRATNVTYQAHHVSRNKRGQVVGTRGGFRGCTVWLTGLSGAGKTTVSMALEEYLVCHGIPCYTLDGDNIRQGLNKNLGFSPEDREENVRRIAEVAKLFADAGLVCITSFISPYTQDRNNARQIHEGASLPFFEVFVDAPLHVCEQRDVKGLYKKARAGEIKGFTGIDSEYEKPEAPELVLKTDSCDVNDCVQQVVELLQERDIVPVDASYEVKELYVPENKLHLAKTDAETLPALKINKVDMQWVQVLAEGWATPLNGFMREREYLQCLHFDCLLDGGVINLSVPIVLTATHEDKERLDGCTAFALMYEGRRVAILRNPEFFEHRKEERCARQWGTTCKNHPYIKMVMEQGDWLIGGDLQVLDRVYWNDGLDQYRLTPTELKQKFKDMNADAVFAFQLRNPVHNGHALLMQDTHKQLLERGYRRPVLLLHPLGGWTKDDDVPLMWRMKQHAAVLEEGVLNPETTVVAIFPSPMMYAGPTEVQWHCRARMVAGANFYIVGRDPAGMPHPETGKDLYEPSHGAKVLTMAPGLITLEIVPFRVAAYNKKKKRMDYYDSEHHEDFEFISGTRMRKLAREGQKPPEGFMAPKAWTVLTEYYKSLEKA

SEQ ID NO: 156145 - DNA, 1875 bp, Artificial Sequence
  derived and/or modified sequence
atggaaattcccggctctctctgcaagaaagtgaaactcagcaacaacgctcagaattggggaatgcaacgtgcaacaaacgttacgtaccaggctcatcacgtctctcggaataaacgagggcaggtggtagggaccagaggcggttttcgcggctgtaccgtgtggctgactggtttatctggtgcagggaaaacgactgtgtccatggcattagaggaatatctggtgtgccacggaatcccatgctatactctggatggtgacaacataagacagggccttaacaagaaccttggctttagccctgaggaccgcgaggaaaatgtgcggagaattgctgaggtggctaagttgttcgccgatgccggcctggtgtgcataacgagctttatttctccatacacccaagatcgcaacaatgctcgtcaaatccatgaaggcgcctctttgcccttttttgaagtgttcgtagacgcgccactccatgtgtgcgagcagcgcgacgtgaagggcctgtacaagaaggcccgcgcaggcgagataaagggctttaccgggatcgacagtgaatacgagaagccagaggcccccgaactggttctgaagaccgactcttgtgatgtcaacgattgcgtgcagcaagtggtagagcttctccaagagcgagacatcgtgccagttgacgcgtcttacgaggtgaaggagctgtatgtccccgagaataaactccatctcgccaaaaccgacgcagagaccctccccgccctgaaaatcaataaggtagacatgcagtgggttcaagtactcgccgagggctgggcaacaccgctgaatggctttatgcgggaacgagagtacctgcagtgtctgcactttgactgtctgctggacggtggcgtgatcaacctgagcgtgccgatcgtgcttacagctacacacgaggacaaagaacgattagacggttgtacagcctttgccttaatgtatgagggacgacgcgtcgcaattctgcggaaccctgagttcttcgaacaccggaaggaggaacggtgcgcacggcagtggggaacgacatgcaaaaatcatccttacatcaagatggtcatggagcagggagactggctgataggaggcgacttgcaggtcttggatcgggtgtactggaatgacggattagaccagtatcgtctaacccccactgaattaaagcagaagtttaaggacatgaacgcagatgccgttttcgccttccagctcaggaatcccgtccacaacggacatgccctccttatgcaagacacacacaagcaactcctagagcgcgggtacagacggcccgtcctcttgctccaccctctgggcggttggacgaaggatgacgacgtcccattgatgtggaggatgaagcagcacgctgccgttctggaggagggggtgctgaaccctgagaccacagtcgtagccatcttcccctcaccaatgatgtacgcaggcccgaccgaggtgcagtggcactgccgagcacgaatggtcgccggagcgaatttttatatcgtgggcagggaccccgcaggtatgccacatcccgagacaggcaaggacctttatgagcctagccatggggctaaggtgcttacaatggcccctggcttgattactctggaaatcgtcccttttagggtagcagcctacaataagaagaagaaacgtatggattactatgacagtgagcatcacgaagactttgagttcatctctggcaccagaatgaggaagcttgctagggaaggccagaagccccccgagggttttatggctcccaaggcctggaccgtcctgactgagtactacaaaagcctggaaaaagcctag

SEQ ID NO: 156146 - DNA, 1875 bp, Artificial Sequence
  derived and/or modified sequence
atggagatccctggcagcctgtgcaagaaggtgaagctgagcaacaatgcccagaactggggcatgcagagggccaccaacgtgacctaccaggcccaccacgtgtccaggaacaagaggggccaggtggtgggcacccggggcggcttccggggctgcaccgtgtggctgaccggcctgtctggagctgggaagaccaccgtgtccatggccctggaggagtacctggtgtgccacggcatcccctgctacaccctggatggagacaacatccggcagggcctgaacaagaacctgggcttcagccctgaggaccgggaggagaatgtgagaagaattgctgaggtggccaagctgtttgctgatgctggcctggtgtgcatcaccagcttcatcagcccctacacccaggacagaaataatgcccggcagatccacgagggcgccagcctgcccttctttgaggtgtttgtggatgcccccctgcacgtgtgtgagcagagagatgtgaagggcctgtacaagaaggcccgggccggggagatcaagggcttcaccggcatcgacagtgaatatgagaagccagaggcccctgagctggtgctgaagacagacagctgtgatgtgaatgactgtgtgcagcaggtggtggagctgctgcaggagcgggacatcgtgcctgtggatgccagctatgaggtgaaggagctgtatgtgcctgagaacaagctgcacctggccaagacagatgctgagaccctgcctgccctgaagatcaacaaggtggacatgcagtgggtgcaggtgctggccgagggctgggccacccccctgaatggcttcatgagggagcgggagtacctgcagtgcctgcactttgactgcctgctggatggcggcgtcatcaacctgtctgtgcccatcgtgctgacagccacccatgaggacaaggagcggctggatggctgcacagcctttgccctgatgtatgagggcagaagagtggccatcctgagaaatcctgagttctttgagcacaggaaggaggagcgctgtgcccggcagtggggcaccacctgcaagaaccacccctacatcaagatggtgatggagcagggcgactggctgattggaggagacctgcaggtgctggacagagtgtactggaatgatggcctggaccagtaccgcctgacccccacagagctgaagcagaagttcaaggacatgaatgctgatgctgtgtttgccttccagctgagaaatcctgtgcacaacggccacgccctgctgatgcaggacacccacaagcagctgctggagcggggctacagaagacctgtgctgctgctgcaccccctgggcggctggaccaaggatgatgatgtgcccctgatgtggaggatgaagcagcacgccgctgtgctggaggagggcgtgctgaaccctgagaccaccgtggtggccatcttccccagccccatgatgtatgccggccccacagaggtgcagtggcactgccgggccaggatggtggccggggccaacttctacatcgtgggccgggaccctgctggcatgccccaccctgagaccgggaaggacctgtatgagcccagccatggagccaaggtgctgaccatggcccctggcctcatcaccctggagatcgtgcccttccgggtggccgcctacaacaagaagaagaagaggatggactactatgattctgagcaccatgaagattttgagttcatcagcggcaccaggatgaggaagctggcccgggagggccagaagcccccagagggcttcatggcccccaaggcctggacagtgctgacagagtactacaagagcctggagaaggcctag

SEQ ID NO: 156147 - DNA, 1875 bp, Artificial Sequence
  derived and/or modified sequence
atggagatccccggcagcctgtgcaagaaggtgaagctgagcaacaacgcgcagaattggggaatgcagagggccaccaatgtaacgtatcaggcccaccatgtcagcagaaataagagaggccaagttgtgggcacaagaggcggattcagaggatgtacggtgtggctaacaggactgagtggggcaggcaaaacgactgtgtcaatggccctcgaggaatacctcgtgtgccacggaattccctgctatacactggacggcgataacatacggcagggtctgaataaaaacctagggttctctccagaggatcgagaagaaaatgtgaggagaatagccgaggttgcaaaactgtttgcagatgccggccttgtgtgcatcaccagttttatttccccatatacccaagacagaaacaacgcccgacagattcatgagggtgcaagcctcccattcttcgaagtgttcgtagacgcccccctccacgtgtgcgaacaacgggacgtgaaggggctttacaaaaaagcccgcgccggcgagatcaaagggttcacgggtatcgactctgaatacgagaagccagaagctcctgagctcgtcctgaaaactgattcctgcgacgttaacgactgtgtacaacaggtagtcgagttactgcaggaaagagatatcgtgccagttgatgcatcctatgaagtgaaggagctctatgttcccgagaataaactccacctcgccaagacggatgcggagacccttcccgccctaaaaatcaacaaggtggacatgcagtgggtccaggtgctagcagaggggtgggctactccccttaatggatttatgagagaacgcgaatacctgcagtgtttgcatttcgattgccttctcgacggaggggtgatcaatctgtcggtgcccatcgtactgacagctacccatgaggataaggagcgcttagacgggtgcaccgcttttgcgctcatgtatgaaggccgccgggtcgcaatcttaagaaaccctgaatttttcgagcataggaaagaggagcgatgcgcacgacagtggggaactacatgcaagaaccatccctacattaaaatggtcatggaacagggtgactggttgataggcggagacctgcaagtgctcgatcgtgtttactggaacgatgggcttgatcagtatagactcacccccacagagcttaagcagaagttcaaggatatgaacgcagatgctgtatttgccttccagctgaggaatccggtacacaacgggcatgctctccttatgcaggacactcataagcagttgctagaaaggggttatcggcgcccagtcctcctgctgcatcccttaggagggtggacgaaggatgatgatgtccctctgatgtggcggatgaaacagcacgctgccgtgctggaggagggcgtactcaaccctgaaacaactgtggtggccatcttcccctcaccaatgatgtacgcaggtcctaccgaagtacagtggcactgtagagctcgaatggtggcaggggcaaatttttacatcgtgggaagagaccccgcaggcatgccgcaccctgagactggtaaggacctgtacgaacctagccacggggcaaaagtgctgaccatggcccccgggctgatcactcttgagattgtcccctttcgggtagccgcctataataagaaaaagaagagaatggactactacgactccgaacaccatgaggacttcgaatttatcagtggcaccagaatgaggaagctggccagagagggtcaaaagcctccagagggatttatggcccctaaagcatggacggtgctcactgagtactacaagtctcttgaaaaagcctag

SEQ ID NO: 156148 - DNA, 1875 bp, Artificial Sequence
  derived and/or modified sequence
atggaaattccgggaagtttgtgtaagaaagtgaaattgagcaacaatgctcagaattggggcatgcagcgcgcaaccaacgtgacataccaggcgcatcacgtttcccggaataaaaggggtcaagttgttgggactcgcggtggttttaggggctgtacggtgtggcttacgggccttagcggagccggaaagactacagtgtcaatggctttggaagaataccttgtctgccacggcatcccctgctacacccttgatggagataacattaggcagggactgaacaagaatctgggcttttcaccagaggatcgggaagaaaacgtcaggaggatcgctgaagtggcaaagttgttcgccgacgctggcctggtttgtattacgagtttcatatccccttacacacaggatagaaataatgccaggcagatccatgagggagcctctctgcccttctttgaggttttcgttgatgcgccactgcacgtgtgtgagcagcgcgacgtgaaaggcctttacaaaaaagccagagcgggagagatcaaaggtttcaccggcatcgattccgagtacgaaaagcctgaggccccagagctagtcttgaaaacagactcttgcgacgttaatgattgcgttcagcaagttgttgagctgctccaggagagggacatcgtccccgtagacgcaagttatgaggtgaaagagctatacgtgcccgaaaataagctgcacttggccaagactgacgctgagaccctcccagctctaaaaatcaacaaagtcgatatgcagtgggtgcaggtactggcagagggctgggccacccccctgaatgggtttatgcgcgaaagagagtacttgcaatgtctgcacttcgactgtctgctggatgggggtgtgatcaatctcagtgtccctatagtcttgaccgccacgcacgaggataaggagaggctagatggatgtactgcttttgccctgatgtatgaaggacgtcgcgtagctatactgcggaatcccgagttcttcgagcatcgtaaggaggagcgctgcgccaggcagtggggcaccacttgtaaaaaccacccatatatcaaaatggtgatggaacagggagattggttaattggaggggaccttcaagtactggatcgggtctactggaacgacggtctcgatcagtatagactgacaccgacagagcttaaacagaagttcaaggacatgaatgctgatgctgtcttcgcgtttcagcttagaaacccagtgcataacgggcatgccctacttatgcaggatactcacaaacagttgttagagaggggctataggaggccagtgctgctcctgcatccgctgggaggatggaccaaagatgatgacgtcccgctgatgtggcggatgaagcagcacgcggctgtactggaagagggtgtgcttaatccagagacaactgtggtggcaatcttcccgtctccaatgatgtatgcaggcccaaccgaggtgcagtggcactgccgagctcggatggtagctggcgcaaatttctacatcgtgggaagagacccggctggcatgccccatccagaaaccggaaaggatctgtacgagccaagtcatggcgcaaaggtcctcaccatggctccagggttaatcaccctcgagatagtgccatttagagtggctgcttataataaaaaaaaaaagagaatggactattatgactcagagcaccacgaagactttgaattcatttcaggtactcgtatgaggaaactcgctagagagggccaaaaaccccctgaaggcttcatggcacctaaagcatggacggtacttacagagtattataaatctttagagaaagcgtag

SEQ ID NO: 156149 - DNA, 2731 bp, Artificial Sequence
  derived and/or modified sequence
gcgagcgctgaagctccgcccccagcttctacctccggttctatcccggcgtttcgcccttccccacagacctctgccccggacccatttccgaggcgcgccgcatgcgccgcgcaacccaggccacgagcacgggcgcgtgcttaagtcagcgcgcgcccgctccgacgcgaggaggccccgccctccagccccgccccgctcgctggcctgccctcctcttgctaccctcccggcgcagagaaccccggctgctcagcgcgctccgcggtcatggagatccccgggagcctgtgcaagaaagtcaaactgagcaataacgcgcagaactggggaatgcagagagcaaccaatgtcacctaccaagcccatcatgtcagcaggaacaagagaggtcaggtggtggggaccagaggtggctttcgtggttgcacagtttggctaacaggcttgtctggagcgggaaagactactgtgagcatggccttggaggagtacctggtttgtcatggtattccatgctacactctggatggtgacaatattcgtcaaggtctcaataaaaatcttggctttagtcctgaagacagagaagagaatgttcgacgcatcgcagaagttgctaaactgtttgcagatgctggcttagtgtgcatcacaagtttcatatcaccttacactcaggatcgcaacaatgcaaggcaaattcatgaaggtgcaagtttaccgttttttgaagtatttgttgatgctcctctgcatgtttgtgaacagagggatgtcaaaggactctacaaaaaagcccgggcaggagaaattaaaggtttcactgggatcgattctgaatatgaaaagccagaggcccctgagttggtgctgaaaacagactcctgtgatgtaaatgactgtgtccagcaagttgtggaacttctacaggaacgggatattgtacctgtggatgcatcttatgaagtaaaagaactatatgtgccagaaaataaacttcatttggcaaaaacagatgcggaaacattaccagcactgaaaattaataaagtggatatgcagtgggtgcaggttttggcagaaggttgggcaaccccattgaatggctttatgagagagagggagtacttgcagtgccttcattttgattgtcttctggatggaggtgtcattaacttgtcagtacctatagttctgactgcgactcatgaagataaagagaggctggacggctgtacagcatttgctctgatgtatgagggccgccgtgtggccattcttcgcaatccagagttttttgagcacaggaaagaggagcgctgtgccagacagtggggaacgacatgcaagaaccacccctatattaagatggtgatggaacaaggagattggctgattggaggagatcttcaagtcttggatcgagtttattggaatgatggtcttgatcagtatcgtcttactcctactgagctaaagcagaaatttaaagatatgaatgctgatgctgtctttgcatttcaactacgcaacccagtgcacaatggacatgccctgttaatgcaggatacccataagcaacttctagagaggggctaccggcgccctgtcctcctcctccaccctctgggtggctggacaaaggatgacgatgttcctttgatgtggcgtatgaagcagcatgctgcagtgttggaggaaggagttctgaatcctgagacgacagtggtggccatcttcccatctcccatgatgtatgctggaccaactgaggtccagtggcattgcagagcacggatggttgcaggagccaacttttacattgttggacgagaccctgctggcatgcctcatccagaaacagggaaggatctttatgagccaagtcatggtgccaaagtgctgacgatggcccctggtttaatcactttggaaatagttccctttcgagttgcagcttacaacaagaaaaagaagcgtatggactactatgactctgaacaccatgaagactttgaatttatttcaggaacacgaatgcgcaaacttgctcgagaaggccagaaaccacctgaaggtttcatggctcccaaggcttggaccgtgctgacagaatactacaaatccttggagaaagcttaggctgttaacccagtcactccacctttgacacattactagtaacaagaggggaccacatagtctctgttggcatttctttgtggtgtctgtctggacatgcttcctaaaaacagaccattttccttaacttgcatcagttttggtctgccttatgagttctgttttgaacaagtgtaacacactgatggttttaatgtatcttttccacttattatagttatattcctacaatacaattttaaaattgtctttttatattatatttatgcttctgtgtcatgattttttcaagctgttatattagttgtaaccagtagtattcacattaaatcttgctttttttccccttaaaaaaagaaaaaaattaccaaacaataaacttggctagaccttgttttgaggattttacaagacctttgtagcgattagattttttttctacattgaaaatagaaactgcttcctttcttctttccagtcagctattggtctttccagctgttataatctaaagtattcttatgatctgtgtaagctctgaatgaacttctttactcaataaaattaattttttggcttctta

SEQ ID NO: 156150 - DNA, 1875 bp, Artificial Sequence
  derived and/or modified sequence
atggagatccccggcagcctgtgcaagaaggtgaagctgagcaacaacgcccagaactggggcatgcagagagccaccaacgtgacctaccaggcccaccacgtgagcagaaacaagagaggccaggtggtgggcaccagaggcggcttcagaggctgcaccgtgtggctgaccggcctgagcggcgccggcaagaccaccgtgagcatggccctggaggagtacctggtgtgccacggcatcccctgctacaccctggacggcgacaacatcagacagggcctgaacaagaacctgggcttcagccccgaggacagagaggagaacgtgagaagaatcgccgaggtggccaagctgttcgccgacgccggcctggtgtgcatcaccagcttcatcagcccctacacccaggacagaaacaacgccagacagatccacgagggcgccagcctgcccttcttcgaggtgttcgtggacgcccccctgcacgtgtgcgagcagagagacgtgaagggcctgtacaagaaggccagagccggcgagatcaagggcttcaccggcatcgacagcgagtacgagaagcccgaggcccccgagctggtgctgaagaccgacagctgcgacgtgaacgactgcgtgcagcaggtggtggagctgctgcaggagagagacatcgtgcccgtggacgccagctacgaggtgaaggagctgtacgtgcccgagaacaagctgcacctggccaagaccgacgccgagaccctgcccgccctgaagatcaacaaggtggacatgcagtgggtgcaggtgctggccgagggctgggccacccccctgaacggcttcatgagagagagagagtacctgcagtgcctgcacttcgactgcctgctggacggcggcgtgatcaacctgagcgtgcccatcgtgctgaccgccacccacgaggacaaggagagactggacggctgcaccgccttcgccctgatgtacgagggcagaagagtggccatcctgagaaaccccgagttcttcgagcacagaaaggaggagagatgcgccagacagtggggcaccacctgcaagaaccacccctacatcaagatggtgatggagcagggcgactggctgatcggcggcgacctgcaggtgctggacagagtgtactggaacgacggcctggaccagtacagactgacccccaccgagctgaagcagaagttcaaggacatgaacgccgacgccgtgttcgccttccagctgagaaaccccgtgcacaacggccacgccctgctgatgcaggacacccacaagcagctgctggagagaggctacagaagacccgtgctgctgctgcaccccctgggcggctggaccaaggacgacgacgtgcccctgatgtggagaatgaagcagcacgccgccgtgctggaggagggcgtgctgaaccccgagaccaccgtggtggccatcttccccagccccatgatgtacgccggccccaccgaggtgcagtggcactgcagagccagaatggtggccggcgccaacttctacatcgtgggcagagaccccgccggcatgccccaccccgagaccggcaaggacctgtacgagcccagccacggcgccaaggtgctgaccatggcccccggcctgatcaccctggagatcgtgcccttcagagtggccgcctacaacaagaagaagaagagaatggactactacgacagcgagcaccacgaggacttcgagttcatcagcggcaccagaatgagaaagctggccagagagggccagaagccccccgagggcttcatggcccccaaggcctggaccgtgctgaccgagtactacaagagcctggagaaggcctag

SEQ ID NO: 156151 - protein, 299 aa, Artificial Sequence
  derived and/or modified sequence
MHSLATAAPVPTTLAQVDREKIYQWINELSSPETRENALLELSKKRESVPDLAPMLWHSFGTIAALLQEIVNIYPSINPPTLTAHQSNRVCNALALLQCVASHPETRSAFLAAHIPLFLYPFLHTVSKTRPFEYLRLTSLGVIGALVKTDEQEVINFLLTTEIIPLCLRIMESGSELSKTVATFILQKILLDDTGLAYICQTYERFSHVAMILGKMVLQLSKEPSARLLKHVVRCYLRLSDNPRAREALRQCLPDQLKDTTFAQVLKDDTTTKRWLAQLVKNLQEGQVTDPRGIPLPPQ

SEQ ID NO: 156152 - DNA, 900 bp, Artificial Sequence
  derived and/or modified sequence
atgcactctctggccaccgctgcccctgtccccaccacgctggctcaggttgaccgcgagaagatttatcagtggatcaatgagctgtcgagtcccgaaacccgggagaatgcattgctcgaattgtccaaaaaacgggaatccgtgccagatcttgctcccatgctgtggcattcgttcggcactatagccgcccttcttcaggaaatcgtgaacatttaccctagcattaatccccccaccctcaccgcccaccagtcgaaccgggtgtgcaacgccttggcattgctgcagtgtgtcgcctctcatccggagaccagatccgccttcctggccgcgcacatccctctgttcctgtatccattccttcacacagtaagcaagacaagaccttttgaatacctgcggttaacatctctgggcgttatcggggcactcgtgaaaactgatgagcaagaggttatcaactttctgctgaccactgaaatcattcccctgtgtcttcgtatcatggaatctggatccgagctcagcaagaccgtagccactttcatcctgcaaaaaattctgctggacgatactggcctcgcctacatatgtcaaacttacgagaggttttcccacgttgccatgattttaggcaagatggtgttgcagttaagcaaggagccaagcgctaggcttctgaagcacgtcgtgcggtgttatcttagattatcagacaaccccagagcccgagaagcactgcgtcagtgcttacccgaccaacttaaggatactacattcgcccaagtgctcaaagacgataccaccacgaaacggtggttagcacagctggtcaagaatcttcaggaaggccaggttaccgacccccggggcatcccgctccccccccagtag

SEQ ID NO: 156153 - DNA, 900 bp, Artificial Sequence
  derived and/or modified sequence
atgcactccctggctacggccgcccctgttccaaccaccctagcacaagtcgatagagaaaagatttaccagtggatcaacgagctgtcttcccccgagacacgggagaacgctcttttggagctgtcgaagaagcgcgagagtgtgcccgatctagccccaatgctgtggcactcgttcggtactattgcagcgctccttcaggaaatcgtgaatatctatccttccatcaatccacctaccctgacagcacaccagagtaacagagtgtgtaatgctctggcgctgctccagtgcgtcgccagccacccagaaactcggagcgcctttctggcagcacatattccacttttcctctatccttttttgcacacagtcagcaaaactcgaccttttgagtacctgagactgacctccctcggtgtaataggtgcgctcgtaaagacagacgaacaagaggtcataaacttcttactgaccactgagattatccctttgtgcctccgcatcatggaaagtggctctgaacttagtaagaccgtcgcaacttttatcttgcagaagattttactggatgatactggcctcgcgtacatttgtcaaacctacgaacggtttagccacgtggccatgattctcggtaaaatggtgctgcagctctctaaggaaccaagtgccaggctcctgaagcacgtggttcgctgctatcttaggctctccgataacccacgtgcacgcgaggcattgcgacaatgtctacccgatcagcttaaagatacaacatttgcccaggtgctgaaggacgatacaaccacaaagcgctggctcgcacagctcgtgaagaatctgcaggaaggtcaagttacagatcctcgggggatcccacttcctccacaatag

SEQ ID NO: 156154 - DNA, 900 bp, Artificial Sequence
  derived and/or modified sequence
atgcacagcctggccacagctgcccctgtgcccaccaccctggcccaggtggaccgggagaagatctaccagtggatcaatgagctgagcagccctgagacccgggagaatgccctgctggagctgagcaagaagcgggagagcgtgcctgacctggcccccatgctgtggcacagctttggcaccatcgccgccctgctgcaggagatcgtgaacatctaccccagcatcaacccccccaccctgacagcccaccagagcaacagagtgtgcaatgccctggccctgctgcagtgtgtggccagccaccctgagaccaggtctgccttcctggccgcccacatccccctcttcctgtaccccttcctgcacacagtgtccaagacccggccctttgagtacctgcggctgaccagcctgggcgtgattggagccctggtgaagacagatgagcaggaggtgatcaacttcctgctgaccacagagatcatccccctgtgcctgcgcatcatggagagcggcagcgagctgagcaagacagtggccaccttcatcctgcagaagatcctgctggatgacaccggcctggcctacatctgccagacctatgagcgcttcagccacgtggccatgatcctgggcaagatggtgctgcagctgagcaaggagcccagcgcccggctgctgaagcacgtggtgcgctgctacctgcggctgagtgacaacccccgggcccgggaggccctgcggcagtgcctgcctgaccagctgaaggacaccacctttgcccaggtgctgaaggatgacaccaccaccaagcgctggctggcccagctggtgaagaacctgcaggagggccaggtgacagacccccggggcatccccctgcccccccagtag

SEQ ID NO: 156155 - DNA, 900 bp, Artificial Sequence
  derived and/or modified sequence
atgcacagcctggccaccgccgcccccgtgcccaccaccctggcccaggtcgatcgcgagaagatttaccagtggataaacgagctctcatctcccgagacccgggagaatgccctgctcgaattgtctaagaaaagggagtcggtccccgatctcgctcctatgctgtggcactccttcggaactattgccgccctgctgcaggagatcgtgaatatctatccatcaatcaaccccccgaccctgaccgcacaccagtcaaaccgagtgtgcaatgccttggccttactacagtgcgtcgctagccatccagagacaaggagtgccttcctcgctgcgcatatccccctgtttctctacccatttcttcacactgtgtctaagacccgacctttcgagtacctcaggctgacgagtctcggtgttatcggagctcttgtcaagacagacgagcaggaggtgataaacttccttctgacaactgagattatccccctgtgcctgcggattatggaaagtgggagcgagctgtcgaagaccgtcgctacattcatactgcagaagatcctgcttgatgatactggtctcgcttatatctgccagacttatgaaaggttctcgcacgtcgctatgatcctgggaaagatggtcctgcaacttagtaaggagccctctgccagacttctgaaacatgttgtgcggtgttacctgaggctaagtgataaccctcgcgctcgggaggccctgcggcagtgtctccctgaccagttgaaagacacaacttttgctcaggttcttaaagacgacaccacaacaaaaaggtggcttgcgcagctggtgaagaatctccaggaagggcaagtgaccgacccacggggaatcccactgcctccacagtag

SEQ ID NO: 156156 - DNA, 900 bp, Artificial Sequence
  derived and/or modified sequence
atgcacagcctggccaccgccgcccccgtgcccaccaccctggcccaggtggaccgcgagaagatttaccagtggataaacgaacttagctctcccgagaccagagagaatgctctgctggaactgtccaaaaaaagagaatctgtccctgacctagcgcctatgctgtggcatagcttcggtacaatcgccgcactcctgcaagagatcgttaatatctacccctccataaatccacccaccctcaccgcgcaccaaagcaacagggtctgcaatgccctggcattactgcagtgcgttgccagtcatcccgaaactcgatcagccttcttggctgctcatatccccttattcctctacccctttctgcacacagttagtaagaccagaccctttgaatacctgcgcttgacttctctgggcgtgattggcgccttggtcaagaccgacgaacaggaagtgattaatttcctgttgacaacggaaattataccactttgtttgcggattatggagagcggctccgagctgtctaagaccgtcgcgactttcatcttacagaaaattttgctggacgacaccggcctcgcttacatttgccaaacctatgaacgttttagccatgttgccatgattctgggaaaaatggtgctgcagctgagtaaggaaccatccgcacgtttgctgaaacatgtcgtgagatgttatctgcggctgagtgacaacccccgggctagagaagcgctgaggcagtgtttgcctgatcaactgaaggatacaacctttgcacaggttctaaaggacgatacaacgaccaagcgttggctggcacaattggtcaaaaacttgcaggaaggacaggtgacggaccccaggggcattcctctcccgcctcaatag

SEQ ID NO: 156157 - DNA, 900 bp, Artificial Sequence
  derived and/or modified sequence
atgcactcgcttgccacagccgctccggtgcctactactctggcccaggtggaccgggaaaagatctaccagtggatcaacgagctctcctcccctgaaacacgcgaaaacgccctgctcgaattatccaagaagcgagaatctgtgcctgacttggcacccatgctgtggcacagcttcgggacgatcgccgcactactgcaggagattgtgaatatttacccttcaatcaatccacctaccctgaccgcacaccagagcaatagagtgtgtaatgctcttgcactgctgcagtgtgtggctagtcacccggagacccgtagcgctttcctggccgctcatatccctttgttcctgtaccctttcttgcacaccgtgtcaaagacccgaccattcgagtacctgcggcttacctctctcggcgtgattggagccctggttaagacagatgaacaggaggtcattaattttttactcacgaccgagatcatccctctttgcctaaggattatggagtcggggagtgagctgtcaaaaacggtggctacctttattttacagaaaatcctgctggatgatacgggactggcctacatatgtcagacatatgaacggttcagccatgtcgccatgatactcggcaaaatggtccttcaactgtctaaggaaccatctgcaagattactgaaacatgtggttaggtgttacttgagactgagcgacaacccacgagccagagaagcgctgcgccagtgtctccccgaccagctcaaggataccaccttcgcacaggtgctcaaagacgacactaccaccaagcgctggttggcgcagctggtgaaaaacttgcaagaagggcaagtaacggatcctcggggtattcctctccctcctcagtag

SEQ ID NO: 156158 - DNA, 900 bp, Artificial Sequence
  derived and/or modified sequence
atgcactccctggccaccgcagctccagtacctacaacactggcccaagtggatcgagaaaaaatctatcagtggattaacgagctgagttcccccgagaccagagaaaacgctttgctcgagctctcgaaaaaacgcgagtccgtccccgatctcgctccaatgttgtggcactcatttggcaccattgcggcactgctccaagagattgtcaacatctacccctctattaacccgcctacactgactgctcatcagtctaaccgggtgtgcaacgcccttgccctgctccagtgcgtcgctagtcacccagaaacgcggtctgcgttccttgccgctcacatcccccttttcctgtacccttttttgcacaccgtgagcaaaacccggccttttgaatacctgaggctcaccagcttgggggtgatcggggctttggtgaaaactgatgagcaggaggtcatcaacttcctgctcaccaccgagataatccctctctgtctgcggattatggaatccgggtcggaactctctaaaactgtcgcgacctttatcttacagaaaattcttctggatgataccggccttgcttacatatgtcagacatacgaacgtttctctcatgtggccatgattctcggcaagatggtgctacagctgagcaaagagccgtctgccaggctactgaagcatgtcgttcgatgttatttgcggcttagcgataaccctagagcaagggaggccttgcgccagtgtcttcctgatcagttgaaagataccactttcgcccaggtgctcaaggacgatacaaccactaaacgatggcttgctcaactcgtgaaaaacctccaggaaggccaggtcacagatcctagggggataccattacccccacagtag

SEQ ID NO: 156159 - DNA, 4079 bp, Artificial Sequence
  derived and/or modified sequence
agttgtcttgccgggactgtccatcttttcccgccgttcactggcttttggaggagggtcagagttcacgccgctctctggaaataactgctcaaagccagaagttgcggggactagtggtcgcggacgtccttccggtcctaaatcttaaggggcaaaggacatactctgggactgttaactaggccctggaggcgggaagaggatgtgtgggtggggtcaggggtgagaggtcagagggccgcgaagtgggcggagcgagccggagtcggatggcggctacggcggctcattgttttccgctgcaggggtgctgaaggggggacgcgggtcggacgcgtccggctgtggaagagagcggcggccgctcacaacatgcacagcctggcgacggctgcgcctgtgcctactacactggcacaagtggatagagaaaagatctatcagtggatcaatgagctgtccagtcctgagactagggaaaatgctttgctggagctaagtaagaagcgagaatctgttcctgaccttgcacccatgctgtggcattcatttggtactattgcagcacttttacaggaaattgtaaatatttatccatctatcaacccacccaccttgacagcacaccagtctaacagagtttgcaatgctctggcattactgcaatgtgtagcatcacatccagaaaccaggtcagcgtttctcgcagcacacatcccactttttttgtacccctttttgcacactgtcagcaaaacacgtccctttgagtatctccggctcaccagccttggagttattggggccctggtgaaaacagatgaacaagaagtaatcaactttttattaacaacagaaattatccctttatgtttgcgaattatggaatctggaagtgaactttctaaaacagttgccacattcatcctccagaagatcttgttagatgacactggtttggcttatatatgtcagacgtatgagcgtttctcccatgttgccatgatcttgggtaagatggtcctgcagctatccaaagagccttctgcccgtctgctgaagcatgtagtgagatgttaccttcgactttcagataaccccagggcacgtgaagcactcagacagtgcctccctgaccagctgaaagacacaaccttcgcccaggtgctaaaagatgacaccaccacgaaacgctggcttgcacaactggtgaagaacctgcaagagggccaggtcaccgatccccggggtatccccctgccccctcagtgatccttccctgttccctcccactactcccccaagttggggaaaggagggggaacctacgagaaaaacagctcaggttttatcaccgactgggaatagacaacctcaatgctgaaccgcactggagaaaaggggcaaggtacccctgctgaggtgtatgggctgccatctcaggctgtcttgaggacctgggctccctctgctactcccaggaaatgggctcctgacacagcagtctgccaccacagccccaggagggtgtcaacaccagcaaatgctgtatttgcagcatgtccaagatgacccttctcccctacctctacctagccactggcagggaggggagacagtggtgatagcagcagcactctaggcatggtgaacgcctgggaccaagccatgtggcgttttttattttgcctttctggaagactcaagatatgtctcttcattctctctcagtatttgtttactttggtttttttgtttttaatctcagagagaggtgtgtttagtgggcacaagctgtaatattcagcaaaactttgtcgactggcactgtttacaagtctgttagctgcataagctcaataaaaagttggtctgggcattacatcccctctggcaggccaatagctgcatcaagctgttgggagaaatgggagggcaggggaaagatgtaaagccaaagtacagcaggaacccaccacctgtttcccttccttctcccattctactcccagtccggaatgccacgaggaccttaaccttgtttctggctttagctgctagttttcccaaatctcagtgctttccctttttgaacttcccttctattaaacttaaaacagatgtcttaattaatcaggctgtcttggaagggtattgtattgggagacaaggggcggtggtggacctcaccttcaatccaagttttcaaagatattttctcaataactctaaaagggaggtgcttgggattaaggtgacagtccacttgatccttttctttgttttagtgtgaatttcagcagctccatctgtcttcatgattgtacttgagcagtattagctgtatgagttaattttattcagattgaagatggagggctgggttctgctcactcagtcttttttttttttttttttttttttttttgaccattctcttttagtctatgggaattacagggttgccgctaaaatattcacttgttcatatcgtgtcagagatttcctcttctctggagcttaggtggctcttcacaatccataggcttgaatctgcaacctagtgtaaactgccttgctttccccggttctttcccctgctagcacctgctttctcatccctatctccagtcaaagatgggattgcttaatccaactctggagagggaccaagtcttttctgcccacatctcacacaattgaggtgtctgaacaagcttggggagggtctataaggggtaggctcaaaaaaaaaaaaacccatttgcagaggcagttttgccaacacaagggctctttcaagccgactttcacaaagagagccggacttgttagttggcttctgtctctttagagccaagaaaatagtaattaagtggcctagatataggaagggcagaataagcacttactccccctgccttccaagatgaagaggagaagcaggccaaccctcaataattgcaagcctgaagagaagtgatcttagagaaagcagagaacagaatggactggatagacatcttgactctattcagcccgtagtctgtgatctggagagtccagttaaggtaacccagatttttgacaaccgccttcctgctgagccaaagttttctcattacccctccactggggaagcagctgaggcccagggccttgctccctgggaaattctcttctctccatctttcggtgcattggccatgttactgtgccaaagtgtcttaattcttgtcccatctattctcagctggccttggaacccacataggagttggtgggggagggatggaatgggtattattcattgtagttgatcctggtgtgtgtattatataaagagacccctccccttattttgtgttttccatccctctcccttaacaggattgaaataaaacatgcttctgtttttgtaaaaataatttttcctttacactggagattttattctatcagtatatgggtaactaggcactttggtcaggtgatccttgtcatgcctgcttctcccctctgtctacctacacaacacacacacacacacacacacagccctgctaagatggcagtagtggttcttttgtgaacatgttttttggggagactccatctgaggtacaaaagctgtttgggaggctgggagggggatgatgccccttacctgataaaagtatgttttactgggacagaacttcactcctggccatattggccagaacttagtgccagtgtagggagagacttccatagtgacaaggtaatgcttgaaacatcttacgaactttgatgttcatttcctcaagttcaaggcttggagcacatctccaggattgtttccatgcctggctgtcagtgggacacagctgccctatgcttccacgttcttttttcaagagccttagagggcctgtggcctgtttcactggtggaacaggagcagcattggtagccttcagagcatgccttgcttactaactacatattattcctctgctcattgttcctgctgcttaaaggctaggaaaagggggatatacaaagttgttgctttcaaaaactcagagaaaaaa

SEQ ID NO: 156160 - DNA, 3259 bp, Artificial Sequence
  derived and/or modified sequence
gtccttccggtcctaaatcttaaggggcaaaggacatactctgggactgttaactaggccctggaggcgggaagaggatgtgtgggtggggtcaggggtgagaggtcagagggccgcgaagtgggcggagcgagccggagtcggatggcggctacggcggctcattgttttccgctgcaggggtgctgaaggggggacgcgggtcggacgcgtccggctgtggaagagagcggcggccgctcacaacatgcacagcctggcgacggctgcgcctgtgcctactacactggcacaagtggatagagaaaagatctatcagtggatcaatgagctgtccagtcctgagactagggaaaatgctttgctggagctaagtaagaagcgagaatctgttcctgaccttgcacccatgctgtggcattcatttggtactattgcagcacttttacaggaaattgtaaatatttatccatctatcaacccacccaccttgacagcacaccagtctaacagagtttgcaatgctctggcattactgcaatgtgtagcatcacatccagaaaccaggtcagcgtttctcgcagcacacatcccactttttttgtacccctttttgcacactgtcagcaaaacacgtccctttgagtatctccggctcaccagccttggagttattggggccctggtgaaaacagatgaacaagaagtaatcaactttttattaacaacagaaattatccctttatgtttgcgaattatggaatctggaagtgaactttctaaaacagttgccacattcatcctccagaagatcttgttagatgacactggtttggcttatatatgtcagacgtatgagcgtttctcccatgttgccatgatcttgggtaagatggtcctgcagctatccaaagagccttctgcccgtctgctgaagcatgtagtgagatgttaccttcgactttcagataaccccagggcacgtgaagcactcagacagtgcctccctgaccagctgaaagacacaaccttcgcccaggtgctaaaagatgacaccaccacgaaacgctggcttgcacaactggtgaagaacctgcaagagggccaggtcaccgatccccggggtatccccctgccccctcagtgatccttccctgttccctcccactactcccccaagttggggaaaggagggggaacctacgagaaaaacagctcaggttttatcaccgactgggaatagacaacctcaatgctgaaccgcactggagaaaaggggcaaggtacccctgctgaggtgtatgggctgccatctcaggctgtcttgaggacctgggctccctctgctactcccaggaaatgggctcctgacacagcagtctgccaccacagccccaggagggtgtcaacaccagcaaatgctgtatttgcagcatgtccaagatgacccttctcccctacctctacctagccactggcagggaggggagacagtggtgatagcagcagcactctaggcatggtgaacgcctgggaccaagccatgtggcgttttttattttgcctttctggaagactcaagatatgtctcttcattctctctcagtatttgtttactttggtttttttgtttttaatctcagagagaggtgtgtttagtgggcacaagctgtaatattcagcaaaactttgtcgactggcactgtttacaagtctgttagctgcataagctcaataaaaagttggtctgggcattacatcccctctggcaggccaatagctgcatcaagctgttgggagaaatgggagggcaggggaaagatgtaaagccaaagtacagcaggaacccaccacctgtttcccttccttctcccattctactcccagtccggaatgccacgaggaccttaaccttgtttctggctttagctgctagttttcccaaatctcagtgctttccctttttgaacttcccttctattaaacttaaaacagatgtcttaattaatcaggctgtcttggaagggtattgtattgggagacaaggggcggtggtggacctcaccttcaatccaagttttcaaagatattttctcaataactctaaaagggaggtgcttgggattaaggtgacagtccacttgatccttttctttgttttagtgtgaatttcagcagctccatctgtcttcatgattgtacttgagcagtattagctgtatgagttaattttattcagattgaagatggagggctgggttctgctcactcagtcttttttttttttttttttttttttttttgaccattctcttttagtctatgggaattacagggttgccgctaaaatattcacttgttcatatcgtgtcagagatttcctcttctctggagcttaggtggctcttcacaatccataggcttgaatctgcaacctagtgtaaactgccttgctttccccggttctttcccctgctagcacctgctttctcatccctatctccagtcaaagatgggattgcttaatccaactctggagagggaccaagtcttttctgcccacatctcacacaattgaggtgtctgaacaagcttggggagggtctataaggggtaggctcaaaaaaaaaaaaacccatttgcagaggcagttttgccaacacaagggctctttcaagccgactttcacaaagagagccggacttgttagttggcttctgtctctttagagccaagaaaatagtaattaagtggcctagatataggaagggcagaataagcacttactccccctgccttccaagatgaagaggagaagcaggccaaccctcaataattgcaagcctgaagagaagtgatcttagagaaagcagagaacagaatggactggatagacatcttgactctattcagcccgtagtctgtgatctggagagtccagttaaggtaacccagatttttgacaaccgccttcctgctgagccaaagttttctcattacccctccactggggaagcagctgaggcccagggccttgctccctgggaaattctcttctctccatctttcggtgcattggccatgttactgtgccaaagtgtcttaattcttgtcccatctattctcagctggccttggaacccacataggagttggtgggggagggatgtgtattatataaagagacccctccccttattttgtgttttccatccctctcccttaacaggattgaaataaaacatgcttctgtttttgt

SEQ ID NO: 156161 - DNA, 900 bp, Artificial Sequence
  derived and/or modified sequence
atgcacagcctggccaccgccgcccccgtgcccaccaccctggcccaggtggacagagagaagatctaccagtggatcaacgagctgagcagccccgagaccagagagaacgccctgctggagctgagcaagaagagagagagcgtgcccgacctggcccccatgctgtggcacagcttcggcaccatcgccgccctgctgcaggagatcgtgaacatctaccccagcatcaacccccccaccctgaccgcccaccagagcaacagagtgtgcaacgccctggccctgctgcagtgcgtggccagccaccccgagaccagaagcgccttcctggccgcccacatccccctgttcctgtaccccttcctgcacaccgtgagcaagaccagacccttcgagtacctgagactgaccagcctgggcgtgatcggcgccctggtgaagaccgacgagcaggaggtgatcaacttcctgctgaccaccgagatcatccccctgtgcctgagaatcatggagagcggcagcgagctgagcaagaccgtggccaccttcatcctgcagaagatcctgctggacgacaccggcctggcctacatctgccagacctacgagagattcagccacgtggccatgatcctgggcaagatggtgctgcagctgagcaaggagcccagcgccagactgctgaagcacgtggtgagatgctacctgagactgagcgacaaccccagagccagagaggccctgagacagtgcctgcccgaccagctgaaggacaccaccttcgcccaggtgctgaaggacgacaccaccaccaagagatggctggcccagctggtgaagaacctgcaggagggccaggtgaccgaccccagaggcatccccctgcccccccagtag

SEQ ID NO: 156162 - protein, 1217 aa, Artificial Sequence
  derived and/or modified sequence
MYIKQVIIQGFRSYRDQTIVDPFSSKHNVIVGRNGSGKSNFFYAIQFVLSDEFSHLRPEQRLALLHEGTGPRVISAFVEIIFDNSDNRLPIDKEEVSLRRVIGAKKDQYFLDKKMVTKNDVMNLLESAGFSRSNPYYIVKQGKINQMATAPDSQRLKLLREVAGTRVYDERKEESISLMKETEGKREKINELLKYIEERLHTLEEEKEELAQYQKWDKMRRALEYTIYNQELNETRAKLDELSAKRETSGEKSRQLRDAQQDARDKMEDIERQVRELKTKISAMKEEKEQLSAERQEQIKQRTKLELKAKDLQDELAGNSEQRKRLLKERQKLLEKIEEKQKELAETEPKFNSVKEKEERGIARLAQATQERTDLYAKQGRGSQFTSKEERDKWIKKELKSLDQAINDKKRQIAAIHKDLEDTEANKEKNLEQYNKLDQDLNEVKARVEELDRKYYEVKNKKDELQSERNYLWREENAEQQALAAKREDLEKKQQLLRAATGKAILNGIDSINKVLDHFRRKGINQHVQNGYHGIVMNNFECEPAFYTCVEVTAGNRLFYHIVDSDEVSTKILMEFNKMNLPGEVTFLPLNKLDVRDTAYPETNDAIPMISKLRYNPRFDKAFKHVFGKTLICRSMEVSTQLARAFTMDCITLEGDQVSHRGALTGGYYDTRKSRLELQKDVRKAEEELGELEAKLNENLRRNIERINNEIDQLMNQMQQIETQQRKFKASRDSILSEMKMLKEKRQQSEKTFMPKQRSLQSLEASLHAMESTRESLKAELGTDLLSQLSLEDQKRVDALNDEIRQLQQENRQLLNERIKLEGIITRVETYLNENLRKRLDQVEQELNELRETEGGTVLTATTSELEAINKRVKDTMARSEDLDNSIDKTEAGIKELQKSMERWKNMEKEHMDAINHDTKELEKMTNRQGMLLKKKEECMKKIRELGSLPQEAFEKYQTLSLKQLFRKLEQCNTELKKYSHVNKKALDQFVNFSEQKEKLIKRQEELDRGYKSIMELMNVLELRKYEAIQLTFKQVSKNFSEVFQKLVPGGKATLVMKKGDVEGSQSQDEGEGSGESERGSGSQSSVPSVDQFTGVGIRVSFTGKQGEMREMQQLSGGQKSLVALALIFAIQKCDPAPFYLFDEIDQALDAQHRKAVSDMIMELAVHAQFITTTFRPELLESADKFYGVKFRNKVSHIDVITAEMAKDFVEDDTTHG

SEQ ID NO: 156163 - DNA, 3654 bp, Artificial Sequence
  derived and/or modified sequence
atgtacatcaagcaggtgatcatccagggcttcagaagctacagagaccagaccatcgtggaccccttcagcagcaagcacaacgtgatcgtgggcagaaacggcagcggcaagagcaacttcttctacgccatccagttcgtgctgagcgacgagttcagccacctgagacccgagcagagactggccctgctgcacgagggcaccggccccagagtgatcagcgccttcgtggagatcatcttcgacaacagcgacaacagactgcccatcgacaaggaggaggtgagcctgagaagagtgatcggcgccaagaaggaccagtacttcctggacaagaagatggtgaccaagaacgacgtgatgaacctgctggagagcgccggcttcagcagaagcaacccctactacatcgtgaagcagggcaagatcaaccagatggccaccgcccccgacagccagagactgaagctgctgagagaggtggccggcaccagagtgtacgacgagagaaaggaggagagcatcagcctgatgaaggagaccgagggcaagagagagaagatcaacgagctgctgaagtacatcgaggagagactgcacaccctggaggaggagaaggaggagctggcccagtaccagaagtgggacaagatgagaagagccctggagtacaccatctacaaccaggagctgaacgagaccagagccaagctggacgagctgagcgccaagagagagaccagcggcgagaagagcagacagctgagagacgcccagcaggacgccagagacaagatggaggacatcgagagacaggtgagagagctgaagaccaagatcagcgccatgaaggaggagaaggagcagctgagcgccgagagacaggagcagatcaagcagagaaccaagctggagctgaaggccaaggacctgcaggacgagctggccggcaacagcgagcagagaaagagactgctgaaggagagacagaagctgctggagaagatcgaggagaagcagaaggagctggccgagaccgagcccaagttcaacagcgtgaaggagaaggaggagagaggcatcgccagactggcccaggccacccaggagagaaccgacctgtacgccaagcagggcagaggcagccagttcaccagcaaggaggagagagacaagtggatcaagaaggagctgaagagcctggaccaggccatcaacgacaagaagagacagatcgccgccatccacaaggacctggaggacaccgaggccaacaaggagaagaacctggagcagtacaacaagctggaccaggacctgaacgaggtgaaggccagagtggaggagctggacagaaagtactacgaggtgaagaacaagaaggacgagctgcagagcgagagaaactacctgtggagagaggagaacgccgagcagcaggccctggccgccaagagagaggacctggagaagaagcagcagctgctgagagccgccaccggcaaggccatcctgaacggcatcgacagcatcaacaaggtgctggaccacttcagaagaaagggcatcaaccagcacgtgcagaacggctaccacggcatcgtgatgaacaacttcgagtgcgagcccgccttctacacctgcgtggaggtgaccgccggcaacagactgttctaccacatcgtggacagcgacgaggtgagcaccaagatcctgatggagttcaacaagatgaacctgcccggcgaggtgaccttcctgcccctgaacaagctggacgtgagagacaccgcctaccccgagaccaacgacgccatccccatgatcagcaagctgagatacaaccccagattcgacaaggccttcaagcacgtgttcggcaagaccctgatctgcagaagcatggaggtgagcacccagctggccagagccttcaccatggactgcatcaccctggagggcgaccaggtgagccacagaggcgccctgaccggcggctactacgacaccagaaagagcagactggagctgcagaaggacgtgagaaaggccgaggaggagctgggcgagctggaggccaagctgaacgagaacctgagaagaaacatcgagagaatcaacaacgagatcgaccagctgatgaaccagatgcagcagatcgagacccagcagagaaagttcaaggccagcagagacagcatcctgagcgagatgaagatgctgaaggagaagagacagcagagcgagaagaccttcatgcccaagcagagaagcctgcagagcctggaggccagcctgcacgccatggagagcaccagagagagcctgaaggccgagctgggcaccgacctgctgagccagctgagcctggaggaccagaagagagtggacgccctgaacgacgagatcagacagctgcagcaggagaacagacagctgctgaacgagagaatcaagctggagggcatcatcaccagagtggagacctacctgaacgagaacctgagaaagagactggaccaggtggagcaggagctgaacgagctgagagagaccgagggcggcaccgtgctgaccgccaccaccagcgagctggaggccatcaacaagagagtgaaggacaccatggccagaagcgaggacctggacaacagcatcgacaagaccgaggccggcatcaaggagctgcagaagagcatggagagatggaagaacatggagaaggagcacatggacgccatcaaccacgacaccaaggagctggagaagatgaccaacagacagggcatgctgctgaagaagaaggaggagtgcatgaagaagatcagagagctgggcagcctgccccaggaggccttcgagaagtaccagaccctgagcctgaagcagctgttcagaaagctggagcagtgcaacaccgagctgaagaagtacagccacgtgaacaagaaggccctggaccagttcgtgaacttcagcgagcagaaggagaagctgatcaagagacaggaggagctggacagaggctacaagagcatcatggagctgatgaacgtgctggagctgagaaagtacgaggccatccagctgaccttcaagcaggtgagcaagaacttcagcgaggtgttccagaagctggtgcccggcggcaaggccaccctggtgatgaagaagggcgacgtggagggcagccagagccaggacgagggcgagggcagcggcgagagcgagagaggcagcggcagccagagcagcgtgcccagcgtggaccagttcaccggcgtgggcatcagagtgagcttcaccggcaagcagggcgagatgagagagatgcagcagctgagcggcggccagaagagcctggtggccctggccctgatcttcgccatccagaagtgcgaccccgcccccttctacctgttcgacgagatcgaccaggccctggacgcccagcacagaaaggccgtgagcgacatgatcatggagctggccgtgcacgcccagttcatcaccaccaccttcagacccgagctgctggagagcgccgacaagttctacggcgtgaagttcagaaacaaggtgagccacatcgacgtgatcaccgccgagatggccaaggacttcgtggaggacgacaccacccacggctag

SEQ ID NO: 156164 - DNA, 3654 bp, Artificial Sequence
  derived and/or modified sequence
atgtatatcaagcaagtgatcattcagggcttccgcagctaccgcgaccagacaattgtggaccccttcagcagcaagcacaacgtgatcgtgggaaggaatgggagcggcaaatctaacttcttctacgcaatccagtttgtactcagcgatgaatttagccaccttcggccggaacagagactggccttgttgcatgaagggactggcccacgtgttatttcagctttcgtggagatcatctttgataattctgataatcgtctgcccatagacaaagaggaggtcagtctgcggagagttatcggtgccaagaaagatcagtatttcctggataaaaaaatggtgacaaagaacgacgttatgaatcttctggaaagtgccggtttttcccgcagtaatccttactatatcgtgaaacaaggcaagattaatcaaatggcgaccgctccggattcccagagactcaaactgctgagagaagtggcaggcactcgcgtatacgacgagcgcaaggaggaatctatatcacttatgaaagaaaccgaagggaagagggagaaaattaacgaattattaaagtatatagaggagcgactccacacactcgaggaagagaaagaagagttggcacagtaccaaaagtgggacaaaatgcgtcgcgccttggaatatactatctataatcaggaactcaacgagacccgcgccaagctcgacgagctgtcagcaaaacgtgagacatccggagaaaagtcccgtcaactgcgcgatgcgcagcaggatgctcgcgataagatggaggatattgagcgacaggtgagggaattgaagaccaagatctccgccatgaaagaagaaaaggaacagctgagtgcagagcggcaagagcagatcaaacagcgtactaaactggagctgaaagccaaggacctgcaagatgagctggctggcaattcagagcagcgtaagcgcctgctgaaagagcgccagaagcttctggagaaaatcgaggagaagcagaaggaactcgccgaaacagaacctaagtttaacagcgttaaagaaaaagaagagcgcggaatcgctcggctggctcaggcaacgcaagagcgcactgatctttatgctaaacaaggtagaggctctcaattcacatctaaggaagagagagataagtggattaaaaaagaattgaagtctttggatcaagccatcaacgacaaaaagagacagatcgcggcgattcataaggacctggaagatacagaggcgaacaaggagaaaaatctggagcagtataataagttagatcaggaccttaacgaagtgaaggcacgcgtcgaagaactggaccgcaagtactacgaagttaaaaataaaaaagatgaacttcagtccgagaggaattacctttggcgagaggaaaatgctgaacaacaggcattggcagcaaagagggaggatctggagaaaaaacagcagttgcttcgggccgcaactggcaaggccatcctgaacgggattgacagcatcaacaaggtgcttgatcacttccggaggaagggcatcaatcagcacgtccagaacggatatcacggaatcgtgatgaacaacttcgagtgcgaacccgccttctacacgtgcgttgaggtgactgctggtaaccggcttttctatcacattgttgattccgacgaggtcagcaccaagatactaatggagttcaacaagatgaacctcccaggcgaggtcacattcttacctctgaacaaactagacgttcgcgataccgcttatcccgaaacaaacgacgcaatcccgatgatcagcaaattaagatataatccgaggtttgataaggcattcaagcacgtttttggtaaaaccttgatctgccggagcatggaggtcagcacccagctggcaagagccttcactatggattgtattactctcgagggggatcaagtatcccacaggggcgcacttaccggcggctattatgacacaaggaagtccagacttgagcttcaaaaagacgtgagaaaggcagaggaggagctgggggagctggaagcgaaacttaatgaaaacttgaggcgcaatatcgagaggattaataacgagattgaccagctgatgaatcagatgcaacagatcgaaacccagcaacgcaagtttaaagcttcaagggacagcatcctcagcgaaatgaaaatgctgaaggagaagcggcaacagtcagagaagacattcatgccgaagcagcgatcactccagagtctggaagcatctttgcacgctatggaatccacacgggaatcactcaaggccgagctcggaacagatctgttatcccagttatccctggaggatcagaagagagtcgacgctctaaacgacgagatcagacagctgcagcaggaaaatcggcaactattgaacgaacgcattaagctggaaggtattatcacaagggtagagacttacctgaatgaaaatctgagaaaacgccttgatcaagtggaacaggagctgaacgagctgcgcgaaaccgaaggaggcactgtactgacggccacaacttccgaactggaggcgattaacaaacgggtaaaagacactatggctaggtcagaggacttagataacagcattgacaagaccgaagccggaattaaggaacttcagaagtccatggagaggtggaaaaatatggagaaagagcacatggacgctattaaccatgataccaaggagctggagaagatgacaaatcggcaaggtatgctcctgaaaaagaaggaggaatgcatgaaaaaaatcagggaactggggtccctgccccaggaggcttttgagaagtatcaaaccctgagcttgaagcaactgttccgcaaactcgaacagtgtaataccgagctcaaaaaatactctcatgtcaacaagaaagctctcgaccagttcgtgaactttagcgaacagaaggaaaagttaattaaaagacaggaagagctcgacagagggtataagtcaatcatggagttgatgaatgtgcttgagctcagaaagtatgaggctatacaactaacatttaagcaggtgtctaaaaatttttccgaggtgtttcaaaagctcgtgcccggagggaaagcgacactggtgatgaaaaagggcgatgtggaaggatcacaaagccaggatgagggcgaggggtctggggagagcgaacgcggctcgggcagtcagagttcggtgccttccgttgatcagtttaccggggtaggcatcagggtgtcctttacggggaaacagggtgaaatgcgcgagatgcagcaactgagcggcggccagaagtcactggtggctctcgctctgatctttgctatccagaaatgcgaccctgctccattctacctgtttgatgagattgatcaggccttggatgctcagcatcggaaagctgtgtccgacatgatcatggaactggccgtccacgcccagttcatcaccacaacgttccggcccgagctgctggagtcagctgacaagttctatggagtgaagttcagaaataaggtgagccacatcgatgtgattaccgccgaaatggcaaaagacttcgtagaggatgacaccactcacggttag

SEQ ID NO: 156165 - DNA, 3654 bp, Artificial Sequence
  derived and/or modified sequence
atgtacatcaagcaggtgatcatccagggcttccgcagctacagagaccagaccatcgtggaccccttcagcagcaagcacaacgtcatcgtgggcagaaatggcagcggcaagagcaacttcttctacgccatccagtttgtgctgagtgatgagttcagccacctgcggcctgagcagaggctggccctgctgcacgagggcaccggccccagggtcatcagcgcctttgtggagatcatctttgacaacagcgacaaccggctgcccatcgacaaggaggaggtgtccctgcggcgggtcatcggggccaagaaggaccagtacttcctggacaagaagatggtgaccaagaatgatgtgatgaacctgctggagagcgctggcttcagccgcagcaacccctactacatcgtgaagcagggcaagatcaaccagatggccacagccccagacagccagaggctgaagctgctgcgggaggtggccggcaccagggtgtatgatgagaggaaggaggagagcatcagcctgatgaaggagacagagggcaagcgggagaagatcaatgagctgctgaagtacatcgaggagcggctgcacaccctggaggaggagaaggaggagctggcccagtaccagaagtgggacaagatgaggcgggccctggagtacaccatctacaaccaggagctgaatgagacccgggccaagctggatgagctgagcgccaagcgggagaccagcggggagaagagccggcagctgagagatgcccagcaggatgcccgggacaagatggaggacatcgagcggcaggtgcgggagctgaagaccaagatcagcgccatgaaggaggagaaggagcagctgtctgctgagcggcaggagcagatcaagcagaggaccaagctggagctgaaggccaaggacctgcaggatgagctggccggcaacagcgagcagaggaagaggctgctgaaggagcggcagaagctgctggagaagattgaggagaagcagaaggagctggccgagacagagcccaagttcaacagcgtgaaggagaaggaggagcggggcatcgcccggctggcccaggccacccaggagaggacagacctgtatgccaagcagggccggggcagccagttcaccagcaaggaggagcgggacaagtggatcaagaaggagctgaagagcctggaccaggccatcaatgacaagaagaggcagattgctgccatccacaaggacctggaggacacagaggccaacaaggagaagaacctggagcagtacaacaagctggaccaggacctgaatgaggtgaaggcccgggtggaggagctggacaggaagtactatgaggtgaagaacaagaaggatgagctgcagagcgagaggaactacctgtggagggaggagaatgctgagcagcaggccctggccgccaagcgggaggacctggagaagaagcagcagctgctgcgggccgccaccgggaaggccatcctgaatggaattgacagcatcaacaaggtgctggaccacttccggaggaagggcatcaaccagcacgtgcagaatggctaccatggaattgtgatgaacaactttgaatgtgagcccgccttctacacctgtgtggaggtgacagctggcaacagactcttctaccacatcgtggacagtgatgaggtgtccaccaagatcctgatggagttcaacaagatgaacctgcccggggaggtgaccttcctgcccctgaacaagctggatgtgcgggacacagcctacccagagaccaatgatgccatccccatgatcagcaagctgcgctacaaccccaggtttgacaaggccttcaagcacgtgtttgggaagaccctcatctgccgctccatggaggtgtccacccagctggcccgggccttcaccatggactgcatcaccctggagggggaccaggtgagccacagaggagccctgactggaggctactatgacaccaggaagagccggctggagctgcagaaggatgtgaggaaggccgaggaggagctgggggagctggaggccaagctgaatgaaaacctgcggaggaacatcgagcgcatcaacaatgaaattgaccagctgatgaaccagatgcagcagatcgagacccagcagaggaagttcaaggccagccgggacagcatcctgtctgagatgaagatgctgaaggagaagaggcagcagagcgagaagaccttcatgcccaagcagaggagcctgcagagcctggaggccagcctgcacgccatggagagcacccgggagagcctgaaggccgagctgggcacagacctgctgagccagctgagcctggaggaccagaagagggtggatgccctgaatgatgagatccggcagctgcagcaggagaaccggcagctgctgaatgaaagaatcaagctggagggcatcatcaccagggtggagacctacctgaatgaaaacctgaggaagaggctggaccaggtggagcaggagctgaatgagctgcgggagacagaaggaggcaccgtgctgacagccaccaccagcgagctggaggccatcaacaagagggtgaaggacaccatggcccggtctgaggacctggacaacagcattgacaagacagaggccggcatcaaggagctgcagaagtccatggagcgctggaagaacatggagaaggagcacatggatgccatcaaccacgacaccaaggagctggagaagatgaccaaccggcagggcatgctgctgaagaagaaggaggagtgcatgaagaagatccgggagctgggcagcctgccccaggaggcctttgagaagtaccagaccctgagcctgaagcagctgttcaggaagctggagcagtgcaacacagagctgaagaagtacagccacgtgaacaagaaggccctggaccagtttgtgaacttcagcgagcagaaggagaagctgatcaagaggcaggaggagctggaccggggctacaagagcatcatggagctgatgaatgtgctggagctgaggaaatatgaggccatccagctgaccttcaagcaggtgtccaagaacttcagcgaggtgttccagaagctggtgcctgggggcaaggccaccctggtgatgaagaagggagatgtggagggcagccagagccaggatgaaggagagggcagcggggagagcgagcggggcagcggcagccagagctctgtgcccagcgtggaccagttcaccggggtgggcatccgggtgtccttcaccgggaagcagggcgagatgagggagatgcagcagctgagcggcggccagaagagcctggtggccctggccctgatctttgccatccagaagtgtgaccctgcccccttctacctgtttgatgaaattgaccaggccctggatgcccagcacaggaaggctgtgtctgacatgatcatggagctggccgtgcacgcccagttcatcaccaccaccttccggcctgagctgctggagagcgctgacaagttctatggagtgaagttcaggaacaaggtgagccacattgatgtgatcacagctgagatggccaaggactttgtggaggatgacaccacccacggctag

SEQ ID NO: 156166 - DNA, 3654 bp, Artificial Sequence
  derived and/or modified sequence
atgtacatcaagcaggtgatcatccagggcttccggagctaccgggaccaaacgatcgtggacccattttcttcaaagcataatgttattgtgggacgcaacggcagcggtaagtccaacttcttttatgcaatccaatttgtcctctccgacgaatttagtcaccttagacccgaacaacgcctggcgctgctccatgaaggcactgggccacgggtcatatcggcttttgttgagatcattttcgataatagcgataatcgcctgcctatcgataaagaagaagtcagcctcaggcgggttatcggagccaaaaaggaccagtatttcctggataagaaaatggttacaaaaaacgatgtcatgaatttgctcgagagcgcaggattttctcggtcgaatccgtattatattgtgaaacaggggaagataaaccagatggccacagctcctgatagtcaaagactgaaactcctgagggaagtggctggaacacgagtgtacgatgaaaggaaagaggagagtatctctctcatgaaggagacagaaggcaaaagggaaaagatcaacgagctgctgaaatatatagaggaaagattacacactctggaggaggaaaaggaagagcttgctcagtatcagaagtgggataaaatgcgtcgtgctcttgaatataccatctacaatcaagagctcaatgaaacacgggcgaaactcgacgagctgtctgctaaacgagaaacaagtggcgaaaagtctcgacaactgcgcgatgcccagcaagatgctcgggataagatggaagatattgaaaggcaagtccgagagctaaagacaaaaatctccgcaatgaaggaagagaaggagcagttaagtgcagaacgacaagagcaaattaagcagcgtacaaaattggagttgaaagcgaaagacttacaagacgagcttgccggaaattccgagcagaggaagagactgctgaaggagaggcagaaattgcttgagaaaattgaggagaaacagaaggagctggccgagaccgaaccaaaattcaattctgtcaaggaaaaagaagagaggggaatcgcacgacttgctcaggctacccaggagaggactgatctatacgcaaaacaaggacggggttcacaattcaccagcaaggaagaaagagacaaatggatcaaaaaagagctcaagtcactggatcaggccattaacgataagaaacgtcaaatcgccgccatacataaagatctggaggataccgaggccaacaaggagaaaaatcttgagcaatataataagctcgatcaggacctgaatgaggtgaaagcccgcgtcgaagagttggaccgaaagtactacgaggtcaagaacaaaaaggatgagctgcagtctgaaaggaactatctctggagagaggaaaacgccgaacagcaggctttagccgccaagcgcgaagatcttgaaaagaagcagcagttgctgcgggctgcaacaggcaaggctattctgaacgggatcgacagtataaataaggtgctggaccacttccggcggaagggaatcaaccagcatgtgcagaacggatatcacggaatcgtgatgaacaatttcgaatgtgaaccagcattttacacctgcgtcgaagtcacagcaggcaaccgattattctatcacatcgtggacagtgacgaagtatcaacaaagattctcatggagtttaataagatgaatttgccgggcgaggtcaccttccttcctcttaacaagctcgacgtgcgggacactgcatatcccgaaacaaatgacgccatccctatgatcagcaagctacgatataacccccgattcgataaggcttttaaacacgtattcggtaagacgctcatatgtaggtccatggaagtcagtacgcagctagcccgggcctttacaatggactgcatcactttggaaggcgatcaggtgtcccataggggagctttaactggtggatattacgacactaggaagtcacgtttggaactgcaaaaggatgttcgcaaagccgaggaggaactcggggagctggaggccaaattaaacgaaaatctgaggaggaatatagaacgaataaataatgagatcgaccaactcatgaatcaaatgcagcagatagaaacacagcagagaaaatttaaagcatctagggattctattctatccgagatgaaaatgctaaaagaaaagcggcaacagagcgagaagaccttcatgcccaagcagcggtccctccagtcgcttgaagccagcctgcacgcaatggagtcaacaagggagagtctaaaagcggaacttgggacggatctcttgtcacaactgtctctggaggaccagaagagggtggatgctcttaatgatgagattcgtcagcttcagcaggagaaccgacagcttcttaacgagaggatcaagcttgaggggatcatcacaagagtggaaacctacctcaacgagaacttgaggaaaagattagatcaggtcgagcaggaactcaacgagctgcgcgaaacagagggggggactgttctcacagccaccaccagtgaattagaagcaatcaacaaacgcgtaaaggatactatggcaaggagcgaggatttggacaactctatagataagaccgaggctggcattaaagagcttcaaaaaagcatggaaagatggaagaacatggaaaaggaacacatggacgcgatcaatcatgacactaaagaactggaaaagatgaccaacagacaaggcatgctgttaaagaagaaggaggagtgtatgaagaagatcagagagcttggctccctgccccaggaggccttcgaaaaataccagacactgtcccttaaacagcttttccgcaaactggaacagtgtaataccgaactcaagaagtacagccatgtaaataagaaggcactggaccagttcgtcaatttctcagaacaaaaggaaaaactcattaagagacaagaggagctggatcgaggttacaaaagcatcatggagttaatgaatgtgctcgagctgagaaagtacgaagccatccagttgactttcaaacaagtgtccaagaactttagtgaagtcttccagaagcttgtccctggagggaaagccaccctcgttatgaaaaagggcgacgtcgaaggcagtcaatcgcaagatgaaggcgaagggagtggggagtcagagagagggagcggctcacagagttcagtgcccagtgttgaccagttcaccggggtggggattcgcgtgtccttcacagggaaacaaggcgagatgagggaaatgcagcagctcagtggtggccaaaagagtcttgtcgcactcgctctgattttcgctattcagaaatgtgatccagccccattctatttgttcgacgaaattgatcaggctctggatgcccagcacaggaaagccgtgtctgacatgattatggaacttgctgttcatgcacagttcatcaccacgacctttcgccctgaactgctcgagtctgccgataagttttacggtgtgaaattcaggaacaaagtaagccacatcgacgtgattacagcagagatggccaaggacttcgtggaagacgacaccactcacggctag

SEQ ID NO: 156167 - DNA, 3654 bp, Artificial Sequence
  derived and/or modified sequence
atgtacatcaagcaagttatcattcaaggcttcaggtcatatcgggaccagacaatcgtggacccttttagctccaagcacaacgtcattgtgggaagaaatggaagcggcaagagtaactttttctacgcaattcagtttgtactgtccgacgaattcagtcaccttcgtcccgaacagaggcttgccctactgcacgaaggaacaggccctcgcgtgatctccgcttttgtggaaatcatattcgacaactctgacaataggctgcccattgacaaggaagaggtctccctgaggcgagtgatcggcgcaaagaaagatcagtatttccttgataagaaaatggttactaaaaacgacgtcatgaacctgctagagtcagccggtttctcgcgctccaacccttattacattgtcaaacagggaaaaatcaatcagatggctaccgctcccgattcacagcggctcaagttgcttagagaggtggccggaactcgtgtgtacgacgaacggaaggaagaaagcatcagcctcatgaaagaaaccgagggcaaacgtgagaagattaacgaactcctcaaatacatcgaggaacgccttcatacactagaggaggaaaaagaggagctggcgcaataccaaaaatgggataaaatgagacgcgcattggagtatacgatatataaccaggagctcaacgagaccagggccaagctggatgagctgtccgccaaacgcgaaactagtggtgaaaagtccagacagctgagggacgcccaacaggatgcgagagacaaaatggaggacatcgagaggcaagttagagagttaaaaaccaagataagcgccatgaaagaagagaaagaacagctgtcggcagagagacaggaacagattaagcagaggactaaactggagctgaaggctaaggatctccaggatgagctagctggaaattcagagcagaggaaaagactgctcaaagagaggcagaaacttctagagaaaatcgaagagaagcagaaggagcttgctgaaaccgagcctaagtttaacagtgtcaaagaaaaagaagagcggggtattgccagactcgcacaggctacccaggagcggacagatctttacgccaagcagggcagaggctcccagttcacttctaaggaagaaagagacaagtggatcaagaaagaactgaagtctcttgaccaagccattaacgacaaaaaacgtcagatagccgcaatccacaaagatttggaagataccgaagccaacaaagagaagaacctggaacaatacaacaagctggaccaggatttgaacgaggtaaaggctagggtcgaggaattggacagaaagtattatgaggtgaaaaataagaaggatgagctgcagtccgaaagaaattatttatggcgcgaggaaaacgccgagcaacaagccctagccgcaaaaagggaggacctggagaagaaacagcagctgttgagggcagctacaggcaaggcgattctgaatggaatcgactcaatcaataaggtacttgatcattttagaagaaaaggaattaaccagcacgtacaaaacggctatcacggaatagttatgaataatttcgagtgtgaacccgctttctatacatgtgtcgaagtgacagccggaaacagactgttttatcacattgtggatagtgatgaagtgtctaccaaaatcctgatggagttcaataagatgaatctgcccggagaggtgacctttctccccctgaacaagcttgacgtcagggacacggcctatcctgaaaccaacgacgctatccccatgatctccaagctcaggtacaatcctcgctttgacaaagccttcaaacatgtgttcgggaaaactttgatttgcaggagtatggaggtgtcaacccagctggcccgtgctttcacgatggactgcattacattggaaggtgaccaggtcagtcataggggggcactgacaggaggatactacgacacaagaaaatccagactggaactgcaaaaggacgtgaggaaggctgaggaggagcttggagagctggaggccaagttgaacgagaacctgcgcagaaacattgaacgcatcaacaacgagatagatcagctgatgaatcaaatgcaacagatcgaaacacaacagaggaaattcaaagcttcccgggactccattctttcggagatgaaaatgttgaaggaaaagcggcaacagtctgagaaaaccttcatgccaaagcagagaagcttacagtcactagaagcatcattgcacgccatggaaagtactcgagagtccttgaaggccgagctgggcaccgatttattgtcacagctttctctggaggatcaaaagagggtggacgccttgaatgacgaaattcgtcagcttcagcaggagaatcgtcagctgctgaacgaacggataaagttggagggtataatcactagagtcgaaacctacctgaacgagaacctccgcaagcgcctcgatcaagtggagcaggagctgaacgaactgagggaaactgagggaggcaccgtgctcaccgccacaaccagcgaactggaggcgatcaacaaacgcgtgaaagataccatggcaagaagcgaggatctagataattctatcgacaagacggaggccggaatcaaggagttacaaaagtcgatggagcggtggaagaacatggagaaggagcacatggatgctatcaatcacgatactaaggaactggaaaagatgacaaaccgccaaggtatgttactcaaaaagaaagaggagtgcatgaaaaagatcagggaactcggatccctgccgcaggaagcctttgaaaagtatcagacgctatctctgaaacagctgttccgtaagctcgagcaatgtaatactgagttgaagaagtacagccatgtgaacaagaaggcactagaccagttcgtgaactttagcgagcagaaggagaagttgataaagaggcaggaggagctcgatcgtggatataagtctatcatggaactcatgaatgtcttagagctccggaagtacgaggctattcaacttaccttcaaacaagtctcaaagaatttttccgaggtgttccagaagcttgtacctggagggaaggcgacgctagtgatgaaaaagggcgatgtggagggctcccaaagtcaggatgagggggagggctctggagagtcagaaagagggagcggctctcagagctcagtgccttccgttgaccagttcacaggtgtcggcattcgagtgtcctttacgggcaaacagggtgagatgcgggagatgcaacagctctcaggcggacaaaagtctctggtcgctctcgctctgatcttcgcaatccaaaaatgtgatcccgcacctttctacctttttgacgaaatcgaccaggccctcgacgcccaacatcgaaaagcggtgagcgatatgatcatggaactcgccgttcatgctcagtttatcaccaccacttttcggccagagctattggaaagcgcagacaaattctacggcgtgaaatttaggaacaaggttagtcacatcgatgtcatcacggctgagatggccaaggacttcgtggaagacgacaccactcatgggtag

SEQ ID NO: 156168 - DNA, 4114 bp, Artificial Sequence
  derived and/or modified sequence
ttttgtttggctgaggggagcgagcggcgctttgggggaggggtcgcgtaggcgcctcacctgaccctgcggccgtgcggttgctgctccggggcaggtctccttccaggccaggggcccggaatcatgtacataaagcaggtgattatccagggttttcgaagttacagagatcaaacaattgtagatcccttcagttcaaaacataatgtgattgtgggcagaaatggatctggaaaaagtaactttttttatgcaattcagtttgttctcagtgatgagtttagtcatcttcgtccagaacagcggttggctttattgcatgaaggtactggtcctcgtgttatttctgcttttgtggagattatttttgataattcagacaaccggttaccaatcgataaagaggaagtttcacttcgaagagttattggtgccaaaaaggatcagtatttcttagacaagaagatggtcacgaaaaatgatgtgatgaacctccttgaaagcgctggtttttctcgaagcaatccttattatattgttaaacaaggaaagatcaaccagatggcaacagcaccagattctcagagattaaagctattaagagaagtagctggtactagagtgtatgacgaacgaaaggaagaaagcatctccttaatgaaagaaacagagggcaaacgggaaaaaatcaatgagttgttaaaatacattgaagagagattacatactctagaggaagaaaaggaagaactagctcagtatcagaagtgggataaaatgagacgagccctggaatataccatttacaatcaggaacttaacgagactcgtgccaaacttgatgagctttctgctaagcgagagactagtggagaaaaatccagacaattaagagatgctcagcaggatgcaagagataaaatggaggatatcgaacgccaagttagagaattgaaaacaaaaatttcagctatgaaagaagaaaaagaacagcttagtgctgaaagacaagagcagattaagcagaggactaagttggagcttaaagccaaggatttacaagatgaactagcaggcaatagtgaacaaaggaaacgtttattaaaagagaggcagaagctgcttgaaaaaatagaagaaaagcagaaagaactggcagaaacagaacccaaattcaacagtgtgaaagagaaagaagaacgaggaattgctagattggctcaagctacccaggaaagaacggatctttatgcaaagcagggtcgaggaagccagtttacatcaaaagaagaaagggataagtggattaaaaaggaactcaagtctttagatcaggctattaatgacaagaaaagacagattgctgctatacataaggatttggaagacactgaagcaaataaagagaaaaatctggagcagtataataaactggaccaggatcttaatgaagtcaaagctcgagtagaagaactggacagaaaatattacgaagtaaaaaataagaaagatgaactacaaagtgaaagaaactacttgtggagagaagagaatgcagaacagcaagcacttgctgctaaaagagaagatcttgaaaagaagcaacaacttcttagagcagcaacaggaaaggccattttaaatggaatagacagcataaacaaagtgctagaccacttccgtcgaaaaggaataaaccagcatgttcaaaatggctatcatggtattgtaatgaataactttgaatgtgaaccagctttctacacatgcgtggaagtcactgctggaaacaggttattttatcacattgttgattcagatgaagtcagcacgaagattttaatggagtttaataaaatgaatcttcctggagaggttacttttctgcctcttaacaagttagatgtcagggatacagcctatcctgaaaccaatgatgctattcctatgatcagcaaactgaggtacaatcccagatttgacaaagctttcaaacatgtgtttggaaagactcttatttgtcgtagcatggaagtttcaacccagctggcccgtgctttcactatggactgtattactttggaaggtgaccaagtcagccatcggggtgctctaactgggggttattatgacacaaggaagtctcgacttgaattgcaaaaagatgttagaaaagcagaagaagaactaggtgaacttgaagcaaagctcaatgaaaacctgcgcagaaatattgaaaggattaataatgaaattgatcagttgatgaaccaaatgcaacagatcgagacccagcaaaggaaatttaaagcatctagagatagcatattatcagaaatgaagatgctaaaagagaagaggcagcagtcagagaaaaccttcatgcctaagcaacgtagcttacagagtttggaggcaagcttgcatgctatggagtctaccagagagtcattgaaagcagaactgggaactgatttgctttctcaactgagtttggaagatcagaagagagtagatgcactgaatgatgagattcgtcaacttcagcaggaaaacagacagttgctaaatgaaagaattaaattagaaggtattattactcgagtagagacttatctcaatgagaatctgagaaaacgcttggaccaagtagaacaggaacttaatgagctgagagagacagaagggggtactgttctcacagccacaacatcagaacttgaagccatcaataaaagagtaaaagacactatggcacgatcagaagatttggacaattccattgataaaacagaagctggaattaaggagcttcagaagagtatggagcgctggaaaaatatggaaaaagaacatatggatgctataaatcatgatactaaagaactggaaaagatgacaaatcggcaaggcatgctattgaagaagaaagaagagtgtatgaagaaaattcgagaacttggatcacttccccaggaagcatttgaaaagtaccagacactgagcctcaaacagttgtttcgaaaacttgagcagtgcaacacagaattaaagaagtacagccatgttaacaaaaaggctttggatcagtttgtaaatttctccgagcagaaagaaaagttaataaagcgtcaagaagagttagataggggttacaaatcaatcatggaactgatgaatgtacttgaacttcggaaatatgaagctattcagttaactttcaaacaggtatctaagaacttcagtgaagtattccagaagttagtacctggtggcaaagctactttggtgatgaagaaaggagatgtggagggcagtcagtctcaagatgaaggagaagggagtggtgagagtgagaggggttctggctcacaaagcagtgtcccatcagttgaccagtttactggagttggaattagggtgtcatttacaggaaaacaaggtgaaatgagagaaatgcaacagctttcaggtggacagaaatccttggtagcccttgctctgatttttgccattcagaaatgtgacccggctccattttacttgtttgatgaaattgaccaggctctggatgctcagcacagaaaggctgtgtcagatatgattatggaacttgctgtacatgctcagtttattacaactacttttaggcctgaactgcttgagtcagctgacaaattctatggtgtaaagttcagaaataaggttagtcatattgatgtgatcacagcagagatggccaaagactttgtagaagatgataccacacatggttaattggaaaatactacctactggtttgggagatgtatatagtaatatgattctcatacccaggaactgtaaatttaaacctaaatatttggccaatagttttcagacttaaagcatcatagtccttttatatttgtctttgtattttataagatactctgtaatgtcatgtttgtactgatagtttaagaatttaatttcctgtacaactttttgtaaaatgttctgctcctattttaaatgttttgaaacatgctaaatattctttcctaattattttatcacttatactaccttttttatagcttcaattaaataatcggttttatgactaata

SEQ ID NO: 156169 - protein, 431 aa, Artificial Sequence
  derived and/or modified sequence
MGSPGATTGWGLLDYKTEKYVMTRNWRVGALQRLLQFGIVVYVVGWALLAKKGYQERDLEPQFSIITKLKGVSVTQIKELGNRLWDVADFVKPPQGENVFFLVTNFLVTPAQVQGRCPEHPSVPLANCWVDEDCPEGEGGTHSHGVKTGQCVVFNGTHRTCEIWSWCPVESGVVPSRPLLAQAQNFTLFIKNTVTFSKFNFSKSNALETWDPTYFKHCRYEPQFSPYCPVFRIGDLVAKAGGTFEDLALLGGSVGIRVHWDCDLDTGDSGCWPHYSFQLQEKSYNFRTATHWWEQPGVEARTLLKLYGIRFDILVTGQAGKFGLIPTAVTLGTGAAWLGVVTFFCDLLLLYVDREAHFYWRTKYEEAKAPKATANSVWRELALASQARLAECLRRSSAPAPTATAAGSQTQTPGWPCPSSDTHLPTHSGSL

SEQ ID NO: 156170 - protein, 441 aa, Artificial Sequence
  derived and/or modified sequence
MCPQLAGAGSMGSPGATTGWGLLDYKTEKYVMTRNWRVGALQRLLQFGIVVYVVGWALLAKKGYQERDLEPQFSIITKLKGVSVTQIKELGNRLWDVADFVKPPQGENVFFLVTNFLVTPAQVQGRCPEHPSVPLANCWVDEDCPEGEGGTHSHGVKTGQCVVFNGTHRTCEIWSWCPVESGVVPSRPLLAQAQNFTLFIKNTVTFSKFNFSKSNALETWDPTYFKHCRYEPQFSPYCPVFRIGDLVAKAGGTFEDLALLGGSVGIRVHWDCDLDTGDSGCWPHYSFQLQEKSYNFRTATHWWEQPGVEARTLLKLYGIRFDILVTGQAGKFGLIPTAVTLGTGAAWLGVVTFFCDLLLLYVDREAHFYWRTKYEEAKAPKATANSVWRELALASQARLAECLRRSSAPAPTATAAGSQTQTPGWPCPSSDTHLPTHSGSL

SEQ ID NO: 156171 - protein, 388 aa, Artificial Sequence
  derived and/or modified sequence
MWWALLAKKGYQERDLEPQFSIITKLKGVSVTQIKELGNRLWDVADFVKPPQGENVFFLVTNFLVTPAQVQGRCPEHPSVPLANCWVDEDCPEGEGGTHSHGVKTGQCVVFNGTHRTCEIWSWCPVESGVVPSRPLLAQAQNFTLFIKNTVTFSKFNFSKSNALETWDPTYFKHCRYEPQFSPYCPVFRIGDLVAKAGGTFEDLALLGGSVGIRVHWDCDLDTGDSGCWPHYSFQLQEKSYNFRTATHWWEQPGVEARTLLKLYGIRFDILVTGQAGKFGLIPTAVTLGTGAAWLGVVTFFCDLLLLYVDREAHFYWRTKYEEAKAPKATANSVWRELALASQARLAECLRRSSAPAPTATAAGSQTQTPGWPCPSSDTHLPTHSGSL

SEQ ID NO: 156172 - DNA, 1296 bp, Artificial Sequence
  derived and/or modified sequence
atgggcagccccggcgccaccaccggctggggcctgctggactacaagaccgagaagtacgtgatgaccagaaactggagagtgggcgccctgcagagactgctgcagttcggcatcgtggtgtacgtggtgggctgggccctgctggccaagaagggctaccaggagagagacctggagccccagttcagcatcatcaccaagctgaagggcgtgagcgtgacccagatcaaggagctgggcaacagactgtgggacgtggccgacttcgtgaagcccccccagggcgagaacgtgttcttcctggtgaccaacttcctggtgacccccgcccaggtgcagggcagatgccccgagcaccccagcgtgcccctggccaactgctgggtggacgaggactgccccgagggcgagggcggcacccacagccacggcgtgaagaccggccagtgcgtggtgttcaacggcacccacagaacctgcgagatctggagctggtgccccgtggagagcggcgtggtgcccagcagacccctgctggcccaggcccagaacttcaccctgttcatcaagaacaccgtgaccttcagcaagttcaacttcagcaagagcaacgccctggagacctgggaccccacctacttcaagcactgcagatacgagccccagttcagcccctactgccccgtgttcagaatcggcgacctggtggccaaggccggcggcaccttcgaggacctggccctgctgggcggcagcgtgggcatcagagtgcactgggactgcgacctggacaccggcgacagcggctgctggccccactacagcttccagctgcaggagaagagctacaacttcagaaccgccacccactggtgggagcagcccggcgtggaggccagaaccctgctgaagctgtacggcatcagattcgacatcctggtgaccggccaggccggcaagttcggcctgatccccaccgccgtgaccctgggcaccggcgccgcctggctgggcgtggtgaccttcttctgcgacctgctgctgctgtacgtggacagagaggcccacttctactggagaaccaagtacgaggaggccaaggcccccaaggccaccgccaacagcgtgtggagagagctggccctggccagccaggccagactggccgagtgcctgagaagaagcagcgcccccgcccccaccgccaccgccgccggcagccagacccagacccccggctggccctgccccagcagcgacacccacctgcccacccacagcggcagcctgtag

SEQ ID NO: 156173 - DNA, 1326 bp, Artificial Sequence
  derived and/or modified sequence
atgtgcccccagctggccggcgccggcagcatgggcagccccggcgccaccaccggctggggcctgctggactacaagaccgagaagtacgtgatgaccagaaactggagagtgggcgccctgcagagactgctgcagttcggcatcgtggtgtacgtggtgggctgggccctgctggccaagaagggctaccaggagagagacctggagccccagttcagcatcatcaccaagctgaagggcgtgagcgtgacccagatcaaggagctgggcaacagactgtgggacgtggccgacttcgtgaagcccccccagggcgagaacgtgttcttcctggtgaccaacttcctggtgacccccgcccaggtgcagggcagatgccccgagcaccccagcgtgcccctggccaactgctgggtggacgaggactgccccgagggcgagggcggcacccacagccacggcgtgaagaccggccagtgcgtggtgttcaacggcacccacagaacctgcgagatctggagctggtgccccgtggagagcggcgtggtgcccagcagacccctgctggcccaggcccagaacttcaccctgttcatcaagaacaccgtgaccttcagcaagttcaacttcagcaagagcaacgccctggagacctgggaccccacctacttcaagcactgcagatacgagccccagttcagcccctactgccccgtgttcagaatcggcgacctggtggccaaggccggcggcaccttcgaggacctggccctgctgggcggcagcgtgggcatcagagtgcactgggactgcgacctggacaccggcgacagcggctgctggccccactacagcttccagctgcaggagaagagctacaacttcagaaccgccacccactggtgggagcagcccggcgtggaggccagaaccctgctgaagctgtacggcatcagattcgacatcctggtgaccggccaggccggcaagttcggcctgatccccaccgccgtgaccctgggcaccggcgccgcctggctgggcgtggtgaccttcttctgcgacctgctgctgctgtacgtggacagagaggcccacttctactggagaaccaagtacgaggaggccaaggcccccaaggccaccgccaacagcgtgtggagagagctggccctggccagccaggccagactggccgagtgcctgagaagaagcagcgcccccgcccccaccgccaccgccgccggcagccagacccagacccccggctggccctgccccagcagcgacacccacctgcccacccacagcggcagcctgtag

SEQ ID NO: 156174 - DNA, 1296 bp, Artificial Sequence
  derived and/or modified sequence
atgggttcaccaggagccacaaccggatggggtttgctcgattacaaaaccgaaaagtacgttatgacccggaattggagggtgggcgccttgcagagacttcttcagttcggtattgtggtttatgttgtcggctgggccctattagctaagaaagggtaccaagagagggacttggagccccagttctctattattaccaaattgaagggggtgtcagtgacacagataaaggagctgggcaatcgactctgggatgtggccgactttgttaaaccccctcagggagagaacgtctttttcctagtcaccaacttcctcgtcacccccgcacaggtgcaaggtaggtgtcctgagcatccgtccgtgcccctcgctaactgttgggtggacgaagactgtcctgagggggaaggcggtacccattcacatggggtcaagacaggccagtgtgtcgtgttcaatggcacgcatcggacctgtgagatctggagctggtgtcctgtggaatctggcgtggtcccaagcagaccactgctcgcacaggcccagaacttcaccctgtttatcaaaaataccgtcaccttcagcaaattcaatttttcaaaatctaacgccctggagacctgggaccctacctatttcaagcactgcaggtacgagccgcaattctccccatattgccccgtcttcagaatcggggacctcgtggcaaaggctggaggcacgtttgaggatttggcattactgggagggagtgtggggataagagtacattgggactgtgatcttgacaccggcgactctggctgctggccacactactctttccagcttcaggaaaagtcttataacttccggacagcgacacactggtgggagcagccaggggtggaagctcgcacactgctgaaactttatggaatccggtttgacattctggtcactgggcaggccgggaaatttggcttgatcccaacggcagtcaccctggggacgggggcagcctggttaggggttgtgacattcttctgcgacctcctgctgctgtatgtcgaccgcgaggcccacttttactggaggacaaagtacgaagaggctaaggcccctaaagccactgctaacagtgtctggagggagctggccctggcttctcaagctcgcctggctgaatgcttgcggagatcctccgcaccagcccccaccgcaactgcggcaggatctcaaacacagaccccagggtggccttgcccaagctctgacactcacctgcctacacactcagggtcgctttag

SEQ ID NO: 156175 - DNA, 1326 bp, Artificial Sequence
  derived and/or modified sequence
atgtgtcctcagctcgccggcgccggatcaatgggctccccaggagcaactacagggtggggtctgttggactataagaccgagaagtatgttatgacccggaactggcgggtcggcgccctgcagaggctgctccagttcggcatcgtcgtttatgtcgttggatgggccttgctggccaagaaagggtaccaagaacgcgacctggagccacagttttccattatcacaaaactgaagggggtgagcgtcacccagattaaggaactgggtaaccggctgtgggatgtggccgatttcgtaaaacctccgcagggcgaaaacgttttttttttagttaccaacttcctggttacaccagcacaagtgcagggccggtgcccggagcatccctcagtgccactggcaaattgctgggtcgacgaagactgccctgaaggagaaggagggactcatagccatggcgtgaaaacggggcagtgcgtcgtgttcaacggtacccatcgtacttgcgaaatctggtcatggtgtccagtcgagagcggggtcgtccccagccggcccctgttggcacaggcccagaattttacactgtttattaagaacactgtgaccttctctaagttcaatttttcaaagagtaatgcgctggagacttgggaccccacttattttaaacactgcaggtacgaaccacagtttagtccatactgccccgtgtttcggattggagaccttgtcgctaaggcaggtgggacgtttgaggatctagctctgctgggcggaagcgtgggaattcgagtacattgggactgcgacttggataccggcgactctggctgttggccccattactcatttcagttacaggagaaaagctacaatttccggacagcaacccattggtgggagcagccaggcgtggaagcacgaactcttctcaagctctacgggattcggtttgacatactggtgaccggtcaggccggaaagtttgggttaattccaaccgccgtcactctggggactggagccgcatggctgggcgtggtcacattcttctgtgaccttttgcttctatacgtagatcgagaagctcatttttattggcgcacaaagtacgaggaagccaaagcaccaaaagcaaccgctaatagcgtgtggagggagctggctttggcttcccaggcccggctggccgagtgtctacgccgttcctccgcacccgcaccaacagccactgccgctggcagccagacacagacacctggatggccttgtccttctagtgacacccacctccctacgcacagcggatcactatag

SEQ ID NO: 156176 - DNA, 1296 bp, Artificial Sequence
  derived and/or modified sequence
atgggcagccctggggccaccaccggctggggcctgctggactacaagacagagaagtatgtgatgaccaggaactggagggtgggcgccctgcagaggctgctgcagtttggaattgtggtgtatgtggtgggctgggccctgctggccaagaagggctaccaggagcgggacctggagccccagttcagcatcatcaccaagctgaagggcgtgtctgtgacccagatcaaggagctgggcaaccggctgtgggatgtggccgactttgtgaagccaccccagggagaaaatgtgttcttcctggtgaccaacttcctggtgaccccagcccaggtgcagggccgctgcccagagcaccccagcgtgcccctggccaactgctgggtggatgaggactgcccagagggggagggcggcacccacagccacggcgtgaagacaggccagtgtgtggtgttcaacggcacccacaggacctgtgagatctggagctggtgccctgtggagagcggcgtggtgcccagccggcccctgctggcccaggcccagaacttcaccctcttcatcaagaacacagtgaccttcagcaagttcaacttcagcaagagcaatgccctggagacctgggaccccacctacttcaagcactgccgctatgagccccagttcagcccctactgccctgtgttcagaattggagacctggtggccaaggccggcggcacctttgaggacctggccctgctgggcggctctgtgggcatccgggtgcactgggactgtgacctggacaccggggacagcggctgctggccccactacagcttccagctgcaggagaagagctacaacttcagaacagccacccactggtgggagcagcccggggtggaggcccggaccctgctgaagctgtatggcatccgctttgacatcctggtgacaggccaggccggcaagtttggcctcatccccacagctgtgaccctgggcactggagctgcctggctgggcgtggtgaccttcttctgtgacctgctgctgctgtatgtggaccgggaggcccacttctactggaggaccaagtatgaggaggccaaggcccccaaggccacagccaacagcgtgtggagggagctggccctggccagccaggcccggctggctgaatgtctgcggcgcagcagcgccccagcccccacagccacagctgctggcagccagacccagaccccaggctggccctgccccagcagtgacacccacctgcccacccacagcggcagcctgtag

SEQ ID NO: 156177 - DNA, 1326 bp, Artificial Sequence
  derived and/or modified sequence
atgtgcccccagctggccggggccggctccatgggcagccctggggccaccaccggctggggcctgctggactacaagacagagaagtatgtgatgaccaggaactggagggtgggcgccctgcagaggctgctgcagtttggaattgtggtgtatgtggtgggctgggccctgctggccaagaagggctaccaggagcgggacctggagccccagttcagcatcatcaccaagctgaagggcgtgtctgtgacccagatcaaggagctgggcaaccggctgtgggatgtggccgactttgtgaagccaccccagggagaaaatgtgttcttcctggtgaccaacttcctggtgaccccagcccaggtgcagggccgctgcccagagcaccccagcgtgcccctggccaactgctgggtggatgaggactgcccagagggggagggcggcacccacagccacggcgtgaagacaggccagtgtgtggtgttcaacggcacccacaggacctgtgagatctggagctggtgccctgtggagagcggcgtggtgcccagccggcccctgctggcccaggcccagaacttcaccctcttcatcaagaacacagtgaccttcagcaagttcaacttcagcaagagcaatgccctggagacctgggaccccacctacttcaagcactgccgctatgagccccagttcagcccctactgccctgtgttcagaattggagacctggtggccaaggccggcggcacctttgaggacctggccctgctgggcggctctgtgggcatccgggtgcactgggactgtgacctggacaccggggacagcggctgctggccccactacagcttccagctgcaggagaagagctacaacttcagaacagccacccactggtgggagcagcccggggtggaggcccggaccctgctgaagctgtatggcatccgctttgacatcctggtgacaggccaggccggcaagtttggcctcatccccacagctgtgaccctgggcactggagctgcctggctgggcgtggtgaccttcttctgtgacctgctgctgctgtatgtggaccgggaggcccacttctactggaggaccaagtatgaggaggccaaggcccccaaggccacagccaacagcgtgtggagggagctggccctggccagccaggcccggctggctgaatgtctgcggcgcagcagcgccccagcccccacagccacagctgctggcagccagacccagaccccaggctggccctgccccagcagtgacacccacctgcccacccacagcggcagcctgtag

SEQ ID NO: 156178 - DNA, 1296 bp, Artificial Sequence
  derived and/or modified sequence
atgggcagccccggcgccaccaccggctggggcctgctggactacaaaacagagaagtacgtcatgactcggaattggagagtgggcgccctccagcgactcctccaatttgggatcgtggtctatgtcgttggatgggccttgctcgcaaaaaaggggtaccaggagagggacctggagcctcaattttcgattatcactaaactgaagggcgttagcgtgacccagattaaagagttggggaataggttgtgggatgttgctgatttcgtgaaaccccctcagggcgagaatgtattctttctggtgacaaactttctggtcacacccgctcaggtgcagggcaggtgtccagagcacccgtcagtcccactcgccaattgttgggtggatgaggactgtccagagggcgaaggaggcacacatagccatggcgtcaaaaccggccagtgcgtggtatttaatggtactcatcgcacatgtgaaatatggagctggtgccccgtggagtcaggtgtcgtaccatcaaggcctttattagctcaggctcagaattttaccttgttcatcaaaaatactgtgacattttctaaattcaatttctccaaatccaacgccctggagacgtgggatcctacctattttaagcactgccgttatgaaccccagttctcgccatattgccctgtattcaggattggagacctggttgctaaggcaggcggcacattcgaagaccttgctctccttggcggctctgtgggaattagagttcactgggactgcgacctcgacaccggagattcaggctgctggccccactactcattccagctccaggagaagtcttacaactttagaaccgcgacacattggtgggaacagcctggggtggaagcgcgaacactgttaaagctgtatggtatcaggttcgacattttagtgaccggccaagccgggaaattcggactgatccccaccgcagtaactctggggaccggtgctgcgtggctgggagttgtaactttcttttgcgacctgctattattgtatgtagatagggaggcacacttttactggcggactaagtatgaagaagctaaggctccgaaggctaccgccaattctgtttggcgggagctggcactggccagtcaggcaaggctcgccgaatgcttacgtagatcaagcgcacccgcacccactgctacagctgcgggtagccagacacagacaccgggatggccctgcccgtcgtcagacacacacttgccaacccacagcgggagcctctag

SEQ ID NO: 156179 - DNA, 1326 bp, Artificial Sequence
  derived and/or modified sequence
atgtgcccccagctggccggcgccggcagcatgggcagccccggcgcaacaaccggctggggcctcctggactacaagaccgaaaagtatgtcatgactcgtaactggcgagtgggggcattgcaacggttactccagttcggcatcgtggtgtatgtcgtgggctgggccttgttagcaaaaaaaggttatcaggaacgggaccttgagccccaatttagtatcattaccaaactgaagggggtgtctgtcacgcaaattaaagagctgggcaatcggctgtgggacgttgctgactttgttaaaccgccccagggcgagaacgtgttcttccttgttacaaatttcttggtgacccccgcacaggtacaaggccggtgcccagagcacccctctgtcccacttgctaactgctgggtggacgaggattgtcccgaaggagagggaggaacgcattcccatggcgtgaagaccggtcaatgtgtggtattcaacggcacacacaggacctgcgaaatctggtcttggtgcccagttgaaagcggcgttgtaccttcccgccctctgctggcccaggctcagaacttcaccctcttcattaaaaatacagttactttcagtaaattcaatttttcaaagtcaaatgcccttgagacttgggatcctacatacttcaaacactgtcgatatgagccacagtttagtccttattgccccgtcttcagaattggcgacctggttgcgaaggccggggggacattcgaagatctggcacttctcggaggaagtgtcggcattcgggtgcattgggactgcgatctggatactggcgattctggatgttggcctcattactcttttcagctgcaggagaaatcctacaacttcagaacagccacgcattggtgggagcagcctggcgtcgaggcacgcactctcctcaaactctacgggatccgattcgacatactagtgacagggcaggctggaaagttcggcctgatcccaaccgctgtgaccctgggaacaggcgccgcatggctcggcgtggtgacgttcttctgtgacctactgctgctctacgtcgaccgggaagcccacttctactggcgaacaaaatacgaggaagccaaggcaccaaaagccactgctaactctgtttggagagaattggcattagcatcgcaggctcgtctggccgagtgcctgaggagaagcagtgcccctgctccgaccgcaaccgcggccggtagccagactcagactcctggatggccatgccctagctctgatactcatttgcctacacattccggatcactgtag

SEQ ID NO: 156180 - DNA, 3554 bp, Artificial Sequence
  derived and/or modified sequence
ctgccatgctgactcatgtgcccgcagctagcaggagctggcagcatgggctccccaggggctacgacaggctgggggcttctggattataagacggagaagtatgtgatgaccaggaactggcgggtgggcgccctgcagaggctgctgcagtttgggatcgtggtctatgtggtagggtgggctctcctcgccaaaaaaggctaccaggagcgggacctggaaccccagttttccatcatcaccaaactcaaaggggtttccgtcactcagatcaaggagcttggaaaccggctgtgggatgtggccgacttcgtgaagccacctcagggagagaacgtgttcttcttggtgaccaacttccttgtgacgccagcccaagttcagggcagatgcccagagcacccgtccgtcccactggctaactgctgggtcgacgaggactgccccgaaggggagggaggcacacacagccacggtgtaaaaacaggccagtgtgtggtgttcaatgggacccacaggacctgtgagatctggagttggtgccccgtggagagtggcgttgtgccctcgaggcccctgctggcccaggcccagaacttcacactgttcatcaaaaacacagtcaccttcagcaagttcaacttctctaagtccaatgccttggagacctgggaccccacctattttaagcactgccgctatgaaccacaattcagcccctactgtcccgtgttccgcattggggacctcgtggccaaggctggagggaccttcgaggacctggcgttgctgggtggctctgtaggcatcagagttcactgggattgtgacctggacaccggggactctggctgctggcctcactactccttccagctgcaggagaagagctacaacttcaggacagccactcactggtgggagcaaccgggtgtggaggcccgcaccctgctcaagctctatggaatccgcttcgacatcctcgtcaccgggcaggcagggaagttcgggctcatccccacggccgtcacactgggcaccggggcagcttggctgggcgtggtcacctttttctgtgacctgctactgctgtatgtggatagagaagcccatttctactggaggacaaagtatgaggaggccaaggccccgaaagcaaccgccaactctgtgtggagggagctggcccttgcatcccaagcccgactggccgagtgcctcagacggagctcagcacctgcacccacggccactgctgctgggagtcagacacagacaccaggatggccctgtccaagttctgacacccacttgccaacccattccgggagcctgtagccgttccctgctggttgagagttgggggctgggaagggcggggccctgcctggggatctcaaggatgaggccccagcatggaggattgggggtagaattccacccttgaaccccagcagacagtccctcccctgactcccaccttggtagggtgctgcctcagggagccatagaagtcggctgtgttttgagacggcgacagaacctgacccgtggagactgggagagcccagcaggcacctgtattgcagggctccgactgcatgtggcaggggctcctgctgcgtctgggcctggaggtctctctcccagtgctctgtccccagtgttcctagcagaggtatgcttaccagctgtcagcacagaccctcctgctgcctgggtcctggccctcctcccccatctgcacccccatcataggtagagaccccaccctcccatcggtcctacatggggctgtgcagctggagccaaaaaggcaaggtagaaagaggagtgatgggggagggggattgtttcagcttctctggtgctgtgatgccccaggagagtcctaatctagggaatggggtggagtaggcagataatccacctccctatcccccaggcaagggcggagcatgtgtcttgggcccacacctgcttagtttatgaggaccggctgctttccagtggtagcccttttgccatggaggtctgggagagagagcagagggcggcagggctaagttggtgatcattgggttcttcaggaccttctatatccctcctcggtaaccccccagcccaaccccttggaatctttcctccaggcttcctgagagccctgggggtgggaggctgtgggaggctgtacatctgaaattcacttcagtccaagtcatacctaggaagctgtctgggcagctgctcgagggaggccctggctctgatcccaggctggatggagtggctggaaggaatggttccaaacaacaccaccgagatctccctcaggctggccaggttttgcagctggaattctcctcttggtcccagggcggggcagggaattctaagtgtccaccccagggaggcaaggggctgctttccactgtgggtacctggtgatcagggcaagctgtggagggccaggggtggggctgagactgggctgacatctagaatcacctgccacctggagcctcagtaaaatgcctggggtccctgctgcctctcaatctccagagccatgtccatggggaggtgggctctgaagggcgaaggtgggagagcagggcccctgaggcctgggtatccaaggaggggcacgtgcacctgattctccttggggcccagaggaagctgatgtcatggctggacaaagtcacggagtaaagccagcaaagccaccctcttcctgtgtagtccttacaggcatgactggaaagttggggggcatctatggtagacatggcacagccatgaagagaccagtggggtggtgcagggtggacttggggaccctacccctgaagactgaggccctgcagctaccaggtgggctagaaggtaactggaacaggcctgggcacttgtgcacccatgtaggagcatgagggccacactcttttcacctcaaagcccttgaagagtgggcaaagacagcaagagagctgcagcctgggcccgagctcagaaacagctgtcgcctcagtctgcgcacaggcatgcaccccagggtagtgcctgcagggatgcatgtgtccccgtgggggtgcctgtgccaggcaggcctcaggtgcatgccatgctcagaaccctgctgccctttctaggcagcctccttggggcccaagctctgctccctggatctgccacctagcagacgtggggagcctgaccccatgcctgtcatggaaccctccttgcctggtgtgtgtggctcccctcttcactgggcacctggatccaggcccacctgtgtccctgactcagggtggtcccaggactggcacctactctttagagagccccagcatctttgatgtggattggagacaattgcctggttccctggggcaggtgaagacttggtgccacaaagaatgccacagtggatacgccagcaggccacatggctggccaagcaattattattatggatcccttgggctgtgggccttcccatccaccccaccacaactgcccaggtagctggagctgatcataaa

SEQ ID NO: 156181 - DNA, 1296 bp, Artificial Sequence
  derived and/or modified sequence
atgggttcccccggtgcaactaccggctggggtcttctggattataaaactgagaaatatgtaatgacacgcaactggagagtgggagccttgcagcggctgcttcagtttggcattgtggtctacgtggttggctgggcccttctggcaaagaagggctatcaggagcgcgatcttgaaccacagttcagcattattactaagctgaagggcgtgtctgttactcagataaaggagctgggaaaccgtctgtgggatgtggccgatttcgtgaaacctcctcagggcgagaacgtgttttttctcgtgacaaatttcctggtgacccctgcgcaggtccaaggaaggtgccccgagcatccaagcgtcccccttgctaattgttgggtggatgaggattgcccggagggggaggggggaacccatagtcacggagtgaaaaccggacagtgtgttgtgtttaacggcacccacagaacctgcgaaatatggtcttggtgcccagtggaaagcggggtggtgccctctaggccgctgctggcccaggcacagaacttcactctcttcataaagaacactgttacattttccaaatttaatttcagcaaatccaatgcactggagacttgggatccaacttatttcaagcattgtcgctacgagcctcagttttcaccctattgccctgtctttcggattggagacctcgtggcgaaagcagggggaacattcgaagacctggccctgctcggaggtagcgtaggtatcagggtgcactgggactgcgacttagataccggcgacagcgggtgctggccccactactcctttcagcttcaggagaaatcatataacttcaggacagctacccattggtgggagcagcccggagtcgaggctcgaaccctcctgaaactatacggcattagattcgacatcttggtcacaggccaggccggaaaatttgggctgatccctacagctgtgaccctcgggactggagctgcatggttgggcgtggtcacattcttctgtgatctgctgttgctgtacgtggatagagaagcccacttctattggaggaccaagtatgaagaggctaaagctccaaaggcaaccgctaacagcgtctggcgagaactggccctcgctagccaggcacggctggctgagtgcctgcgcaggtcatctgcgccagctccaaccgctaccgccgcagggtcacaaactcagaccccaggatggccttgtccgtcttcagatacccacctgccaacacattctggctctctctag

SEQ ID NO: 156182 - DNA, 1326 bp, Artificial Sequence
  derived and/or modified sequence
atgtgtccacaactggcaggagctggctctatgggatctccgggtgctacaacaggatggggcttactggactataagaccgaaaaatacgttatgaccaggaattggagggtgggggctcttcagcgcctcctgcagtttgggatagttgtgtatgtcgtcgggtgggccctgttggcaaaaaaaggttaccaggaacgggacctggaacctcagtttagtatcatcaccaagttgaaaggcgtctccgtgacacagattaaagaactggggaacagactctgggatgtcgccgattttgtcaagccaccacagggggagaacgtgttcttcctggtcacaaactttctagtcacacctgcccaagtgcagggcagatgtcccgagcacccatccgtgccactggcaaactgttgggtggacgaggattgtcctgaaggggaaggcggaacgcactcccacggggtcaagactggtcagtgtgtcgtgttcaatggaacgcacaggacgtgtgaaatctggagttggtgcccagtcgagagtggggtagtcccaagtcgccctttacttgcacaagcacaaaacttcaccttatttatcaagaacaccgtgacatttagtaagtttaacttcagtaagagtaatgccctcgaaacatgggatcctacctacttcaaacactgtagatacgagccacagttcagcccttattgccccgtgttcagaataggggaccttgtggctaaggccggtggcaccttcgaggacctggcccttcttgggggaagcgttggtataagggtccattgggattgcgacctggacaccggtgactccggatgctggcctcattactcattccagttgcaggagaaatcctacaattttcggactgcgactcattggtgggaacagccaggcgtggaggctagaacgctgctgaaactctacggaatccgattcgacatcctcgtcacaggtcaggccggaaagtttggactgatcccaacagcagtgaccctgggcactggcgcagcctggctgggcgtggtcacgtttttctgcgacctcctgctgctctatgtggaccgtgaggcccatttttattggcgcaccaagtacgaggaggctaaagctccaaaggccacagctaactccgtatggagagagttggccctggcaagtcaggccaggctggccgagtgcctccgccgttcttccgccccagcccctacagctactgctgcaggctcacagacacagacccctggatggccttgccctagcagtgatactcacctgccaacccattctgggtccctatag

SEQ ID NO: 156183 - DNA, 3687 bp, Artificial Sequence
  derived and/or modified sequence
ctgggattaggggttgagggctgggtgttggaggctggatctggatcctgctttagtggaagtgtccctttaacagcaactggcctggcctggctcgggccctgctttgcctcctgttcagctgcggctgcagctgccatgctgactcatgtgcccgcagctagcaggagctggcagcatgggctccccaggggctacgacaggctgggggcttctggattataagacggagaagtatgtgatgaccaggaactggcgggtgggcgccctgcagaggctgctgcagtttgggatcgtggtctatgtggtagggtgggctctcctcgccaaaaaaggctaccaggagcgggacctggaaccccagttttccatcatcaccaaactcaaaggggtttccgtcactcagatcaaggagcttggaaaccggctgtgggatgtggccgacttcgtgaagccacctcagggagagaacgtgttcttcttggtgaccaacttccttgtgacgccagcccaagttcagggcagatgcccagagcacccgtccgtcccactggctaactgctgggtcgacgaggactgccccgaaggggagggaggcacacacagccacggtgtaaaaacaggccagtgtgtggtgttcaatgggacccacaggacctgtgagatctggagttggtgccccgtggagagtggcgttgtgccctcgaggcccctgctggcccaggcccagaacttcacactgttcatcaaaaacacagtcaccttcagcaagttcaacttctctaagtccaatgccttggagacctgggaccccacctattttaagcactgccgctatgaaccacaattcagcccctactgtcccgtgttccgcattggggacctcgtggccaaggctggagggaccttcgaggacctggcgttgctgggtggctctgtaggcatcagagttcactgggattgtgacctggacaccggggactctggctgctggcctcactactccttccagctgcaggagaagagctacaacttcaggacagccactcactggtgggagcaaccgggtgtggaggcccgcaccctgctcaagctctatggaatccgcttcgacatcctcgtcaccgggcaggcagggaagttcgggctcatccccacggccgtcacactgggcaccggggcagcttggctgggcgtggtcacctttttctgtgacctgctactgctgtatgtggatagagaagcccatttctactggaggacaaagtatgaggaggccaaggccccgaaagcaaccgccaactctgtgtggagggagctggcccttgcatcccaagcccgactggccgagtgcctcagacggagctcagcacctgcacccacggccactgctgctgggagtcagacacagacaccaggatggccctgtccaagttctgacacccacttgccaacccattccgggagcctgtagccgttccctgctggttgagagttgggggctgggaagggcggggccctgcctggggatctcaaggatgaggccccagcatggaggattgggggtagaattccacccttgaaccccagcagacagtccctcccctgactcccaccttggtagggtgctgcctcagggagccatagaagtcggctgtgttttgagacggcgacagaacctgacccgtggagactgggagagcccagcaggcacctgtattgcagggctccgactgcatgtggcaggggctcctgctgcgtctgggcctggaggtctctctcccagtgctctgtccccagtgttcctagcagaggtatgcttaccagctgtcagcacagaccctcctgctgcctgggtcctggccctcctcccccatctgcacccccatcataggtagagaccccaccctcccatcggtcctacatggggctgtgcagctggagccaaaaaggcaaggtagaaagaggagtgatgggggagggggattgtttcagcttctctggtgctgtgatgccccaggagagtcctaatctagggaatggggtggagtaggcagataatccacctccctatcccccaggcaagggcggagcatgtgtcttgggcccacacctgcttagtttatgaggaccggctgctttccagtggtagcccttttgccatggaggtctgggagagagagcagagggcggcagggctaagttggtgatcattgggttcttcaggaccttctatatccctcctcggtaaccccccagcccaaccccttggaatctttcctccaggcttcctgagagccctgggggtgggaggctgtgggaggctgtacatctgaaattcacttcagtccaagtcatacctaggaagctgtctgggcagctgctcgagggaggccctggctctgatcccaggctggatggagtggctggaaggaatggttccaaacaacaccaccgagatctccctcaggctggccaggttttgcagctggaattctcctcttggtcccagggcggggcagggaattctaagtgtccaccccagggaggcaaggggctgctttccactgtgggtacctggtgatcagggcaagctgtggagggccaggggtggggctgagactgggctgacatctagaatcacctgccacctggagcctcagtaaaatgcctggggtccctgctgcctctcaatctccagagccatgtccatggggaggtgggctctgaagggcgaaggtgggagagcagggcccctgaggcctgggtatccaaggaggggcacgtgcacctgattctccttggggcccagaggaagctgatgtcatggctggacaaagtcacggagtaaagccagcaaagccaccctcttcctgtgtagtccttacaggcatgactggaaagttggggggcatctatggtagacatggcacagccatgaagagaccagtggggtggtgcagggtggacttggggaccctacccctgaagactgaggccctgcagctaccaggtgggctagaaggtaactggaacaggcctgggcacttgtgcacccatgtaggagcatgagggccacactcttttcacctcaaagcccttgaagagtgggcaaagacagcaagagagctgcagcctgggcccgagctcagaaacagctgtcgcctcagtctgcgcacaggcatgcaccccagggtagtgcctgcagggatgcatgtgtccccgtgggggtgcctgtgccaggcaggcctcaggtgcatgccatgctcagaaccctgctgccctttctaggcagcctccttggggcccaagctctgctccctggatctgccacctagcagacgtggggagcctgaccccatgcctgtcatggaaccctccttgcctggtgtgtgtggctcccctcttcactgggcacctggatccaggcccacctgtgtccctgactcagggtggtcccaggactggcacctactctttagagagccccagcatctttgatgtggattggagacaattgcctggttccctggggcaggtgaagacttggtgccacaaagaatgccacagtggatacgccagcaggccacatggctggccaagcaattattattatggatcccttgggctgtgggccttcccatccaccccaccacaactgcccaggtagctggagctgatcataaa

SEQ ID NO: 156184 - protein, 392 aa, Artificial Sequence
  derived and/or modified sequence
MVLLSILRILFLCELVLFMEHRAQMAEGGQSSIALLAEAPTLPLIEELLEESPGEQPRKPRLLGHSLRYMLELYRRSADSHGHPRENRTIGATMVRLVKPLTNVARPHRGTWHIQILGFPLRPNRGLYQLVRATVVYRHHLQLTRFNLSCHVEPWVQKNPTNHFPSSEGDSSKPSLMSNAWKEMDITQLVQQRFWNNKGHRILRLRFMCQQQKDSGGLELWHGTSSLDIAFLLLYFNDTHKSIRKAKFLPRGMEEFMERESLLRRTRQADGISAEVTASSSKHSGPENNQCSLHPFQISFRQLGWDHWIIAPPFYTPNYCKGTCLRVLRDGLNSPNHAIIQNLINQLVDQSVPRPSCVPYKYVPISVLMIEANGSILYKEYEGMIAESCTCR

SEQ ID NO: 156185 - DNA, 1179 bp, Artificial Sequence
  derived and/or modified sequence
atggtgctgctttcgattctcagaatcctgttcctttgtgagctggtccttttcatggaacatcgcgcccagatggctgaaggtggtcaaagttctatcgccttactagcagaggcaccaaccctccccctaatcgaagagctcttggaggaatcacctggggagcagccgagaaagcctcgcctgttgggccacagcctgcggtacatgcttgaattgtacagacggtctgccgacagccacggccatcctcgggaaaataggacaatcggagcgactatggtccgcctggtgaagccgttgaccaacgtcgctaggccccaccgtggcacatggcatatccaaattttgggttttccactgcggcccaatagaggcctataccaattggtgcgggccactgttgtgtacagacatcatctgcaattaactaggtttaatttaagctgccatgtagagccatgggtgcagaaaaacccaaccaatcactttccaagttccgaaggtgacagtagcaagccgagtctgatgtccaacgcctggaaggagatggatattactcagctggtgcaacaacgcttctggaataataaagggcaccggatcctaagactgaggttcatgtgccagcaacagaaggattccggtgggcttgagctctggcacggtacaagttctctggatattgctttcctcctcctctacttcaatgatacccataaatcaattcgcaaagctaaatttttgcccagagggatggaggaattcatggaacgagaaagcctactccgtaggacccgccaggccgacgggatatccgcagaggtgaccgctagcagtagcaaacattcagggccagagaacaatcagtgctccctgcatccatttcagatctccttccgtcagctgggatgggaccactggatcatcgcacctcctttctacacccccaactactgtaaagggacttgcctgcgcgtgctacgggacggcctcaattctcctaatcacgctattatccaaaatttaataaatcagctggtggaccaatctgtccctagacctagttgcgttccatacaagtacgttcctatcagtgtactgatgatcgaagctaacggaagtattctgtataaagagtatgaaggaatgatagccgaatcttgtacttgccgctag

SEQ ID NO: 156186 - DNA, 1179 bp, Artificial Sequence
  derived and/or modified sequence
atggtgctgctgagcatcctgcgcatcctcttcctgtgtgagctggtgctcttcatggagcaccgggcccagatggccgagggcggccagagcagcatcgccctgctggccgaggcccccaccctgcccctgattgaggagctgctggaggagagccctggagagcagcccaggaagccccggctgctgggccacagcctgcgctacatgctggagctgtacagaagatctgctgacagccacggccacccccgggagaacagaaccatcggggccaccatggtgcggctggtgaagcccctgaccaacgtggcccggccccaccggggcacctggcacatccagatcctgggcttccccctgcggcccaacagaggcctgtaccagctggtgcgggccaccgtggtgtaccgccaccacctgcagctgacccgcttcaacctgagctgccacgtggagccctgggtgcagaagaaccccaccaaccacttccccagcagcgagggggacagcagcaagcccagcctgatgagcaatgcctggaaggagatggacatcacccagctggtgcagcagcgcttctggaacaacaagggccaccgcatcctgcggctgcgcttcatgtgccagcagcagaaggacagcggcggcctggagctgtggcacggcaccagcagcctggacatcgccttcctgctgctgtacttcaatgacacccacaagagcatcaggaaggccaagttcctgccccggggcatggaggagttcatggagcgggagagcctgctgcggaggacccggcaggctgatggcatctctgctgaggtgacagccagcagcagcaagcacagcggccctgagaacaaccagtgcagcctgcaccccttccagatctccttccggcagctgggctgggaccactggatcatcgccccacccttctacacccccaactactgcaagggcacctgcctgcgggtgctgagagatggcctgaacagccccaaccacgccatcatccagaacctgatcaaccagctggtggaccagagcgtgccccggcccagctgtgtgccctacaagtatgtgcccatctctgtgctgatgattgaggccaacggcagcatcctgtacaaggagtatgagggcatgattgctgagagctgcacctgcaggtag

SEQ ID NO: 156187 - DNA, 1179 bp, Artificial Sequence
  derived and/or modified sequence
atggtgctgctgagcatcctgcggatcctgttcctgtgcgagctggttctgttcatggagcatagggcgcagatggccgaaggcggacagagttctatcgctctgctcgctgaggctcccaccttgcccttgatcgaagaactgctggaggaatctcccggagagcagccccgcaagccccgcctgctcggccacagcttgcgttatatgctcgagttgtatcgccgctcggccgactctcacggccatccaagagagaacagaaccattggagcaacaatggtccggttggttaagccactgactaacgtggctaggccccataggggtacatggcacatccagattttgggctttccgcttagacctaacagggggctgtaccaattggtccgggctacagtagtttatcggcaccaccttcaactgactcggttcaatttatcttgccacgtcgaaccctgggttcagaagaaccccactaatcactttcccagctctgaaggggacagttctaagccctctctgatgagcaacgcctggaaggaaatggatataacacagctcgtgcagcagcgtttctggaataataaaggccatcgcatccttcggctgaggttcatgtgtcagcagcagaaggactctggagggctggaactctggcacgggacttcttcgcttgacattgcgtttctcctgttgtactttaatgacacccataagtcaattaggaaggccaaattcttgccccgaggtatggaagaatttatggagcgcgaatccctcctgcgcaggacaaggcaagccgatggtatcagcgcagaggtcaccgctagctcatctaagcactcaggtcccgagaataaccaatgtagtttgcatccatttcagatctcctttagacagctcggctgggatcattggatcatcgcgccccctttttacacccccaactattgtaaggggacctgtttgcgcgtgctgagagatgggctcaatagccctaaccatgcgattatacagaatctgatcaaccagctggtggaccagtctgtcccaaggccttcttgcgtaccctacaagtacgtcccgatttcagtgctcatgatagaagccaatgggagcattctctacaaggaatacgaagggatgattgcagagtcgtgtacctgtcggtag

SEQ ID NO: 156188 - DNA, 1179 bp, Artificial Sequence
  derived and/or modified sequence
atggtgctcctttctattttgcggatcctctttctttgcgagctggtgctgtttatggagcaccgcgcacagatggctgagggtgggcagtcctcgattgcactgttagcggaagcccctaccctgccactgattgaggaactgttagaagaatcaccaggcgaacagcccagaaaacctcggctattgggccacagtttgcgatatatgctggagctttaccggcgaagtgctgactcacatgggcaccctcgcgagaatcgtacaatcggggcaacaatggtgagattggtaaagcctctaaccaacgtagcacgccctcaccgcggaacttggcatatccagattctaggattcccactcagacccaaccgcggactttaccagctagttcgggcaaccgtggtgtatcggcaccacctgcagttaacgcgatttaatttatcttgccatgttgagccttgggtacaaaagaatccaaccaatcactttccttcctctgagggggattcatccaaacctagcttgatgagtaatgcttggaaggagatggatattacccagctagtgcagcagcgcttctggaacaataaaggtcatagaatcctgcggctgagattcatgtgccaacagcaaaaagactctgggggtttagagttatggcacgggaccagcagcttggatatcgctttccttctgttatattttaatgacacccacaaaagtattcggaaagctaaattcctacccagaggtatggaagagtttatggaaagagaatccctgctcagaagaactcgccaggcagatgggattagcgccgaagtaacagctagtagctctaaacatagcggacccgagaacaatcaatgctccctgcacccttttcagatttccttcaggcaactgggttgggatcactggatcattgccccacccttttacacccccaactactgcaaggggacgtgcctgcgggtgctacgcgatgggctgaattccccaaaccacgctattatacagaacttaattaaccaactggtggaccagtctgtacctcgcccttcctgcgtgccctataagtatgttccaatatctgtgctgatgatagaagccaacggctccatattgtataaggagtatgaaggcatgattgccgaatcatgtacgtgccggtag

SEQ ID NO: 156189 - DNA, 1179 bp, Artificial Sequence
  derived and/or modified sequence
atggtcctcctcagtattcttagaattctttttctttgtgaactcgtgcttttcatggaacacagggcccaaatggcagaaggagggcagtcctctattgcccttctggctgaggcccctactttgcccctgattgaggagctgctagaagaatcccctggcgaacagccaaggaagccccggctcctagggcattcactgcggtacatgctggagttgtaccggcgttcagctgactcgcatgggcaccctagagagaaccgcaccattggggccaccatggtgaggctggtgaagcccttgaccaatgtggcaaggcctcacagaggtacctggcatatacagatcctgggctttcctctcagaccaaaccgaggactataccaactagttagagccactgtggtttaccgccatcatctccaactaactcgcttcaatctctcctgccatgtggagccctgggtgcagaaaaacccaaccaaccacttcccttcctcagaaggagattcctcaaaaccttccctgatgtctaacgcttggaaagagatggatatcacacaacttgttcagcaaaggttctggaataacaagggacacaggatcctacgactccgttttatgtgtcagcagcaaaaagatagtggtggtcttgagctctggcatggcacttcatccttggacattgccttcttgttactctatttcaatgatactcataaaagcattcggaaggctaaatttcttcccaggggcatggaggagttcatggaaagggaatctcttctccggagaacccgacaagcagatggtatctcagctgaggttactgcctcttcctcaaaacatagcgggcctgaaaataaccagtgttccctccaccctttccaaatcagcttccgccagctgggttgggatcactggatcattgctccccctttctacaccccaaactactgtaaaggaacttgtctccgagtactacgcgatggtctcaattcccccaatcacgccattattcagaaccttatcaatcagttggtggaccagagtgtcccccggccctcctgtgtcccgtataagtatgttccaattagtgtccttatgattgaggcaaatgggagtattttgtacaaggagtatgagggtatgattgctgagtcttgtacatgcagatga

SEQ ID NO: 156190 - DNA, 1179 bp, Artificial Sequence
  derived and/or modified sequence
atggtgctgctgagcatcctgagaatcctgttcctgtgcgagctggtgctgttcatggagcacagagcccagatggccgagggcggccagagcagcatcgccctgctggccgaggcccccaccctgcccctgatcgaggagctgctggaggagagccccggcgagcagcccagaaagcccagactgctgggccacagcctgagatacatgctggagctgtacagaagaagcgccgacagccacggccaccccagagagaacagaaccatcggcgccaccatggtgagactggtgaagcccctgaccaacgtggccagaccccacagaggcacctggcacatccagatcctgggcttccccctgagacccaacagaggcctgtaccagctggtgagagccaccgtggtgtacagacaccacctgcagctgaccagattcaacctgagctgccacgtggagccctgggtgcagaagaaccccaccaaccacttccccagcagcgagggcgacagcagcaagcccagcctgatgagcaacgcctggaaggagatggacatcacccagctggtgcagcagagattctggaacaacaagggccacagaatcctgagactgagattcatgtgccagcagcagaaggacagcggcggcctggagctgtggcacggcaccagcagcctggacatcgccttcctgctgctgtacttcaacgacacccacaagagcatcagaaaggccaagttcctgcccagaggcatggaggagttcatggagagagagagcctgctgagaagaaccagacaggccgacggcatcagcgccgaggtgaccgccagcagcagcaagcacagcggccccgagaacaaccagtgcagcctgcaccccttccagatcagcttcagacagctgggctgggaccactggatcatcgccccccccttctacacccccaactactgcaagggcacctgcctgagagtgctgagagacggcctgaacagccccaaccacgccatcatccagaacctgatcaaccagctggtggaccagagcgtgcccagacccagctgcgtgccctacaagtacgtgcccatcagcgtgctgatgatcgaggccaacggcagcatcctgtacaaggagtacgagggcatgatcgccgagagctgcacctgcagatag

SEQ ID NO: 156191 - protein, 390 aa, Artificial Sequence
  derived and/or modified sequence
MDFWLWPLYFLPVSGALRILPEVKVEGELGGSVTIKCPLPEMHVRIYLCREMAGSGTCGTVVSTTNFIKAEYKGRVTLKQYPRKNLFLVEVTQLTESDSGVYACGAGMNTDRGKTQKVTLNVHSEYEPSWEEQPMPETPKWFHLPYLFQMPAYASSSKFVTRVTTPAQRGKVPPVHHSSPTTQITHRPRVSRASSVAGDKPRTFLPSTTASKISALEGLLKPQTPSYNHHTRLHRQRALDYGSQSGREGQGFHILIPTILGLFLLALLGLVVKRAVERRKALSRRARRLAVRMRALESSQRPRGSPRPRSQNNIYSACPRRARGADAAGTGEAPVPGPGAPLPPAPLQVSESPWLHAPSLKTSCEYVSLYHQPAAMMEDSDSDDYINVPA

SEQ ID NO: 156192 - protein, 141 aa, Artificial Sequence
  derived and/or modified sequence
MDFWLWPLYFLPEMESCCVAQDGLELVALSDPPGSASQSAGITVSGALRILPEVKVEGELGGSVTIKCPLPEMHVRIYLCREMAGSGTCGTVVSTTNFIKAEYKGRVTLKQYPRKNLFLVEVTQLTESDSGVYACGAGMNT

SEQ ID NO: 156193 - DNA, 1950 bp, Artificial Sequence
  derived and/or modified sequence
atttcctcatcgtcaagctttgttcctcgtgggggctagaaatctctttccagttccagattgtgaagggttcctgagtaagcagcgtgtctccatccccctctctaggggctcttggatggaccttgcactctagaagggacaatggacttctggctttggccactttacttcctgccagtatcgggggccctgaggatcctcccagaagtaaaggtagagggggagctgggcggatcagttaccatcaagtgcccacttcctgaaatgcatgtgaggatatatctgtgccgggagatggctggatctggaacatgtggtaccgtggtatccaccaccaacttcatcaaggcagaatacaagggccgagttactctgaagcaatacccacgcaagaatctgttcctagtggaggtaacacagctgacagaaagtgacagcggagtctatgcctgcggagcgggcatgaacacagaccggggaaagacccagaaagtcaccctgaatgtccacagtgaatacgagccatcatgggaagagcagccaatgcctgagactccaaaatggtttcatctgccctatttgttccagatgcctgcatatgccagttcttccaaattcgtaaccagagttaccacaccagctcaaaggggcaaggtccctccagttcaccactcctcccccaccacccaaatcacccaccgccctcgagtgtccagagcatcttcagtagcaggtgacaagccccgaaccttcctgccatccactacagcctcaaaaatctcagctctggaggggctgctcaagccccagacgcccagctacaaccaccacaccaggctgcacaggcagagagcactggactatggctcacagtctgggagggaaggccaaggatttcacatcctgatcccgaccatcctgggccttttcctgctggcacttctggggctggtggtgaaaagggccgttgaaaggaggaaagccctctccaggcgggcccgccgactggccgtgaggatgcgcgccctggagagctcccagaggccccgcgggtcgccgcgaccgcgctcccaaaacaacatctacagcgcctgcccgcggcgcgctcgtggagcggacgctgcaggcacaggggaggcccccgttcccggccccggagcgccgttgccccccgccccgctgcaggtgtctgaatctccctggctccatgccccatctctgaagaccagctgtgaatacgtgagcctctaccaccagcctgccgccatgatggaggacagtgattcagatgactacatcaatgttcctgcctgacaactccccagctatcccccaaccccaggctcggactgtggtgccaaggagtctcatctatctgctgatgtccaatacctgcttcatgtgttctcagagccctcatcacttcccatgccccatctcgactcccatccccatctatctgtgccctgagcatggctctgcccccaggtcgtcttgcacaccttggcagccccctgtagttgacaggtaagctgtaggcatgtagagcaattgtcccaatgccacttgcttcctttccaagccgtcgaacagactgtgggatttgcagagtgtttcttccatgtctttgaccacagggttgttgctgcccaggctctagatcacatggcatcaggctggggcagaggcatagctattgtctcgggcatccttcccagggttgggtcttacacaaatagaaggctcttgctctgagttatgtgacatgcctcagccccatggactaagcaggggtctggtataaaaacactcctggaaacgcctttgccctgatccaaatgttagcacttgctagtgaacgtctacttatctcaagttctatgctaaaggcaatttatcttgatgtgatgataaaccaaacttattagcaagatatgcatatatatc

SEQ ID NO: 156194 - DNA, 1173 bp, Artificial Sequence
  derived and/or modified sequence
atggacttctggctgtggccactctatttcctacctgtctcgggggccctgagaatcctccctgaggttaaagtcgagggcgagctggggggtagcgtgacaatcaagtgtccacttcccgaaatgcatgtccgcatctacttgtgtagggaaatggctgggtccgggacttgcggtaccgtggtgtcaacgactaatttcattaaggctgagtacaaaggtagagttactctgaagcaatacccccggaagaacctgttcctggtcgaagtgacccagctgaccgaatctgacagtggagtatacgcatgtggggcagggatgaatactgataggggaaagacccaaaaagtgaccttgaacgtccactctgagtacgaacccagctgggaggaacagcccatgcctgagactcctaaatggttccatctgccttacctattccagatgccagcgtacgcatcctcttcaaagttcgtgaccagagttaccactcctgcacagcggggtaaagtccccccagtccaccactctagtccaactactcagatcactcataggccccgggtgtcccgagccagcagcgtggccggcgataaaccaaggactttcctcccgagtacaactgcctcaaagatctccgcactcgagggacttctgaaacctcagacaccatcctacaatcaccatacccggttacatcgacagcgggcattggactacggcagccaaagcggcagggaggggcagggtttccatattctcatacctactatacttggactattccttctggccttgttgggcctggtggtcaaaagggccgtggaaaggcgaaaagccctctcacggcgagctaggaggctggccgtgagaatgcgagcccttgaatcatcccagaggccacgaggctccccaaggccaaggtcacaaaataatatttacagcgcatgccctcgccgagctcgaggagcagatgctgctggaaccggcgaagctcctgtcccagggccaggcgcgccgctgcctcccgctcccctgcaagtgtcggagtccccttggttacacgcccccagcttgaaaactagttgtgaatatgtcagcttgtatcaccagcccgcggcgatgatggaggatagcgactccgatgactatatcaatgtccctgcttag

SEQ ID NO: 156195 - DNA, 1173 bp, Artificial Sequence
  derived and/or modified sequence
atggacttctggctgtggcccctgtacttcctgcctgtgtctggggccctgcgcatcctgcctgaggtgaaggtggagggggagctgggcggctctgtgaccatcaagtgccccctgcctgagatgcacgtgcgcatctacctgtgccgggagatggccggcagcggcacctgtggcaccgtggtgtccaccaccaacttcatcaaggccgagtacaagggccgggtgaccctgaagcagtaccccaggaagaacctcttcctggtggaggtgacccagctgacagaaagtgacagcggcgtgtatgcctgtggggccggcatgaacacagaccggggcaagacccagaaggtgaccctgaatgtgcacagtgaatatgagcccagctgggaggagcagcccatgcctgagacccccaagtggttccacctgccctacctgttccagatgcctgcctatgccagcagcagcaagtttgtgaccagggtgaccaccccagcccagaggggcaaggtgccccctgtgcaccacagcagccccaccacccagatcacccaccggccccgggtgtcccgggccagctctgtggccggggacaagcccaggaccttcctgcccagcaccacagccagcaagatcagcgccctggagggcctgctgaagccccagacccccagctacaaccaccacacccggctgcaccggcagagggccctggactatggcagccagagcggccgggagggccagggcttccacatcctgatccccaccatcctgggcctcttcctgctggccctgctgggcctggtggtgaagagagctgtggagaggaggaaggccctgagccggcgggcccggcggctggccgtgaggatgagggccctggagagcagccagaggccccggggcagcccccggcccaggagccagaacaacatctacagcgcctgcccccggcgggcccggggagcagatgctgctggcaccggggaggcccctgtgcccggccctggggcccccctgcccccagcccccctgcaggtgtctgagagcccctggctgcacgcccccagcctgaagaccagctgtgaatatgtgtccctgtaccaccagcctgctgccatgatggaggacagcgacagtgatgactacatcaacgtgcctgcctag

SEQ ID NO: 156196 - DNA, 1173 bp, Artificial Sequence
  derived and/or modified sequence
atggacttctggctgtggcccctgtacttcctgcccgtgagcggcgctttaagaattctgcctgaggtaaaggtggagggggagctgggaggtagcgtcacgataaagtgcccactcccagagatgcatgtccgtatctatctgtgcagagagatggctggatcagggacctgcggtaccgtggtgagcaccacaaacttcataaaagctgagtacaaaggtcgcgtgaccttgaagcagtaccctaggaaaaatctcttcctcgtggaagtgactcagctgacggaaagcgacagcggcgtatatgcctgtggcgccggtatgaacacagatagggggaagacacagaaagtcaccctcaacgtgcattcagaatatgaacccagctgggaggagcagcccatgccagagacgcctaagtggttccacctaccctacctctttcagatgccagcgtatgcctcttcttcaaagtttgtgacacgtgtgactacgcctgcacagagggggaaagtgcctcctgtgcaccactcttctcctacgacccagatcacgcaccggccaagagtgagcagagcttcctccgtggctggagacaaacctagaacctttttacctagtaccactgcctcaaaaatttccgctctcgagggcctgctaaagcctcagacacccagctataatcaccatacacgcctacacagacaacgggccctggattacgggtctcaatccggccgcgagggccagggtttccacatactgattccgaccatactaggtcttttcctcctcgccctgctggggttggtggtaaaacgagccgttgagcggcggaaagccctctccagaagagctcggcgactcgcagttagaatgcgggccctcgaaagttcccagaggccaagggggagcccacggccgaggtcccagaataacatttattctgcctgtccccgaagggcgagaggagccgatgccgccggcaccggggaggcaccggtacctggccccggcgctccccttccgcctgcccccctgcaggtgagcgagtcaccttggcttcacgccccctccctcaaaacctcgtgtgaatacgtgtctctgtaccaccagcctgccgccatgatggaagacagtgacagtgatgactacattaatgtgcccgcatag

SEQ ID NO: 156197 - DNA, 1173 bp, Artificial Sequence
  derived and/or modified sequence
atggacttctggttgtggcctctatacttcctgcccgtgagcggagcgctcaggattctgccggaggttaaagtggaaggcgagctggggggtagcgttactattaagtgtcccctgcctgagatgcatgtgagaatctacctctgccgtgagatggctgggagtggcacatgtgggactgtggttagcacaacaaattttatcaaagcagagtacaaagggagggtaaccttgaagcagtacccgcgaaagaatttgtttctggtggaggtcacccaactgacggaaagcgacagcggggtctatgcatgcggggcagggatgaacacagacagaggtaagacacagaaggtcacactgaacgtccacagcgaatacgaaccctcctgggaggaacagccgatgccggaaacgccgaaatggttccatctcccttacctgttccaaatgcctgcgtacgcctcttcatcaaaatttgtaacccgcgtcactactcctgctcagagaggaaaagtaccccctgtgcatcattctagcccaaccactcagataactcacaggccccgagtaagccgcgcttctagcgtggctggcgataagccgaggacattcctcccctccacaaccgcgtccaaaatatcagcgcttgagggtttactcaaaccccagactcccagctataaccaccacactaggcttcacagacagagagcacttgattacggaagccagagcggccgtgagggccaaggatttcatattctaatcccgaccatactcgggttatttctcctcgcactgttgggcttggttgtcaaacgcgcagtggaacgccgtaaagctctgtcacggagggccagacggctggccgtaaggatgcgtgccctggaaagcagtcagcgacccaggggcagccccaggccaagatcgcaaaataacatctatagtgcgtgcccacggcgagccaggggcgcagacgccgcagggaccggggaggcgcctgtgcctgggccaggagcccctcttccacctgccccactacaagtctcagagtctccctggctccatgcaccttcccttaaaacgtcatgtgaatacgtcagcttataccaccaaccagcagctatgatggaagactccgactctgatgactatatcaacgtgcccgcatag

SEQ ID NO: 156198 - DNA, 1173 bp, Artificial Sequence
  derived and/or modified sequence
atggacttctggctgtggcccctgtacttcctgcccgtgagcggcgccctgagaatcctgcccgaggtgaaggtggagggcgagctgggcggcagcgtgaccatcaagtgccccctgcccgagatgcacgtgagaatctacctgtgcagagagatggccggcagcggcacctgcggcaccgtggtgagcaccaccaacttcatcaaggccgagtacaagggcagagtgaccctgaagcagtaccccagaaagaacctgttcctggtggaggtgacccagctgaccgagagcgacagcggcgtgtacgcctgcggcgccggcatgaacaccgacagaggcaagacccagaaggtgaccctgaacgtgcacagcgagtacgagcccagctgggaggagcagcccatgcccgagacccccaagtggttccacctgccctacctgttccagatgcccgcctacgccagcagcagcaagttcgtgaccagagtgaccacccccgcccagagaggcaaggtgccccccgtgcaccacagcagccccaccacccagatcacccacagacccagagtgagcagagccagcagcgtggccggcgacaagcccagaaccttcctgcccagcaccaccgccagcaagatcagcgccctggagggcctgctgaagccccagacccccagctacaaccaccacaccagactgcacagacagagagccctggactacggcagccagagcggcagagagggccagggcttccacatcctgatccccaccatcctgggcctgttcctgctggccctgctgggcctggtggtgaagagagccgtggagagaagaaaggccctgagcagaagagccagaagactggccgtgagaatgagagccctggagagcagccagagacccagaggcagccccagacccagaagccagaacaacatctacagcgcctgccccagaagagccagaggcgccgacgccgccggcaccggcgaggcccccgtgcccggccccggcgcccccctgccccccgcccccctgcaggtgagcgagagcccctggctgcacgcccccagcctgaagaccagctgcgagtacgtgagcctgtaccaccagcccgccgccatgatggaggacagcgacagcgacgactacatcaacgtgcccgcctag

SEQ ID NO: 156199 - protein, 232 aa, Artificial Sequence
  derived and/or modified sequence
MERCPSLGVTLYALVVVLGLRATPAGGQHYLHIRPAPSDNLPLVDLIEHPDPIFDPKEKDLNETLLRSLLGGHYDPGFMATSPPEDRPGGGGGAAGGAEDLAELDQLLRQRPSGAMPSEIKGLEFSEGLAQGKKQRLSKKLRRKLQMWLWSQTFCPVLYAWNDLGSRFWPRYVKVGSCFSKRSCSVPEGMVCKPSKSVHLTVLRWRCQRRGGQRCGWIPIQYPIISECKCSC

SEQ ID NO: 156200 - DNA, 699 bp, Artificial Sequence
  derived and/or modified sequence
atggaacgttgcccttcccttggcgtaactttatacgcccttgtggttgtccttggactgcgcgctacgcctgccgggggccagcactatttacatattaggcccgcccccagcgacaacctgcctctggtcgatctgatcgaacaccctgaccccatattcgaccctaaagagaaggacctaaacgagactctactccgcagtctgctgggcggacactacgaccccgggttcatggccacgtcacctcctgaggatcgtcctggggggggcggcggtgcggctggcggtgcagaagacctggccgagttagaccagttgctgagacagcgccctagcggagctatgccctccgagatcaaggggttagagttctccgaggggctcgctcaaggaaaaaagcaacggctctcaaaaaagttgcgcagaaagctccaaatgtggctgtggtctcagacgttttgccctgtgttgtacgcttggaatgatctgggctcccgcttctggccacgctatgttaaggtcggctcctgtttcagtaagagatcctgtagcgtcccagaaggaatggtttgcaagcccagtaagagtgtccatcttacagtgttgcgttggcgctgccagcgtcgggggggacagaggtgtgggtggatccccattcagtacccgatcatctccgagtgtaaatgttcatgttag

SEQ ID NO: 156201 - DNA, 699 bp, Artificial Sequence
  derived and/or modified sequence
atggagcgctgccccagcctgggcgtgaccctgtatgccctggtggtggtgctgggcctgcgggccaccccagctgggggccagcactacctgcacatccggcctgcccccagcgacaacctgcccctggtggacctgattgagcacccagaccccatctttgaccccaaggagaaggacctgaatgagaccctgctgcggagcctgctgggcggccactatgaccccggcttcatggccaccagccccccagaagatagacctgggggcggcggcggcgctgctggaggagctgaggacctggccgagctggaccagctgctgcggcagaggccttctggggccatgcccagcgagatcaagggcctggagttcagcgagggcctggcccagggcaagaagcagaggctgagcaagaagctgcggaggaagctgcagatgtggctgtggagccagaccttctgccctgtgctgtatgcctggaatgacctgggcagccgcttctggccccgctacgtgaaggtgggcagctgcttcagcaagaggagctgcagcgtgcctgagggcatggtgtgcaagcccagcaagtctgtgcacctgactgtgctgcgctggcgctgccagaggagaggaggccagagatgtggctggatccccatccagtaccccatcatcagcgagtgcaagtgcagctgctag

SEQ ID NO: 156202 - DNA, 699 bp, Artificial Sequence
  derived and/or modified sequence
atggagcggtgccccagcctgggcgtgaccctgtacgccctggtggtggttctcggactcagggctaccccagccggcgggcaacattacctgcatattagacccgccccctctgataacctaccgcttgtggatctaatagagcacccggacccaatctttgaccctaaagagaaggatctgaatgagaccctcctacgctcgttgctaggcggacactatgaccccggtttcatggcaacctcaccccccgaggaccggcctggcgggggcgggggcgctgctggaggggcggaggacctggcagagctggaccaacttcttcgtcagagaccaagtggggccatgcctagcgagattaagggcctggaatttagcgaaggactcgctcagggcaaaaagcagcggctgagcaaaaaattacggaggaaactgcagatgtggctctggagccagacattctgccccgtactctatgcatggaatgatctgggatcgcgattttggccgcgatatgtgaaggtgggatcctgtttttcaaaacgctcttgctccgtacctgaagggatggtttgcaagccgagcaagtcagtgcacttgacagtccttcggtggagatgtcagcgccgaggcgggcagaggtgcgggtggatcccgatccagtatcccatcatctcagagtgtaaatgttcctgctag

SEQ ID NO: 156203 - DNA, 1892 bp, Artificial Sequence
  derived and/or modified sequence
aaaccggtgccaacgtgcgcggacgccgccgccgccgccgccgctggagtccgccgggcagagccggccgcggagcccggagcaggcggagggaagtgcccctagaaccagctcagccagcggcgcttgcacagagcggccggacgaagagcagcgagaggaggaggggagagcggctcgtccacgcgccctgcgccgccgccggcccgggaaggcagcgaggagccggcgcctcccgcgccccgcggtcgccctggagtaatttcggatgcccagccgcggccgccttccccagtagacccgggagaggagttgcggccaacttgtgtgcctttcttccgccccggtgggagccggcgctgcgcgaagggctctcccggcggctcatgctgccggccctgcgcctgcccagcctcgggtgagccgcctccggagagacgggggagcgcggcggcgccgcgggctcggcgtgctctcctccggggacgcgggacgaagcagcagccccgggcgcgcgccagaggcatggagcgctgccccagcctaggggtcaccctctacgccctggtggtggtcctggggctgcgggcgacaccggccggcggccagcactatctccacatccgcccggcacccagcgacaacctgcccctggtggacctcatcgaacacccagaccctatctttgaccccaaggaaaaggatctgaacgagacgctgctgcgctcgctgctcgggggccactacgacccaggcttcatggccacctcgccccccgaggaccggcccggcgggggcgggggtgcagctgggggcgcggaggacctggcggagctggaccagctgctgcggcagcggccgtcgggggccatgccgagcgagatcaaagggctagagttctccgagggcttggcccagggcaagaagcagcgcctaagcaagaagctgcggaggaagttacagatgtggctgtggtcgcagacattctgccccgtgctgtacgcgtggaacgacctgggcagccgcttttggccgcgctacgtgaaggtgggcagctgcttcagtaagcgctcgtgctccgtgcccgagggcatggtgtgcaagccgtccaagtccgtgcacctcacggtgctgcggtggcgctgtcagcggcgcgggggccagcgctgcggctggattcccatccagtaccccatcatttccgagtgcaagtgctcgtgctagaactcgggggccccctgcccgcacccggacacttgatcgatccccaccgacgccccctgcaccgcctccaaccagttccaccaccctctagcgagggttttcaatgaacttttttttttttttttttttttttttctgggctacagagacctagctttctggttcctgtaatgcactgtttaactgtgtaggaatgtatatgtgtgtgtatatacggtcccagttttaatttacttattaaaaggtcagtattatacgttaaaagttaccggcttctactgtatttttaaaaaaaagtaagcaaaagaaaaaaaaaagaacagagaaaagagagacttattctggttgttgctaataatgttaacctgctatttatattccagtgcccttcgcatggcgaagcaggggggaaaagttatttttttcttgaagtacaaagagacgggggaacttttgtagaggactttttaaaagctattttccattcttcggaaagtgttttggttttccttggacctcgaagaagctatagagttcaatgttattttacagttattgtaaatatagagaacaaatggaatgactaatcattgtaaattaagagtatctgctatttattctttataatatcccgtgtagtaaatgagaaagaagtgcagagcaggatt

SEQ ID NO: 156204 - DNA, 699 bp, Artificial Sequence
  derived and/or modified sequence
atggagcggtgccccagcctgggtgtaacactgtacgccttagtcgtggtattagggttgagagccacacctgccggaggtcagcactacctgcacatccgtcccgctccatccgacaatttgcctttggtggacctaatcgagcatcctgatcccattttcgaccccaaagagaaggatctaaatgagactctcctgaggagcttattggggggacattatgatcccggatttatggccaccagtccccctgaagacaggccaggcggagggggaggcgcagccggaggcgctgaggatcttgcagagctggatcaactgctgcggcagcgcccttcaggagcaatgccttccgaaattaagggactggagttttctgaggggctcgcccagggcaagaagcagcgcctttcaaaaaaacttcgaagaaagctgcagatgtggctctggtcccagacgttctgtcccgtgctctacgcttggaacgacttaggcagccgattctggcctagatacgttaaagtcggcagctgcttttccaagcgttcttgtagcgtgccggaaggaatggtatgcaaaccttcaaagagcgtacacttgacagtactccgatggcgatgccagcggcgtggagggcagaggtgcggctggattcccatccagtatcccatcatctcagagtgtaagtgtagctgctag

SEQ ID NO: 156205 - DNA, 699 bp, Artificial Sequence
  derived and/or modified sequence
atggagagatgccccagcctgggcgtgaccctgtacgccctggtggtggtgctgggcctgagagccacccccgccggcggccagcactacctgcacatcagacccgcccccagcgacaacctgcccctggtggacctgatcgagcaccccgaccccatcttcgaccccaaggagaaggacctgaacgagaccctgctgagaagcctgctgggcggccactacgaccccggcttcatggccaccagcccccccgaggacagacccggcggcggcggcggcgccgccggcggcgccgaggacctggccgagctggaccagctgctgagacagagacccagcggcgccatgcccagcgagatcaagggcctggagttcagcgagggcctggcccagggcaagaagcagagactgagcaagaagctgagaagaaagctgcagatgtggctgtggagccagaccttctgccccgtgctgtacgcctggaacgacctgggcagcagattctggcccagatacgtgaaggtgggcagctgcttcagcaagagaagctgcagcgtgcccgagggcatggtgtgcaagcccagcaagagcgtgcacctgaccgtgctgagatggagatgccagagaagaggcggccagagatgcggctggatccccatccagtaccccatcatcagcgagtgcaagtgcagctgctag

SEQ ID NO: 156206 - protein, 457 aa, Artificial Sequence
  derived and/or modified sequence
MDSFKVVLEGPAPWGFRLQGGKDFNVPLSISRLTPGGKAAQAGVAVGDWVLSIDGENAGSLTHIEAQNKIRACGERLSLGLSRAQPVQSKPQKASAPAADPPRYTFAPSVSLNKTARPFGAPPPADSAPQQNGQPLRPLVPDASKQRLMENTEDWRPRPGTGQSRSFRILAHLTGTEFMQDPDEEHLKKSSQVPRTEAPAPASSTPQEPWPGPTAPSPTSRPPWAVDPAFAERYAPDKTSTVLTRHSQPATPTPLQSRTSIVQAAAGGVPGGGSNNGKTPVCHQCHKVIRGRYLVALGHAYHPEEFVCSQCGKVLEEGGFFEEKGAIFCPPCYDVRYAPSCAKCKKKITGEIMHALKMTWHVHCFTCAACKTPIRNRAFYMEEGVPYCERDYEKMFGTKCHGCDFKIDAGDRFLEALGFSWHDTCFVCAICQINLEGKTFYSKKDRPLCKSHAFSHV

SEQ ID NO: 156207 - protein, 173 aa, Artificial Sequence
  derived and/or modified sequence
MDSFKVVLEGPAPWGFRLQGGKDFNVPLSISRLTPGGKAAQAGVAVGDWVLSIDGENAGSLTHIEAQNKIRACGERLSLGLSRAQPVQSKPQKASAPAADPPRYTFAPSVSLNKTARPFGAPPPADSAPQQNGQPLRPLVPDASKQRLMENTEDWRPRPGTGQSRSFRILAHL

SEQ ID NO: 156208 - DNA, 1374 bp, Artificial Sequence
  derived and/or modified sequence
atggacagcttcaaggtggtgctggagggccccgccccctggggcttcagactgcagggcggcaaggacttcaacgtgcccctgagcatcagcagactgacccccggcggcaaggccgcccaggccggcgtggccgtgggcgactgggtgctgagcatcgacggcgagaacgccggcagcctgacccacatcgaggcccagaacaagatcagagcctgcggcgagagactgagcctgggcctgagcagagcccagcccgtgcagagcaagccccagaaggccagcgcccccgccgccgacccccccagatacaccttcgcccccagcgtgagcctgaacaagaccgccagacccttcggcgcccccccccccgccgacagcgccccccagcagaacggccagcccctgagacccctggtgcccgacgccagcaagcagagactgatggagaacaccgaggactggagacccagacccggcaccggccagagcagaagcttcagaatcctggcccacctgaccggcaccgagttcatgcaggaccccgacgaggagcacctgaagaagagcagccaggtgcccagaaccgaggcccccgcccccgccagcagcaccccccaggagccctggcccggccccaccgcccccagccccaccagcagacccccctgggccgtggaccccgccttcgccgagagatacgcccccgacaagaccagcaccgtgctgaccagacacagccagcccgccacccccacccccctgcagagcagaaccagcatcgtgcaggccgccgccggcggcgtgcccggcggcggcagcaacaacggcaagacccccgtgtgccaccagtgccacaaggtgatcagaggcagatacctggtggccctgggccacgcctaccaccccgaggagttcgtgtgcagccagtgcggcaaggtgctggaggagggcggcttcttcgaggagaagggcgccatcttctgccccccctgctacgacgtgagatacgcccccagctgcgccaagtgcaagaagaagatcaccggcgagatcatgcacgccctgaagatgacctggcacgtgcactgcttcacctgcgccgcctgcaagacccccatcagaaacagagccttctacatggaggagggcgtgccctactgcgagagagactacgagaagatgttcggcaccaagtgccacggctgcgacttcaagatcgacgccggcgacagattcctggaggccctgggcttcagctggcacgacacctgcttcgtgtgcgccatctgccagatcaacctggagggcaagaccttctacagcaagaaggacagacccctgtgcaagagccacgccttcagccacgtgtag

SEQ ID NO: 156209 - DNA, 1374 bp, Artificial Sequence
  derived and/or modified sequence
atggacagtttcaaagtggtgctcgagggacctgcaccttggggtttcaggctacagggaggtaaagacttcaatgtgcctctgagcatctctaggttgactcctgggggaaaagcagcccaggcaggtgtggccgtgggtgattgggtcctgagtatagacggggaaaatgcgggtagcctcactcacatcgaggctcaaaacaaaatcagagcttgtggagaacgactgtccctgggcctatctcgggctcaacctgtccagagtaagcctcagaaagcttccgcaccggctgccgacccacctcggtatacctttgcccccagcgtgagcttaaacaaaacggcccgaccgttcggcgctcctccccccgccgattccgccccacagcaaaatggtcagcccctgcgccctcttgtacctgacgcaagtaagcaaaggcttatggagaatacggaggattggcgccctcgacctgggacaggtcagtcgagaagcttccgcatcctggcccacctgactggcactgagttcatgcaggatcctgacgaggagcacctaaagaaaagtagccaagtgccaaggaccgaggcacctgcacccgcttcttccacccctcaggaaccctggcctggacccacggcaccctccccaacaagtaggcctccgtgggcagtcgatcccgcgtttgccgagcggtacgcgcctgacaaaacctccacagtgctcacccgccacagccaacccgcaaccccaacgcccctccagtctcggacatctattgtgcaagctgctgctggaggggtgcctggcgggggcagtaacaacgggaaaacccctgtgtgccaccaatgccacaaggtgattagaggcaggtacctagttgctctggggcacgcatatcacccagaagagttcgtctgctcccaatgtggcaaggtgctggaagaggggggcttctttgaagagaagggggccatcttttgcccaccttgctacgatgtccggtacgcacctagctgtgcgaaatgtaaaaaaaagatcaccggggagatcatgcacgccctcaaaatgacatggcacgtgcattgcttcacgtgtgccgcctgcaaaactcctattcggaacagagctttctacatggaagaaggagtcccttactgcgaacgcgactatgagaaaatgtttggcaccaaatgtcatgggtgtgacttcaagattgacgccggagatcgctttcttgaggctctgggattttcttggcacgatacctgctttgtttgcgctatctgtcagatcaacctggagggaaaaaccttctattcaaaaaaggaccggcctttgtgtaagtcccacgccttttctcacgtgtag

SEQ ID NO: 156210 - DNA, 1374 bp, Artificial Sequence
  derived and/or modified sequence
atggacagcttcaaggtggtgctggagggccctgccccctggggcttccggctgcagggcggcaaggacttcaacgtgcccctgagcatcagccggctgaccccaggcggcaaggccgcccaggccggcgtggccgtgggggactgggtgctgagcattgatggagaaaatgccggcagcctgacccacatcgaggcccagaacaagatccgggcctgtggggagcggctgagcctgggcctgagccgggcccagcctgtgcagagcaagccccagaaggccagcgccccagctgctgaccccccacgctacacctttgcccccagcgtgtccctgaacaagacagcccggccctttggagcccctcctcctgctgacagcgccccccagcagaatggccagcccctgcggcccctggtgcctgatgccagcaagcagaggctgatggagaacacagaggactggaggcccaggcctggcaccggccagagccgctccttccgcatcctggcccacctgaccggcacagagttcatgcaggaccctgatgaggagcacctgaagaagagcagccaggtgcccaggacagaggccccagccccagccagcagcaccccccaggagccctggccaggccccacagcccccagccccaccagccggcccccctgggccgtggaccctgcctttgctgagagatatgccccagacaagaccagcacagtgctgaccaggcacagccagcctgccacccccacccccctgcagagcaggaccagcatcgtgcaggccgccgccggcggcgtgcctgggggcggcagcaacaacgggaagacccctgtgtgccaccagtgccacaaggtgatccggggccgctacctggtggccctgggccacgcctaccaccctgaggagtttgtgtgcagccagtgtgggaaggtgctggaggagggcggcttctttgaggagaagggggccatcttctgccccccctgctatgatgtgcgctatgcccccagctgtgccaagtgcaagaagaagatcactggagagatcatgcacgccctgaagatgacctggcacgtgcactgcttcacctgtgccgcctgcaagacccccatccggaacagagccttctacatggaggagggcgtgccctactgtgagcgggactatgagaagatgtttggcaccaagtgccacggctgtgacttcaagattgatgctggggaccgcttcctggaggccctgggcttctcctggcatgacacctgctttgtgtgtgccatctgccagatcaacctggagggcaagaccttctacagcaagaaggaccggcccctgtgcaagagccacgccttcagccacgtgtag

SEQ ID NO: 156211 - DNA, 1374 bp, Artificial Sequence
  derived and/or modified sequence
atggacagcttcaaggtggtgctggagggccccgccccctggggctttcgtctgcaaggagggaaggactttaacgtgcccctgtcaattagccgcctgactcccggcggaaaagccgcacaggctggtgtggccgtgggtgattgggtgctcagtattgatggagagaacgctggcagcttaacccatatcgaggcacaaaataaaattcgcgcctgcggggagagactttcactgggactttcgagggcccaacctgtgcagtctaaacctcagaaagcttcggcacctgcggcagacccgccccggtatacctttgcccccagcgtctctctgaataaaactgcccgaccgttcggggcccctccacccgcagattccgccccccagcagaacggccagcccctgagacccctcgttcccgatgccagtaaacaacgcctgatggaaaatacagaagactggagaccacggcccggaaccggacagagcaggtctttcagaattctggcacatcttacaggtactgagtttatgcaggaccctgacgaagagcacctgaagaagtcgtcccaggtcccccgaaccgaggcccccgcccccgcttcatccacaccccaggagccctggcctgggcctaccgcaccctcccccacctcccgccctccatgggccgtcgaccctgcgttcgccgaacgctatgctccggacaagacgagcactgttctgactaggcattctcagcccgctacacctaccccgcttcagtcccggacaagcatcgtgcaagcggcagccggcggtgttcccggcggaggcagcaacaatggcaagaccccagtatgccaccaatgtcataaggtgattcggggacgttatcttgtggctctcggccacgcataccatccagaagagtttgtctgtagtcaatgcggaaaagtgctggaagagggaggctttttcgaagagaaaggggcaattttttgtcctccatgctatgatgtgagatacgcccctagttgcgccaaatgcaaaaaaaagatcacgggagaaattatgcacgcacttaagatgacctggcacgtgcactgttttacttgtgccgcatgcaagaccccaattcgtaatcgagctttctatatggaggaaggcgtgccctattgtgagcgggactatgagaagatgttcggaaccaagtgccacggttgtgatttcaaaattgatgctggggacagattcttggaagccctaggcttctcctggcatgacacatgttttgtatgcgcaatttgtcagatcaacctggaaggcaagactttctactcaaagaaggataggcccctatgtaagtctcacgccttctcccatgtttag

SEQ ID NO: 156212 - DNA, 1374 bp, Artificial Sequence
  derived and/or modified sequence
atggattcgttcaaggtcgtgttagaagggcctgcaccttggggtttccgcctccagggaggcaaggattttaacgtcccactgagcatctcaagactcacaccgggagggaaagcggctcaggccggagtagcagtgggcgactgggtgctctctattgacggagagaacgctggatccctgacccacatcgaagcccaaaacaagattagggcctgcggcgagaggctgtcattaggcctgagtagggcacagccggtgcagagcaaaccacaaaaagcaagtgcgcctgctgcggaccctcccagatacacttttgccccttccgtaagcctcaataaaacagctcggcctttcggggctcccccacctgccgatagcgcccctcagcagaacggccagccactccgacccctggtgcctgatgccagtaagcagcgcttgatggaaaatactgaggattggaggccaagacccggtactggtcagtcacggtcttttagaatcctcgcccatcttaccggtaccgagtttatgcaagaccccgacgaagagcacttgaagaaaagttcacaagttcctcgaacagaagcccctgcacctgcctcctccacccctcaggaaccttggcctggtcccactgccccttcccctacatcacgccctccttgggctgtagaccccgcttttgccgaacgctatgcccctgacaagacgagtacggtcctgacccgccactcgcagcccgcaaccccgacccctttacagtcaaggacatctatcgtgcaggctgccgctggcggagtaccgggaggagggtctaataacggtaagactcccgtttgtcatcagtgccacaaggtgatcaggggcaggtaccttgtggctctcggtcacgcctatcatcctgaggagttcgtctgctcccaatgcggaaaagtgctagaggagggtggtttcttcgaagaaaagggggctatcttctgccccccatgctacgacgtgaggtatgctcctagctgcgccaagtgtaagaaaaagataaccggtgaaataatgcatgcactgaaaatgacatggcatgtgcactgctttacctgcgcagcttgcaaaacaccaatacgcaatcgggctttctacatggaagaaggcgtcccgtactgtgaacgggactatgagaaaatgttcgggaccaaatgtcatgggtgtgattttaaaatagatgctggtgatcgcttcttggaggccctgggcttttcttggcatgacacttgtttcgtgtgtgctatctgccaaattaatctcgaggggaaaacgttttactctaagaaggacagacctttgtgtaagtcccacgctttctcccacgtctag

SEQ ID NO: 156213 - DNA, 1689 bp, Artificial Sequence
  derived and/or modified sequence
cccaacgaggctccctggagcccgacgcagagcagcgccctggccgggccaagcaggagccggcatcatggattccttcaaagtagtgctggaggggccagcaccttggggcttccggctgcaagggggcaaggacttcaatgtgcccctctccatttcccggctcactcctgggggcaaagcggcgcaggccggagtggccgtgggtgactgggtgctgagcatcgatggcgagaatgcgggtagcctcacacacatcgaagctcagaacaagatccgggcctgcggggagcgcctcagcctgggcctcagcagggcccagccggttcagagcaaaccgcagaaggcctccgcccccgccgcggaccctccgcggtacacctttgcacccagcgtctccctcaacaagacggcccggccctttggggcgcccccgcccgctgacagcgccccgcagcagaatggacagccgctccgaccgctggtcccagatgccagcaagcagcggctgatggagaacacagaggactggcggccgcggccggggacaggccagtcgcgttccttccgcatccttgcccacctcacaggcaccgagttcatgcaagacccggatgaggagcacctgaagaaatcaagccaggtgcccaggacagaagccccagccccagcctcatctacaccccaggagccctggcctggccctaccgcccccagccctaccagccgcccgccctgggctgtggaccctgcgtttgccgagcgctatgccccggacaaaacgagcacagtgctgacccggcacagccagccggccacgcccacgccgctgcagagccgcacctccattgtgcaggcagctgccggaggggtgccaggagggggcagcaacaacggcaagactcccgtgtgtcaccagtgccacaaggtcatccggggccgctacctggtggcgctgggccacgcgtaccacccggaggagtttgtgtgtagccagtgtgggaaggtcctggaagagggtggcttctttgaggagaagggcgccatcttctgcccaccatgctatgacgtgcgctatgcacccagctgtgccaagtgcaagaagaagattacaggcgagatcatgcacgccctgaagatgacctggcacgtgcactgctttacctgtgctgcctgcaagacgcccatccggaacagggccttctacatggaggagggcgtgccctattgcgagcgagactatgagaagatgtttggcacgaaatgccatggctgtgacttcaagatcgacgctggggaccgcttcctggaggccctgggcttcagctggcatgacacctgcttcgtctgtgcgatatgtcagatcaacctggaaggaaagaccttctactccaagaaggacaggcctctctgcaagagccatgccttctctcatgtgtgagccccttctgcccacagctgccgcggtggcccctagcctgaggggcctggagtcgtggccctgcatttctgggtagggctggcaatggttgccttaaccctggctcctggcccgagcctggggctccctgggccctgccccacccaccttatcctcccaccccactccctccaccaccacagcacaccggtgctggccacaccagccccctttcacctccagtgccacaataaacctgtacccagctg

SEQ ID NO: 156214 - protein, 610 aa, Artificial Sequence
  derived and/or modified sequence
METAPKPGKDVPPKKDKLQTKRKKPRRYWEEETVPTTAGASPGPPRNKKNRELRPQRPKNAYILKKSRISKKPQVPKKPREWKNPESQRGLSGTQDPFPGPAPVPVEVVQKFCRIDKSRKLPHSKAKTRSRLEVAEAEEEETSIKAARSELLLAEEPGFLEGEDGEDTAKICQADIVEAVDIASAAKHFDLNLRQFGPYRLNYSRTGRHLAFGGRRGHVAALDWVTKKLMCEINVMEAVRDIRFLHSEALLAVAQNRWLHIYDNQGIELHCIRRCDRVTRLEFLPFHFLLATASETGFLTYLDVSVGKIVAALNARAGRLDVMSQNPYNAVIHLGHSNGTVSLWSPAMKEPLAKILCHRGGVRAVAVDSTGTYMATSGLDHQLKIFDLRGTYQPLSTRTLPHGAGHLAFSQRGLLVAGMGDVVNIWAGQGKASPPSLEQPYLTHRLSGPVHGLQFCPFEDVLGVGHTGGITSMLVPGAGEPNFDGLESNPYRSRKQRQEWEVKALLEKVPAELICLDPRALAEVDVISLEQGKKEQIERLGYDPQAKAPFQPKPKQKGRSSTASLVKRKRKVMDEEHRDKVRQSLQQQHHKEAKAKPTGARPSALDRFVR

SEQ ID NO: 156215 - protein, 610 aa, Artificial Sequence [sequence omitted]

SEQ ID NO: 156216 - protein, 322 aa, Artificial Sequence
  derived and/or modified sequence
KSRISKKPQVPKKPREWKNPESQRGLSGAQDPFPGPAPVPVEVVQKFCRIDKSRKLPHSKAKTRSRLEVAEAEEEETSIKAARSELLLAEEPGFLEGEDGEDTAKICQADIVEAVDIASAAKFGPYRLNYSRTGRHLAFGGRRGHVAALDWVTKKLMCEINVMEAVRDIRFLHSEALLAVAQNRWLHIYDNQGIELHCIRRCDRVTRLEFLPFHFLLATASETGFLTYLDVSVGKIVAALNARAGRLDVMSQNPYNAVIHLGHSNGTASLWSPAMKEPLAKILCHRGGVRAVAVDSTGTYMATSGLDHQLKIFDLRGTYQPL

SEQ ID NO: 156217 - protein, 610 aa, Artificial Sequence
  derived and/or modified sequence
METAPKPGKDVPPKKDKLQTKRKKPRRYWEEETVPTTAGASPGPPRNKKNRELRPQRPKNAYILKKSRISKKPQVPKKPREWKNPESQRGLSGAQDPFPGPAPVPVEVVQKFCRIDKSRKLPHSKAKTRSRLEVAEAEEEETSIKAARSELLLAEEPGFLEGEDGEDTAKICQADIVEAVDIASAAKHFDLNLRQFGPYRLNYSRTGRHLAFGGRRGHVAALDWVTKKLMCEINVMEAVRDIRFLHSEALLAVAQNRWLHIYDNQGIELHCIRRCDRVTRLEFLPFHFLLATASETGFLTYLDVSVGKIVAALNARAGRLDVMSQNPYNAVIHLGHSNGTVSLWSPAMKEPLAKILCHRGGVRAVAVDSTGTYMATSGLDHQLKIFDLRGTYQPLSTRTLPHGAGHLAFSQRGLLVAGMGDVVNIWAGQGKASPPSLEQPYLTHRLSGPVHGLQFCPFEDVLGVGHTGGITSMLVPGAGEPNFDGLESNPYRSRKQRQEWEVKALLEKVPAELICLDPRALAEVDVISLEQGKKEQIERLGYDPQAKAPFQPKPKQKGRSSTASLVKRKRKVMDEEHRDKVRQSLQQQHHKEAKAKPTGARPSALDRFVR

SEQ ID NO: 156218 - protein, 322 aa, Artificial Sequence
  derived and/or modified sequence
KSRISKKPQVPKKPREWKNPESQRGLSGAQDPFPGPAPVPVEVVQKFCRIDKSRKLPHSKAKTRSRLEVAEAEEEETSIKAARSELLLAEEPGFLEGEDGEDTAKICQADIVEAVDIASAAKFGPYRLNYSRTGRHLAFGGRRGHVAALDWVTKKLMCEINVMEAVRDIRFLHSEALLAVAQNRWLHIYDNQGIELHCIRRCDRVTRLEFLPFHFLLATASETGFLTYLDVSVGKIVAALNARAGRLDVMSQNPYNAVIHLGHSNGTVSLWSPAMKEPLAKILCHRGGVRAVAVDSTGTYMATSGLDHQLKIFDLRGTYQPL

SEQ ID NO: 156219 - protein, 322 aa, Artificial Sequence
  derived and/or modified sequence
KSRISKKPQVPKKPREWKNPESQRGLSGTQDPFPGPAPVPVEVVQKFCRIDKSRKLPHSKAKTRSRLEVAEAEEEETSIKAARSELLLAEEPGFLEGEDGEDTAKICQADIVEAVDIASAAKFGPYRLNYSRTGRHLAFGGRRGHVAALDWVTKKLMCEINVMEAVRDIRFLHSEALLAVAQNRWLHIYDNQGIELHCIRRCDRVTRLEFLPFHFLLATASETGFLTYLDVSVGKIVAALNARAGRLDVMSQNPYNAVIHLGHSNGTVSLWSPAMKEPLAKILCHRGGVRAVAVDSTGTYMATSGLDHQLKIFDLRGTYQPL

SEQ ID NO: 156220 - DNA, 1833 bp, Artificial Sequence
  derived and/or modified sequence
atggagaccgcccccaagcccggcaaggacgtgccccccaagaaggacaagctgcagaccaagagaaagaagcccagaagatactgggaggaggagaccgtgcccaccaccgccggcgccagccccggcccccccagaaacaagaagaacagagagctgagaccccagagacccaagaacgcctacatcctgaagaagagcagaatcagcaagaagccccaggtgcccaagaagcccagagagtggaagaaccccgagagccagagaggcctgagcggcacccaggaccccttccccggccccgcccccgtgcccgtggaggtggtgcagaagttctgcagaatcgacaagagcagaaagctgccccacagcaaggccaagaccagaagcagactggaggtggccgaggccgaggaggaggagaccagcatcaaggccgccagaagcgagctgctgctggccgaggagcccggcttcctggagggcgaggacggcgaggacaccgccaagatctgccaggccgacatcgtggaggccgtggacatcgccagcgccgccaagcacttcgacctgaacctgagacagttcggcccctacagactgaactacagcagaaccggcagacacctggccttcggcggcagaagaggccacgtggccgccctggactgggtgaccaagaagctgatgtgcgagatcaacgtgatggaggccgtgagagacatcagattcctgcacagcgaggccctgctggccgtggcccagaacagatggctgcacatctacgacaaccagggcatcgagctgcactgcatcagaagatgcgacagagtgaccagactggagttcctgcccttccacttcctgctggccaccgccagcgagaccggcttcctgacctacctggacgtgagcgtgggcaagatcgtggccgccctgaacgccagagccggcagactggacgtgatgagccagaacccctacaacgccgtgatccacctgggccacagcaacggcaccgtgagcctgtggagccccgccatgaaggagcccctggccaagatcctgtgccacagaggcggcgtgagagccgtggccgtggacagcaccggcacctacatggccaccagcggcctggaccaccagctgaagatcttcgacctgagaggcacctaccagcccctgagcaccagaaccctgccccacggcgccggccacctggccttcagccagagaggcctgctggtggccggcatgggcgacgtggtgaacatctgggccggccagggcaaggccagcccccccagcctggagcagccctacctgacccacagactgagcggccccgtgcacggcctgcagttctgccccttcgaggacgtgctgggcgtgggccacaccggcggcatcaccagcatgctggtgcccggcgccggcgagcccaacttcgacggcctggagagcaacccctacagaagcagaaagcagagacaggagtgggaggtgaaggccctgctggagaaggtgcccgccgagctgatctgcctggaccccagagccctggccgaggtggacgtgatcagcctggagcagggcaagaaggagcagatcgagagactgggctacgacccccaggccaaggcccccttccagcccaagcccaagcagaagggcagaagcagcaccgccagcctggtgaagagaaagagaaaggtgatggacgaggagcacagagacaaggtgagacagagcctgcagcagcagcaccacaaggaggccaaggccaagcccaccggcgccagacccagcgccctggacagattcgtgagatag

SEQ ID NO: 156221 - DNA, 1833 bp, Artificial Sequence
  derived and/or modified sequence
atggagaccgcccccaagcccggcaaggacgtgccccccaagaaggacaagctgcagaccaagagaaagaagcccagaagatactgggaggaggagaccgtgcccaccaccgccggcgccagccccggcccccccagaaacaagaagaacagagagctgagaccccagagacccaagaacgcctacatcctgaagaagagcagaatcagcaagaagccccaggtgcccaagaagcccagagagtggaagaaccccgagagccagagaggcctgagcggcgcccaggaccccttccccggccccgcccccgtgcccgtggaggtggtgcagaagttctgcagaatcgacaagagcagaaagctgccccacagcaaggccaagaccagaagcagactggaggtggccgaggccgaggaggaggagaccagcatcaaggccgccagaagcgagctgctgctggccgaggagcccggcttcctggagggcgaggacggcgaggacaccgccaagatctgccaggccgacatcgtggaggccgtggacatcgccagcgccgccaagcacttcgacctgaacctgagacagttcggcccctacagactgaactacagcagaaccggcagacacctggccttcggcggcagaagaggccacgtggccgccctggactgggtgaccaagaagctgatgtgcgagatcaacgtgatggaggccgtgagagacatcagattcctgcacagcgaggccctgctggccgtggcccagaacagatggctgcacatctacgacaaccagggcatcgagctgcactgcatcagaagatgcgacagagtgaccagactggagttcctgcccttccacttcctgctggccaccgccagcgagaccggcttcctgacctacctggacgtgagcgtgggcaagatcgtggccgccctgaacgccagagccggcagactggacgtgatgagccagaacccctacaacgccgtgatccacctgggccacagcaacggcaccgccagcctgtggagccccgccatgaaggagcccctggccaagatcctgtgccacagaggcggcgtgagagccgtggccgtggacagcaccggcacctacatggccaccagcggcctggaccaccagctgaagatcttcgacctgagaggcacctaccagcccctgagcaccagaaccctgccccacggcgccggccacctggccttcagccagagaggcctgctggtggccggcatgggcgacgtggtgaacatctgggccggccagggcaaggccagcccccccagcctggagcagccctacctgacccacagactgagcggccccgtgcacggcctgcagttctgccccttcgaggacgtgctgggcgtgggccacaccggcggcatcaccagcatgctggtgcccggcgccggcgagcccaacttcgacggcctggagagcaacccctacagaagcagaaagcagagacaggagtgggaggtgaaggccctgctggagaaggtgcccgccgagctgatctgcctggaccccagagccctggccgaggtggacgtgatcagcctggagcagggcaagaaggagcagatcgagagactgggctacgacccccaggccaaggcccccttccagcccaagcccaagcagaagggcagaagcagcaccgccagcctggtgaagagaaagagaaaggtgatggacgaggagcacagagacaaggtgagacagagcctgcagcagcagcaccacaaggaggccaaggccaagcccaccggcgccagacccagcgccctggacagattcgtgagatag

SEQ ID NO: 156222 - DNA, 969 bp, Artificial Sequence
  derived and/or modified sequence
aagagcagaatcagcaagaagccccaggtgcccaagaagcccagagagtggaagaaccccgagagccagagaggcctgagcggcgcccaggaccccttccccggccccgcccccgtgcccgtggaggtggtgcagaagttctgcagaatcgacaagagcagaaagctgccccacagcaaggccaagaccagaagcagactggaggtggccgaggccgaggaggaggagaccagcatcaaggccgccagaagcgagctgctgctggccgaggagcccggcttcctggagggcgaggacggcgaggacaccgccaagatctgccaggccgacatcgtggaggccgtggacatcgccagcgccgccaagttcggcccctacagactgaactacagcagaaccggcagacacctggccttcggcggcagaagaggccacgtggccgccctggactgggtgaccaagaagctgatgtgcgagatcaacgtgatggaggccgtgagagacatcagattcctgcacagcgaggccctgctggccgtggcccagaacagatggctgcacatctacgacaaccagggcatcgagctgcactgcatcagaagatgcgacagagtgaccagactggagttcctgcccttccacttcctgctggccaccgccagcgagaccggcttcctgacctacctggacgtgagcgtgggcaagatcgtggccgccctgaacgccagagccggcagactggacgtgatgagccagaacccctacaacgccgtgatccacctgggccacagcaacggcaccgccagcctgtggagccccgccatgaaggagcccctggccaagatcctgtgccacagaggcggcgtgagagccgtggccgtggacagcaccggcacctacatggccaccagcggcctggaccaccagctgaagatcttcgacctgagaggcacctaccagcccctgtag

SEQ ID NO: 156223 - DNA, 1833 bp, Artificial Sequence
  derived and/or modified sequence
atggagaccgcccccaagcccggcaaggacgtgccccccaagaaggacaagctgcagaccaagagaaagaagcccagaagatactgggaggaggagaccgtgcccaccaccgccggcgccagccccggcccccccagaaacaagaagaacagagagctgagaccccagagacccaagaacgcctacatcctgaagaagagcagaatcagcaagaagccccaggtgcccaagaagcccagagagtggaagaaccccgagagccagagaggcctgagcggcgcccaggaccccttccccggccccgcccccgtgcccgtggaggtggtgcagaagttctgcagaatcgacaagagcagaaagctgccccacagcaaggccaagaccagaagcagactggaggtggccgaggccgaggaggaggagaccagcatcaaggccgccagaagcgagctgctgctggccgaggagcccggcttcctggagggcgaggacggcgaggacaccgccaagatctgccaggccgacatcgtggaggccgtggacatcgccagcgccgccaagcacttcgacctgaacctgagacagttcggcccctacagactgaactacagcagaaccggcagacacctggccttcggcggcagaagaggccacgtggccgccctggactgggtgaccaagaagctgatgtgcgagatcaacgtgatggaggccgtgagagacatcagattcctgcacagcgaggccctgctggccgtggcccagaacagatggctgcacatctacgacaaccagggcatcgagctgcactgcatcagaagatgcgacagagtgaccagactggagttcctgcccttccacttcctgctggccaccgccagcgagaccggcttcctgacctacctggacgtgagcgtgggcaagatcgtggccgccctgaacgccagagccggcagactggacgtgatgagccagaacccctacaacgccgtgatccacctgggccacagcaacggcaccgtgagcctgtggagccccgccatgaaggagcccctggccaagatcctgtgccacagaggcggcgtgagagccgtggccgtggacagcaccggcacctacatggccaccagcggcctggaccaccagctgaagatcttcgacctgagaggcacctaccagcccctgagcaccagaaccctgccccacggcgccggccacctggccttcagccagagaggcctgctggtggccggcatgggcgacgtggtgaacatctgggccggccagggcaaggccagcccccccagcctggagcagccctacctgacccacagactgagcggccccgtgcacggcctgcagttctgccccttcgaggacgtgctgggcgtgggccacaccggcggcatcaccagcatgctggtgcccggcgccggcgagcccaacttcgacggcctggagagcaacccctacagaagcagaaagcagagacaggagtgggaggtgaaggccctgctggagaaggtgcccgccgagctgatctgcctggaccccagagccctggccgaggtggacgtgatcagcctggagcagggcaagaaggagcagatcgagagactgggctacgacccccaggccaaggcccccttccagcccaagcccaagcagaagggcagaagcagcaccgccagcctggtgaagagaaagagaaaggtgatggacgaggagcacagagacaaggtgagacagagcctgcagcagcagcaccacaaggaggccaaggccaagcccaccggcgccagacccagcgccctggacagattcgtgagatag

SEQ ID NO: 156224 - DNA, 969 bp, Artificial Sequence
  derived and/or modified sequence
aagagcagaatcagcaagaagccccaggtgcccaagaagcccagagagtggaagaaccccgagagccagagaggcctgagcggcgcccaggaccccttccccggccccgcccccgtgcccgtggaggtggtgcagaagttctgcagaatcgacaagagcagaaagctgccccacagcaaggccaagaccagaagcagactggaggtggccgaggccgaggaggaggagaccagcatcaaggccgccagaagcgagctgctgctggccgaggagcccggcttcctggagggcgaggacggcgaggacaccgccaagatctgccaggccgacatcgtggaggccgtggacatcgccagcgccgccaagttcggcccctacagactgaactacagcagaaccggcagacacctggccttcggcggcagaagaggccacgtggccgccctggactgggtgaccaagaagctgatgtgcgagatcaacgtgatggaggccgtgagagacatcagattcctgcacagcgaggccctgctggccgtggcccagaacagatggctgcacatctacgacaaccagggcatcgagctgcactgcatcagaagatgcgacagagtgaccagactggagttcctgcccttccacttcctgctggccaccgccagcgagaccggcttcctgacctacctggacgtgagcgtgggcaagatcgtggccgccctgaacgccagagccggcagactggacgtgatgagccagaacccctacaacgccgtgatccacctgggccacagcaacggcaccgtgagcctgtggagccccgccatgaaggagcccctggccaagatcctgtgccacagaggcggcgtgagagccgtggccgtggacagcaccggcacctacatggccaccagcggcctggaccaccagctgaagatcttcgacctgagaggcacctaccagcccctgtag

SEQ ID NO: 156225 - DNA, 969 bp, Artificial Sequence
  derived and/or modified sequence
aagagcagaatcagcaagaagccccaggtgcccaagaagcccagagagtggaagaaccccgagagccagagaggcctgagcggcacccaggaccccttccccggccccgcccccgtgcccgtggaggtggtgcagaagttctgcagaatcgacaagagcagaaagctgccccacagcaaggccaagaccagaagcagactggaggtggccgaggccgaggaggaggagaccagcatcaaggccgccagaagcgagctgctgctggccgaggagcccggcttcctggagggcgaggacggcgaggacaccgccaagatctgccaggccgacatcgtggaggccgtggacatcgccagcgccgccaagttcggcccctacagactgaactacagcagaaccggcagacacctggccttcggcggcagaagaggccacgtggccgccctggactgggtgaccaagaagctgatgtgcgagatcaacgtgatggaggccgtgagagacatcagattcctgcacagcgaggccctgctggccgtggcccagaacagatggctgcacatctacgacaaccagggcatcgagctgcactgcatcagaagatgcgacagagtgaccagactggagttcctgcccttccacttcctgctggccaccgccagcgagaccggcttcctgacctacctggacgtgagcgtgggcaagatcgtggccgccctgaacgccagagccggcagactggacgtgatgagccagaacccctacaacgccgtgatccacctgggccacagcaacggcaccgtgagcctgtggagccccgccatgaaggagcccctggccaagatcctgtgccacagaggcggcgtgagagccgtggccgtggacagcaccggcacctacatggccaccagcggcctggaccaccagctgaagatcttcgacctgagaggcacctaccagcccctgtag

SEQ ID NO: 156226 - DNA, 1833 bp, Artificial Sequence
  derived and/or modified sequence
atggagactgcccccaaaccgggcaaggatgtgcccccaaagaaagacaaactccaaactaagcgaaaaaagccgaggcggtactgggaggaggagaccgtccccaccaccgccggcgcctccccaggcccacctagaaacaagaagaacagggagcttcgcccccagcgtcccaaaaatgcatatatactgaaaaaatctcggatcagtaagaaaccacaagtccccaagaagccacgagaatggaagaatccagaaagccaacgggggctgtctggcacgcaggacccgttcccaggccctgctccagtgcctgtggaagtcgtgcagaagttttgccgcatcgacaaaagtcgcaagttaccacattccaaagctaaaacaaggtcaagattggaggtcgccgaggccgaggaagaagagaccagtatcaaggcggcccggtctgagcttctgctcgcggaagagcctgggttcctcgaaggagaagacggcgaagataccgccaaaatttgccaggccgacattgttgaggccgttgacatagcatccgccgccaagcacttcgacctaaaccttcgtcagttcggcccttaccggctcaattattcccggacgggcagacacttagcattcgggggcagaagaggtcacgtagccgctctggactgggttactaaaaagctgatgtgtgagatcaatgtgatggaggcggtgagggatatccggtttctccacagcgaggcactgctcgcagtggctcaaaataggtggttacacatttatgataaccaaggcatcgaactgcactgcattaggcgctgtgacagggttacccggcttgaattcctcccatttcattttctcctggcaacggcgagcgaaactggctttctgacctacctcgatgtgtccgtggggaaaatagtggccgctttaaacgctcgggccgggcggctcgatgtcatgagccagaacccgtacaacgctgttattcatctgggacacagtaacggcacggtctcactgtggtctcccgcaatgaaagagcctctggcaaagattctgtgccatcgcggaggcgtaagagccgttgccgtcgattccacaggtacatacatggccacctccggactagatcatcagctaaaaatattcgatctaaggggaacctaccagcccctctctacaaggactcttccgcatggggcaggccatctggcctttagtcagaggggtctattagtggccggcatgggtgacgttgtcaatatttgggcaggacagggcaaggccagcccaccttctctcgaacagccctaccttactcataggctaagcggaccagtgcacggcctccagttctgccccttcgaggatgtcctgggcgtgggacacactggcgggattacatccatgcttgtgcccggggcaggtgaacccaatttcgacggtctggagtcgaacccctaccggagcaggaagcagcgacaggagtgggaagtcaaagcgctcctcgagaaagtacctgcagaactgatctgtcttgaccctcgcgccctggccgaagttgatgttatcagtctggaacagggcaagaaagaacagattgaacgcctgggttacgatcctcaggctaaggccccattccagccaaagcctaagcagaaaggacgctctagtacggcctcgctggttaaacgcaagcggaaggtgatggatgaggagcatcgcgataaagtccgccagtctctgcaacagcaacaccacaaagaggccaaagcaaaacccactggcgcaaggccaagcgccctcgatagattcgttagatag

SEQ ID NO: 156227 - DNA, 1833 bp, Artificial Sequence
  derived and/or modified sequence
atggagactgcacccaaaccgggcaaggatgtgcctccaaagaaagacaagttgcagacgaaaagaaagaagcctcgtaggtattgggaggaagagactgtcccaacaaccgcaggagcctccccaggtccccctcgaaacaagaaaaacagggagctccgaccccagcggcctaaaaatgcctacattctcaagaagtcccgtatttccaaaaaaccccaggtcccaaagaagcctcgcgagtggaagaaccccgaaagccagagagggttgtctggcgctcaggatccatttcccggccctgccccagttcccgtcgaggtggttcaaaagttttgccggattgacaagtcacggaaactgccacactcaaaagccaagaccaggtcacggctcgaggtcgccgaggcagaggaggaggagacatctatcaaagcggcccgctctgaactacttttggctgaggagcccgggtttcttgagggggaggacggcgaggatactgctaaaatctgccaagccgacatcgtggaggccgtcgatatcgccagcgcggccaagcattttgatctgaacctgaggcaatttgggccctacagattgaactactctcgcactgggcggcatctggcatttggaggcagaagaggccacgtggctgccctggactgggtcacaaaaaagctgatgtgtgaaataaatgtgatggaggccgtgcgcgatatccggtttctccactcagaggcgcttttagccgtggcccaaaatcggtggctgcacatttatgataatcagggaatcgaactacattgtattagacggtgcgaccgcgtgacccgtcttgaattcctcccattccactttctgttagccaccgctagtgaaacaggcttccttacatatctggacgtgtccgtgggcaaaatagtagctgctttaaacgctcgcgccgggcgactggatgttatgagtcagaatccctacaatgccgtgattcatctggggcatagtaacgggaccgcctcactgtggagtcctgccatgaaggaaccactcgcgaagatcctgtgtcaccgcggcggcgtgcgggctgtggcagtcgattccacaggaacatacatggccacttccggactggatcaccaactgaaaatcttcgatctccgcggtacatatcaacccctgtctacccgtacactgcctcacggcgctggtcacttggcattctcacagcgcggcttgcttgtcgctggaatgggcgacgttgtaaacatctgggctggccaaggcaaagcatcccctcccagtctggaacaaccctatctcacacatcgactctcgggtccagtgcacgggctgcagttctgcccttttgaggacgttcttggtgtgggccacacaggtgggatcacatcaatgctggtgcccggcgcgggagagccaaatttcgacgggctcgagagtaatccttaccgcagtaggaaacagcgtcaggaatgggaagtgaaggccctcctcgagaaagtacccgcagaattgatctgtctcgatcctcgagccctcgctgaggtggacgttatttcactggagcagggcaaaaaggagcaaatcgaacgattgggctacgacccacaggcgaaggcaccttttcaacctaagcccaaacagaaaggacggagttctacagcgtcactagtcaagcggaagagaaaagtgatggacgaggaacatcgggataaggtgcgccagtccctgcagcagcagcaccacaaagaggccaaagccaaaccgacaggggctcgcccctccgccctagaccgattcgtacggtag

SEQ ID NO: 156228 - DNA, 969 bp, Artificial Sequence
  derived and/or modified sequence
aaaagtcgcatttctaagaagccacaggtgcccaaaaaacctagggagtggaagaaccccgagagccaaagagggctgtcaggggctcaagacccctttcctggtcctgctccagtccccgttgaggttgtgcagaagttttgtagaatcgacaagagtcgaaaactgccgcattcgaaggcaaaaaccaggtcccgcctagaggtggcggaagctgaagaagaggagacgtcaatcaaagcagcccgctctgaactactcctggcagaagagcctggtttcttggagggggaagacggagaagatactgctaaaatctgccaggccgacattgttgaagcagtggacatcgcatccgcagctaagttcgggccttaccggctcaattactcccgcaccggaagacatttagcgttcgggggaagaagagggcacgtcgccgcacttgactgggtaaccaagaagctgatgtgcgaaattaacgtgatggaggcggtgcgtgacattcgcttcttacacagtgaggctctgctcgccgttgcccagaacagatggctgcacatctatgataatcaggggattgaactgcactgtatcagacgctgtgacagagtgacccgccttgaatttctgccctttcactttctcctcgcaaccgcctcagaaacaggatttctgacctaccttgacgttagtgtcggcaagatcgtcgcggccctgaacgccagagctggccggttggacgtaatgagtcagaatccttataacgcagtgattcacctgggccactctaatggtactgcatccctttggagccccgcaatgaaggagcctcttgccaagattctctgccaccgagggggggtccgcgctgtggctgtggacagcacaggcacctatatggcaacaagcggactagaccaccagttgaaaatttttgatctccgcgggacgtaccaaccactgtag

SEQ ID NO: 156229 - DNA, 1833 bp, Artificial Sequence
  derived and/or modified sequence
atggagaccgcgccaaaaccgggaaaggatgtacctcccaagaaagataaactccagacgaagcgcaaaaagcccagacgatactgggaggaggagaccgtgccaacaaccgcaggagcgtccccaggcccaccacggaacaagaaaaatcgggagctcaggccgcagagacctaagaacgcctacatattgaaaaagagccggatatcaaaaaaacctcaggtgcctaagaagccccgcgagtggaagaatccagagtcgcagaggggcttgtccggggctcaggacccattccctggacctgcccctgtgccggtcgaagtcgtccagaagttctgcaggattgataagtctcggaagttgcctcactccaaagctaagaccaggtctagattggaagtggccgaggctgaagaagaagagacctcaatcaaggctgcccgctctgagctactgctggctgaggagcccgggttcctggaaggcgaggacggagaggacacagccaagatttgtcaggctgacatcgtagaagctgtggatattgcttccgcagctaaacatttcgatctgaatctccgacagttcggaccctatcgtctgaactacagcagaaccggccggcacctcgcctttggcggacggcggggtcacgtggccgcgttagattgggtgaccaaaaagcttatgtgcgaaattaacgtgatggaggcagtccgcgacattcgcttcctgcacagcgaggccctgctggccgttgctcagaacaggtggctgcacatctacgacaatcaaggcattgagcttcattgcattagacgctgtgaccgcgtaactagactggaatttctgcccttccatttcttactcgcgacagcaagcgaaacaggcttcctcacctacctggacgtttctgtgggaaagattgtggcggccctgaatgcacgtgccgggcggctggatgtgatgagccaaaatccttacaacgccgttatccacctgggtcacagcaacgggacggtgagcctgtggtcacctgcaatgaaagagccccttgctaagattctgtgccaccggggtggagtcagggctgtcgcagtggattccaccggtacctatatggccaccagcgggctggaccaccagctgaaaatctttgaccttcgtggcacctatcaacctttatcaacacggactttgccgcatggcgctggccacttggctttctcacagagagggcttcttgtggctggaatgggcgacgtagtgaatatttgggctggacagggaaaggcttcacctccttcattggaacaaccctaccttacacacaggctctccgggcccgtccatggcttacagttctgcccatttgaagacgtgttgggcgtgggacacacaggcggtatcacctcaatgctggtaccaggcgctggtgagccaaactttgatgggctcgagagcaatccctaccggtctagaaaacaacgccaagagtgggaggtcaaagcgctgttagaaaaggtgcctgccgagctcatctgtcttgacccacgtgccctggccgaggtggatgtaatatcgctggaacagggtaagaaggaacaaattgagcggctcggatatgacccccaggccaaagccccctttcaacccaaacccaagcagaagggcaggagttctacggcctccctggtgaagcggaagcggaaagtgatggatgaggaacacagagataaagtaagacaaagcctacagcagcaacaccataaagaggcaaaggcaaagcctactggagctcgccccagtgcgctggacaggttcgtaagatag

SEQ ID NO: 156230 - DNA, 1833 bp, Artificial Sequence
  derived and/or modified sequence
atggaaaccgcacccaagccagggaaagacgtcccacctaagaaggacaaattgcagactaaacgcaaaaagccacgacgttattgggaagaggaaaccgtcccgaccactgctggcgcaagccctggacccccgaggaataaaaaaaacagagaactgcgcccacagcggcctaaaaacgcttacatcctgaaaaagtctcggatttcaaagaaaccccaggtccctaaaaagccgagagaatggaaaaaccctgaatcccagcgcggcctgtctggtgcccaggacccatttcctggtccagctcctgtccccgtggaggtggtccagaaattctgcagaattgataagtcgaggaaacttccgcattctaaggcgaagactagatctcggcttgaagtcgccgaagcggaggaagaggaaacaagcattaaagcagcgcgtagcgaactgctacttgcggaggaacccggttttcttgagggagaggacggggaggataccgctaaaatctgccaggcagatattgtggaggcggtcgatattgcctccgccgccaagcactttgacttaaatctgcgacagttcggcccgtatcgactgaattactcacgcaccggacgtcacctggcttttggtgggcgaaggggtcacgtggcagccttggactgggtgaccaaaaaactgatgtgtgagataaatgtcatggaagctgtccgcgacatccgatttctccattcagaagccttgctcgctgtcgctcagaacagatggttgcacatttacgataaccaggggatcgagctgcactgcatacgtaggtgtgatagggtgacacggttagagtttctcccttttcattttttgctggcaactgcttccgagaccggcttcctgacctacctggatgtgtccgtcggaaagattgttgcagccctcaacgctcgcgccgggcgccttgacgttatgtcacagaacccctacaatgctgtgattcacctcgggcactccaacgggactgtgtctctgtggagtccagcgatgaaagagcctctagctaagatactttgtcataggggaggtgtgagggctgtagccgtggattccactggaacctatatggccaccagcggccttgatcatcagcttaaaattttcgatctccgtggaacttaccaacctctcagcacacggacactccctcatggtgcaggtcacctagctttttctcagaggggcttgttagtggcaggcatgggcgatgttgtcaacatttgggcaggccaagggaaggcttcacccccctcccttgagcagccttacttaactcacagactcagcgggcccgttcacggactccaattttgtcccttcgaggatgtactgggagtgggccatactggcgggatcactagcatgctagtcccaggcgcaggcgagcccaacttcgatgggctggagtccaacccataccgcagccggaaacagcgccaagagtgggaagtgaaagcgctgctagaaaaggtgcccgcggaactgatctgtctcgaccctagggccctggccgaagttgatgtgataagcttagaacagggcaagaaagaacaaatcgagcgtctgggttatgacccgcaggccaaagccccattccagcccaagcccaaacaaaaagggcgatcctctaccgcaagtctggtcaaacgcaaaaggaaggtaatggacgaagagcaccgtgacaaggtgaggcagtccctacagcaacaacaccataaagaggcgaaggctaagcccacgggtgcaagaccctcggccctagacagattcgtgcgatag

SEQ ID NO: 156231 - DNA, 969 bp, Artificial Sequence
  derived and/or modified sequence
aagtcacgcatcagtaagaaaccgcaagtgcccaaaaagcctcgcgaatggaaaaaccccgagtcccagcgaggcctcagtggggcacaggatccgttccccggccctgcgcctgtgccagtggaagtagtccaaaagttttgcagaatcgataagtccagaaagttgccacatagtaaggctaagactagatctaggcttgaggtcgctgaagcagaagaggaggagacctctatcaaggcagccaggtccgagttgctgctagccgaagaaccaggtttcctggagggggaagacggcgaggatacggccaaaatatgccaggcagatattgtggaggccgttgatatcgcttccgccgccaaatttggcccttaccgtttgaattatagccggaccgggcgacacctcgcctttggggggcgacgcggacatgttgcagccttggactgggtgaccaagaagctgatgtgtgagattaatgtcatggaggctgtaagggacatcagattcctgcactcggaggctctgcttgcagttgctcagaaccgctggttgcacatatatgacaaccagggcatcgagctgcactgtatcaggaggtgcgatcgcgttacccgcctggagtttttgcctttccatttcttgctcgctaccgccagcgagaccggctttctgacctatttggacgtgtcggtgggcaagattgtcgccgcactgaacgctagggcaggccgcctggatgtgatgagccagaacccatataatgccgtgatacacctgggtcacagcaacggcacagtgagcctctggtcgcccgctatgaaggagcccttagccaagatcttatgccatagaggcggagtcagagccgtcgcagtagattctacaggtacctatatggctacatcagggcttgaccaccagctcaaaatcttcgatctcagaggcacgtaccagcccctgtag

SEQ ID NO: 156232 - DNA, 969 bp, Artificial Sequence
  derived and/or modified sequence
aagagtcgcatctccaagaagccccaagtgccaaagaaacctagggagtggaaaaatccagagtcgcagagagggcttagtggcacccaggacccattcccagggcccgctccggtgcccgtggaagtggttcaaaagttctgtaggatcgataaatctcgcaagctgccccactcaaaagcaaagactcggtccagactggaagttgcagaggccgaggaagaagaaacctctatcaaggccgctagaagcgagctgctgctggctgaggagcctggtttcctggagggcgaggacggcgaagacacggccaaaatttgtcaagcagatatcgtggaggccgtggacattgcgagtgccgcaaagttcggcccctatcggctcaactactcaagaaccggcaggcacctggcgttcggcggaagaagaggccacgtggcagcgcttgattgggtgacaaagaaactcatgtgcgaaattaatgtaatggaggccgttagagatattcggttcctgcactcagaggctctcttggctgtagcgcagaataggtggctgcacatttatgacaatcaaggaatcgaactccattgcatacgcaggtgcgatagagtgacccgcctggagtttcttccctttcattttctgctcgctaccgccagtgagaccggattcttgacgtacctggacgtttctgtgggcaaaatcgtcgcagctctgaacgctcgggcgggcagactggacgtgatgtcacagaatccttataacgctgtgatccatctcggacacagtaatggaaccgtaagcctttggagtccggccatgaaggagcccctggccaagatcctctgtcacagaggaggcgtgagggctgtcgcagtggacagtacgggtacttacatggctacaagcggactcgatcaccaactgaagattttcgacctgcgaggtacctatcagcctctgtag

SEQ ID NO: 156233 - DNA, 969 bp, Artificial Sequence
  derived and/or modified sequence
aaaagccgcatatccaagaaaccccaggtgccgaaaaagccaagggagtggaagaatcccgaaagtcagaggggcctcagtggcgcccaggaccctttcccaggaccagcccccgtgcccgtggaggtggtgcagaagttttgcagaatcgataaatcaagaaaactgcctcactcaaaagccaagacaaggtctaggctcgaggtggcagaagctgaggaggaggagacgtcgatcaaggctgctaggtccgaattgctgcttgccgaggagccggggttcttggaaggtgaggatggcgaagatactgccaagatttgccaggccgatatagtggaggctgtggatatcgcctctgcagcaaagtttggaccttataggctaaattattctagaactggaagacacctcgcatttgggggtaggaggggccacgttgccgcactggactgggtgaccaaaaagctcatgtgcgaaatcaatgtcatggaggctgtccgtgacatcagatttctgcattccgaggcactactggcggttgctcaaaaccgatggctacacatctacgataatcagggaatagagttgcactgtattcgaagatgtgacagagtcactagattggaatttttacccttccatttcctgcttgccacagcctccgaaacgggctttcttacctatctggacgttagcgttggaaaaattgtggccgccctcaacgccagggctggacggctggatgtaatgtctcagaacccctataatgccgtcatccacctaggccattccaatgggacggtgtctctgtggtcgcccgcaatgaaggagccgctggcgaagatcttgtgtcatcggggcggggttcgcgccgtagcagtggattcgacaggcacatacatggctacctcaggtctcgatcatcagctcaaaatctttgacctacgtggtacctatcaaccgctgtag

SEQ ID NO: 156234 - DNA, 969 bp, Artificial Sequence
  derived and/or modified sequence
aaaagccggatttcgaaaaagccacaagtacccaaaaaaccccgggagtggaaaaacccggaaagccagaggggtttatcgggtgcgcaggaccccttccctggccctgcccctgttccagtcgaggtggtgcagaagttctgccggatcgacaagagccgcaaattgcctcatagcaaggccaagaccagaagccgacttgaagtggccgaggctgaagaggaggagaccagcatcaaagccgccaggtcggaattgttattagctgaggaacccggatttctcgaaggggaagacggagaagacaccgccaagatctgtcaggctgacatcgtcgaggccgtggacattgcaagtgctgcaaagttcggcccatataggcttaattacagtcgcacaggccgtcatctggccttcgggggtcggcggggacatgtggccgcactggattgggtgaccaaaaagctcatgtgtgaaataaacgtaatggaggcagtgagagatatcaggtttttacacagtgaggcgctcctggcagtcgcacagaacagatggctacacatttacgacaaccagggcatagaactgcattgtatccgccgctgtgatcgggtgacacgcttagagttcttgccatttcattttcttcttgcaacggcctcagagaccggctttttgacctatctggatgtcagcgtcggcaaaatcgtggcagccctgaacgcgagagccgggcggcttgacgtcatgtcccaaaacccctacaatgcagtaatccatctgggacattcgaatggtactgtgtcactctggagccccgccatgaaggaacctctggcgaaaatcctgtgccatagagggggagtgcgggctgtggcagtggacagcacaggaacgtatatggctaccagtgggctcgaccaccaattgaagattttcgacctgcgcggcacatatcaaccgctgtag

SEQ ID NO: 156235 - DNA, 1833 bp, Artificial Sequence
  derived and/or modified sequence
atggagacggcaccaaaacccgggaaggacgttccgcccaaaaaagataaactgcagactaaacgtaagaagcccagaaggtactgggaggaggagactgtgccaacaaccgccggagcatctccaggacccccacggaataagaagaatagggaattgcgaccgcagagacccaaaaatgcttatatcttgaaaaaatcacgcatttctaagaagccccaggttcccaagaagccaagggagtggaagaacccagaatctcagcgggggctgtctggcgcccaagacccttttcccggacctgctccagttcctgtggaggttgtacaaaaattctgtcgcattgacaagtccaggaagctgccccatagcaaagctaagacaaggtctaggctcgaggtagctgaggcagaagaagaggagacttctataaaggcggcccggtcagagttgctgctggcagaagagcctggcttcctcgagggcgaggatggcgaagatacggcgaagatttgtcaggccgacatagtggaggccgttgatattgctagtgccgcaaagcactttgaccttaacctgagacagttcggaccctatcggctgaactattctcggaccggtagacatctggccttcggtggtagaaggggccacgtggctgcactggactgggtgacaaagaagcttatgtgcgaaatcaacgtcatggaggctgtgcgagacataaggtttttacatagcgaagcccttcttgccgtggcccagaacaggtggctgcatatttatgacaatcaggggattgagttgcattgtataagacgctgtgacagagtcactcggctagagtttttgcctttccactttttgctggcaacagcgtccgaaactggctttttgacatatctcgacgtgtcagtgggaaaaatcgttgccgctctcaacgcaagggccggtcggttagacgtgatgtcccagaatccatataacgccgtcattcacctgggacacagcaacggcacagtgagcctctggtctccggccatgaaggaaccgctggcgaagatactctgccaccggggcggagttcgggccgtcgccgtcgacagtacaggtacatacatggcgacaagcgggctcgatcaccagctcaaaatatttgatctccggggcacataccagccgcttagcacacggactctaccgcacggagccggccacctagccttcagccagcgcggccttttggtcgccgggatgggggacgttgtgaacatctgggctgggcaaggtaaggcaagccccccttctttggaacaaccctatctgactcatcgcctctccggtccagtccatggtctgcagttctgtccttttgaggacgtccttggggtgggccatacaggtggcattacctccatgctggtgccgggggccggtgaaccaaattttgacggcctcgaaagtaacccttacagaagtcggaaacagcgccaggaatgggaggtcaaagcactgctcgagaaggtgcctgccgagttaatctgcctggaccctcgcgccctcgcagaagtggacgtgatctccctggagcaaggcaaaaaagagcagattgaaagactgggttatgatccacaggctaaagctcctttccagccaaaacctaagcaaaagggtaggagtagcacagcctctcttgtgaaaaggaagagaaaggtcatggacgaggagcacagggacaaggtgcgtcagagtcttcagcagcagcatcataaggaggccaaggcgaagcctacaggcgcgcgtcctagcgcgctggaccgcttcgtgcggtag

SEQ ID NO: 156236 - DNA, 1833 bp, Artificial Sequence
  derived and/or modified sequence
atggagacagcccccaagccaggcaaggatgtgccccccaagaaggacaagctgcagaccaagaggaagaagccccggcgctactgggaggaggagaccgtgcccaccacagctggggccagccctggcccccccaggaacaagaagaaccgggagctgcggccccagaggcccaagaatgcctacatcctgaagaagagccgcatcagcaagaagccccaggtgcccaagaagccccgggagtggaagaaccctgagagccagaggggcctgagcggcacccaggaccccttccctggccctgcccctgtgcctgtggaggtggtgcagaagttctgcagaattgacaagagcaggaagctgccccacagcaaggccaagaccaggagccggctggaggtggccgaggccgaggaggaggagaccagcatcaaggccgcccggtctgagctgctgctggccgaggagcccggcttcctggagggagaagatggagaggacacagccaagatctgccaggccgacatcgtggaggccgtggacatcgccagcgctgccaagcactttgacctgaacctgcggcagtttggcccctaccgcctgaactacagcaggacaggccgccacctggccttcggcggcagaagaggccacgtggccgccctggactgggtgaccaagaagctgatgtgtgagatcaacgtgatggaggccgtgcgggacatccgcttcctgcacagcgaggccctgctggccgtggcccagaaccgctggctgcacatctatgacaaccagggcatcgagctgcactgcatcagaagatgtgacagagtgacccggctggagttcctgcccttccacttcctgctggccacagccagcgagaccggcttcctgacctacctggatgtgtctgtgggcaagatcgtggccgccctgaatgcccgggccggccgcctggatgtgatgagccagaacccctacaatgctgtgatccacctgggccacagcaatggcaccgtgtccctgtggagccctgccatgaaggagcccctggccaagatcctgtgccaccggggcggcgtgcgggctgtggccgtggacagcacaggcacctacatggccaccagcggcctggaccaccagctgaagatctttgacctgcggggcacctaccagcccctgagcaccaggaccctgccccacggggccggccacctggccttcagccagaggggcctgctggtggccggcatgggagatgtggtgaacatctgggccggccagggcaaggccagcccccccagcctggagcagccctacctgacccaccggctgagcggccctgtgcacggcctgcagttctgcccctttgaagatgtgctgggcgtgggccacactggaggcatcacctccatgctggtgcctggggccggggagcccaactttgatggcctggagagcaacccctaccgcagcaggaagcagaggcaggagtgggaggtgaaggccctgctggagaaggtgcctgctgagctgatctgcctggacccccgggccctggccgaggtggatgtgatcagcctggagcagggcaagaaggagcagatcgagcggctgggctatgacccccaggccaaggcccccttccagcccaagcccaagcagaagggccgcagcagcacagccagcctggtgaagaggaagaggaaggtgatggatgaggagcaccgggacaaggtgcggcagagcctgcagcagcagcaccacaaggaggccaaggccaagcccaccggggcccggcccagcgccctggacagatttgtgaggtag

SEQ ID NO: 156237 - DNA, 1833 bp, Artificial Sequence
  derived and/or modified sequence
atggagacagcccccaagccaggcaaggatgtgccccccaagaaggacaagctgcagaccaagaggaagaagccccggcgctactgggaggaggagaccgtgcccaccacagctggggccagccctggcccccccaggaacaagaagaaccgggagctgcggccccagaggcccaagaatgcctacatcctgaagaagagccgcatcagcaagaagccccaggtgcccaagaagccccgggagtggaagaaccctgagagccagaggggcctgagcggggcccaggaccccttccctggccctgcccctgtgcctgtggaggtggtgcagaagttctgcagaattgacaagagcaggaagctgccccacagcaaggccaagaccaggagccggctggaggtggccgaggccgaggaggaggagaccagcatcaaggccgcccggtctgagctgctgctggccgaggagcccggcttcctggagggagaagatggagaggacacagccaagatctgccaggccgacatcgtggaggccgtggacatcgccagcgctgccaagcactttgacctgaacctgcggcagtttggcccctaccgcctgaactacagcaggacaggccgccacctggccttcggcggcagaagaggccacgtggccgccctggactgggtgaccaagaagctgatgtgtgagatcaacgtgatggaggccgtgcgggacatccgcttcctgcacagcgaggccctgctggccgtggcccagaaccgctggctgcacatctatgacaaccagggcatcgagctgcactgcatcagaagatgtgacagagtgacccggctggagttcctgcccttccacttcctgctggccacagccagcgagaccggcttcctgacctacctggatgtgtctgtgggcaagatcgtggccgccctgaatgcccgggccggccgcctggatgtgatgagccagaacccctacaatgctgtgatccacctgggccacagcaatggaacagccagcctgtggagccctgccatgaaggagcccctggccaagatcctgtgccaccggggcggcgtgcgggctgtggccgtggacagcacaggcacctacatggccaccagcggcctggaccaccagctgaagatctttgacctgcggggcacctaccagcccctgagcaccaggaccctgccccacggggccggccacctggccttcagccagaggggcctgctggtggccggcatgggagatgtggtgaacatctgggccggccagggcaaggccagcccccccagcctggagcagccctacctgacccaccggctgagcggccctgtgcacggcctgcagttctgcccctttgaagatgtgctgggcgtgggccacactggaggcatcacctccatgctggtgcctggggccggggagcccaactttgatggcctggagagcaacccctaccgcagcaggaagcagaggcaggagtgggaggtgaaggccctgctggagaaggtgcctgctgagctgatctgcctggacccccgggccctggccgaggtggatgtgatcagcctggagcagggcaagaaggagcagatcgagcggctgggctatgacccccaggccaaggcccccttccagcccaagcccaagcagaagggccgcagcagcacagccagcctggtgaagaggaagaggaaggtgatggatgaggagcaccgggacaaggtgcggcagagcctgcagcagcagcaccacaaggaggccaaggccaagcccaccggggcccggcccagcgccctggacagatttgtgaggtag

SEQ ID NO: 156238 - DNA, 969 bp, Artificial Sequence
  derived and/or modified sequence
aagagccgcatcagcaagaagccccaggtgcccaagaagccccgggagtggaagaaccctgagagccagaggggcctgagcggggcccaggaccccttccctggccctgcccctgtgcctgtggaggtggtgcagaagttctgcagaattgacaagagcaggaagctgccccacagcaaggccaagaccaggagccggctggaggtggccgaggccgaggaggaggagaccagcatcaaggccgcccggtctgagctgctgctggccgaggagcccggcttcctggagggggaggatggagaggacacagccaagatctgccaggccgacatcgtggaggccgtggacatcgccagcgctgccaagtttggcccctaccgcctgaactacagcaggacaggccgccacctggcctttggaggccggcggggccacgtggccgccctggactgggtgaccaagaagctgatgtgtgagatcaacgtgatggaggccgtgcgggacatccgcttcctgcacagcgaggccctgctggccgtggcccagaaccgctggctgcacatctatgacaaccagggcatcgagctgcactgcatccgccgctgtgacagagtgacccggctggagttcctgcccttccacttcctgctggccacagccagcgagaccggcttcctgacctacctggatgtgtctgtgggcaagatcgtggccgccctgaatgcccgggccggccgcctggatgtgatgagccagaacccctacaatgctgtgatccacctgggccacagcaatggaacagccagcctgtggagccctgccatgaaggagcccctggccaagatcctgtgccacagaggaggagtgcgggctgtggccgtggacagcacaggcacctacatggccaccagcggcctggaccaccagctgaagatctttgacctgcggggcacctaccagcccctgtag

SEQ ID NO: 156239 - DNA, 1833 bp, Artificial Sequence
  derived and/or modified sequence
atggagacagcccccaagccaggcaaggatgtgccccccaagaaggacaagctgcagaccaagaggaagaagccccggcgctactgggaggaggagaccgtgcccaccacagctggggccagccctggcccccccaggaacaagaagaaccgggagctgcggccccagaggcccaagaatgcctacatcctgaagaagagccgcatcagcaagaagccccaggtgcccaagaagccccgggagtggaagaaccctgagagccagaggggcctgagcggggcccaggaccccttccctggccctgcccctgtgcctgtggaggtggtgcagaagttctgcagaattgacaagagcaggaagctgccccacagcaaggccaagaccaggagccggctggaggtggccgaggccgaggaggaggagaccagcatcaaggccgcccggtctgagctgctgctggccgaggagcccggcttcctggagggagaagatggagaggacacagccaagatctgccaggccgacatcgtggaggccgtggacatcgccagcgctgccaagcactttgacctgaacctgcggcagtttggcccctaccgcctgaactacagcaggacaggccgccacctggccttcggcggcagaagaggccacgtggccgccctggactgggtgaccaagaagctgatgtgtgagatcaacgtgatggaggccgtgcgggacatccgcttcctgcacagcgaggccctgctggccgtggcccagaaccgctggctgcacatctatgacaaccagggcatcgagctgcactgcatcagaagatgtgacagagtgacccggctggagttcctgcccttccacttcctgctggccacagccagcgagaccggcttcctgacctacctggatgtgtctgtgggcaagatcgtggccgccctgaatgcccgggccggccgcctggatgtgatgagccagaacccctacaatgctgtgatccacctgggccacagcaatggcaccgtgtccctgtggagccctgccatgaaggagcccctggccaagatcctgtgccaccggggcggcgtgcgggctgtggccgtggacagcacaggcacctacatggccaccagcggcctggaccaccagctgaagatctttgacctgcggggcacctaccagcccctgagcaccaggaccctgccccacggggccggccacctggccttcagccagaggggcctgctggtggccggcatgggagatgtggtgaacatctgggccggccagggcaaggccagcccccccagcctggagcagccctacctgacccaccggctgagcggccctgtgcacggcctgcagttctgcccctttgaagatgtgctgggcgtgggccacactggaggcatcacctccatgctggtgcctggggccggggagcccaactttgatggcctggagagcaacccctaccgcagcaggaagcagaggcaggagtgggaggtgaaggccctgctggagaaggtgcctgctgagctgatctgcctggacccccgggccctggccgaggtggatgtgatcagcctggagcagggcaagaaggagcagatcgagcggctgggctatgacccccaggccaaggcccccttccagcccaagcccaagcagaagggccgcagcagcacagccagcctggtgaagaggaagaggaaggtgatggatgaggagcaccgggacaaggtgcggcagagcctgcagcagcagcaccacaaggaggccaaggccaagcccaccggggcccggcccagcgccctggacagatttgtgaggtag

SEQ ID NO: 156240 - DNA, 969 bp, Artificial Sequence
  derived and/or modified sequence
aagagccgcatcagcaagaagccccaggtgcccaagaagccccgggagtggaagaaccctgagagccagaggggcctgagcggggcccaggaccccttccctggccctgcccctgtgcctgtggaggtggtgcagaagttctgcagaattgacaagagcaggaagctgccccacagcaaggccaagaccaggagccggctggaggtggccgaggccgaggaggaggagaccagcatcaaggccgcccggtctgagctgctgctggccgaggagcccggcttcctggagggggaggatggagaggacacagccaagatctgccaggccgacatcgtggaggccgtggacatcgccagcgctgccaagtttggcccctaccgcctgaactacagcaggacaggccgccacctggcctttggaggccggcggggccacgtggccgccctggactgggtgaccaagaagctgatgtgtgagatcaacgtgatggaggccgtgcgggacatccgcttcctgcacagcgaggccctgctggccgtggcccagaaccgctggctgcacatctatgacaaccagggcatcgagctgcactgcatccgccgctgtgacagagtgacccggctggagttcctgcccttccacttcctgctggccacagccagcgagaccggcttcctgacctacctggatgtgtctgtgggcaagatcgtggccgccctgaatgcccgggccggccgcctggatgtgatgagccagaacccctacaatgctgtgatccacctgggccacagcaatggaacagtgtccctgtggagccctgccatgaaggagcccctggccaagatcctgtgccacagaggaggagtgcgggctgtggccgtggacagcacaggcacctacatggccaccagcggcctggaccaccagctgaagatctttgacctgcggggcacctaccagcccctgtag

SEQ ID NO: 156241 - DNA, 969 bp, Artificial Sequence
  derived and/or modified sequence
aagagccgcatcagcaagaagccccaggtgcccaagaagccccgggagtggaagaaccctgagagccagaggggcctgagcggcacccaggaccccttccctggccctgcccctgtgcctgtggaggtggtgcagaagttctgcagaattgacaagagcaggaagctgccccacagcaaggccaagaccaggagccggctggaggtggccgaggccgaggaggaggagaccagcatcaaggccgcccggtctgagctgctgctggccgaggagcccggcttcctggagggggaggatggagaggacacagccaagatctgccaggccgacatcgtggaggccgtggacatcgccagcgctgccaagtttggcccctaccgcctgaactacagcaggacaggccgccacctggcctttggaggccggcggggccacgtggccgccctggactgggtgaccaagaagctgatgtgtgagatcaacgtgatggaggccgtgcgggacatccgcttcctgcacagcgaggccctgctggccgtggcccagaaccgctggctgcacatctatgacaaccagggcatcgagctgcactgcatccgccgctgtgacagagtgacccggctggagttcctgcccttccacttcctgctggccacagccagcgagaccggcttcctgacctacctggatgtgtctgtgggcaagatcgtggccgccctgaatgcccgggccggccgcctggatgtgatgagccagaacccctacaatgctgtgatccacctgggccacagcaatggaacagtgtccctgtggagccctgccatgaaggagcccctggccaagatcctgtgccacagaggaggagtgcgggctgtggccgtggacagcacaggcacctacatggccaccagcggcctggaccaccagctgaagatctttgacctgcggggcacctaccagcccctgtag

SEQ ID NO: 156242 - DNA, 1833 bp, Artificial Sequence
  derived and/or modified sequence
atggagaccgcccccaagcccggcaaggacgtgccccccaagaaggataaactccaaacgaagagaaagaaacctcgccgttactgggaggaagaaacagtgccgactactgccggggccagtcccgggccccccaggaataaaaagaatagggaattaaggccccaaaggcctaaaaacgcgtatatactgaagaaatcaaggatttccaagaaaccgcaggttcccaagaagccccgcgagtggaaaaaccctgaatcacagcgcggcctctccgggacacaggacccatttccaggacctgcgcccgtacccgttgaggtagtccagaaattttgtcggatcgataagtcacgtaagctcccccacagtaaagccaagacccggtctagactggaggttgctgaggccgaagaggaagagacaagcattaaggccgcccgctccgaactgctgctcgcagaagagcccgggtttctcgagggggaggacggggaggatactgcaaaaatttgtcaggctgatatcgtcgaggccgttgacatcgcaagcgccgcgaagcattttgatttgaatttgaggcaattcggcccctatcgcttgaattactcaagaaccggccggcacttagcctttggaggacgccgagggcatgtggcagcgctggattgggtgacgaagaagttgatgtgtgagattaatgtcatggaggctgttcgggacataaggttcctgcactctgaagccctgctagcagtggcgcagaaccgctggttgcatatctatgataaccagggcatcgagctgcattgtattagacgttgtgaccgggtgaccagactggaatttcttccgtttcactttttattagccacagcgtctgagacgggctttctcacatatctggatgtctcagtggggaagatcgtggctgccctgaatgcccgtgccggccgattggatgtgatgtcacagaacccttataatgccgtgattcaccttggacacagtaatgggacagtcagcctttggagccctgcgatgaaggaacctttagccaaaattctgtgtcatcgggggggagtccgagcagtcgccgtagactctaccggcacatacatggctacaagcgggctcgatcaccaactgaaaatttttgatctgcgcggtacttaccagcccctgtccactcgaaccttgccacatggcgcaggccatctcgcattctcccagaggggcttgctagtcgccggaatgggggacgtcgtcaacatttgggctggtcagggaaaagccagcccacctagcctggagcagccctacttgactcaccgcttatcgggtccagtgcacggcctgcaattttgcccgtttgaggacgttcttggggtcggacacactggaggaattactagtatgctcgtgccaggggccggagagcctaattttgatggattggaaagtaatccgtacaggtcccgaaagcaacgacaggagtgggaggtgaaagccctgctggagaaggtgcccgccgagcttatctgtctcgaccctcgggccctcgccgaggtcgatgtgattagtctggagcaaggcaaaaaggagcagatcgaaagactgggatacgatcctcaggccaaggccccttttcaacccaagcctaagcaaaaagggaggagttccacagccagcctggtgaaacggaaacgcaaggtgatggatgaagagcaccgggataaggtacggcagtcactgcaacagcagcatcacaaagaagcaaaagccaagccaacaggggcacggcccagtgccctcgaccgctttgtgcgatag

SEQ ID NO: 156243 - DNA, 1833 bp, Artificial Sequence
  derived and/or modified sequence
atggagaccgcccccaagcccggcaaggacgtgccccccaagaaggacaagctccaaaccaaacggaaaaaacctcgccgatactgggaagaggagacagtgcctacaaccgcgggagctagcccgggaccaccaaggaacaagaagaatcgcgagctcaggccacaaagaccaaaaaacgcgtatatcttgaagaagagcagaatttcaaagaagcctcaggtgcccaaaaaaccgagagaatggaagaacccagagagccaaaggggtctttccggggcccaggacccgttccccggtcccgccccagtgcccgtggaggtcgtgcaaaagttttgtcggatcgacaagtcccggaaactgccccacagcaaagccaagaccagaagccgcctggaggtggctgaggcagaggaggaagagaccagcatcaaggctgctcggagcgagctcctgctcgccgaagagcccggttttttggagggcgaggatggggaggatactgcaaagatatgccaagcagacattgtcgaagccgtggacatagcctccgcggcaaagcacttcgacctgaacctacggcagttcgggccttacagactgaattattctcgaacagggcgccatctggctttcggcggcaggcggggtcacgtagccgctctggactgggtgaccaaaaaactaatgtgcgaaatcaatgtgatggaggccgtgcgcgatatacggttcctgcactccgaggcactgttggctgtggctcagaacagatggttgcacatctatgataaccaaggcattgagctacattgcatcaggagatgtgacagggtcacacgcttggaatttctcccttttcattttctgttggctaccgccagcgagactggatttcttacatatctggatgtgtccgtcggcaagatcgttgctgccctgaacgcccgcgctggtagactggacgtgatgagccagaatccttacaacgcagtgattcacctaggacacagcaatggtactgcaagcctgtggtcccccgcaatgaaggagcccctcgcgaaaatcctgtgccatcggggcggtgtgagagccgttgccgttgacagtactgggacttacatggcgacttccgggctggaccatcagctgaaaatcttcgacctaagaggaacataccaaccactatctacccggacactgccccacggggcgggccatctggcatttagccaaagggggttgcttgttgccggaatgggcgatgttgtgaacatatgggcaggtcaggggaaggcatcacccccctccctggagcagccctacctcacccacaggctatccggccccgtgcatggtttgcaattctgcccctttgaggatgtgctgggcgtgggccacaccgggggaatcaccagcatgttggttccgggcgccggagagcctaactttgatgggctggagtccaacccatatcgaagccggaagcagaggcaagagtgggaagtaaaggccctgctcgaaaaggtgccagccgaattgatttgcctcgacccaagagctttagccgaggttgatgtcattagcctggaacaaggaaagaaggagcagatcgagcgcctggggtacgacccccaggccaaagcaccattccaacccaagcccaagcagaagggtcggagtagcacggcctccctcgtcaagcgcaagagaaaggtcatggacgaggagcaccgggacaaggttagacagtcattgcagcagcagcatcacaaggaagcaaaagcgaagcccactggcgcccggccctctgccttggataggttcgttcggtag

SEQ ID NO: 156244 - DNA, 969 bp, Artificial Sequence
  derived and/or modified sequence
aagagccggatcagcaagaagccccaggtgcccaagaagccccgggagtggaaaaaccctgaaagccaacggggactgtccggcgcccaggacccctttcccgggccagcccccgtcccagtggaggtggtgcagaaattctgccggattgacaaaagccggaaactgccccacagcaaagcgaagacccgaagtcgccttgaggtcgcggaggccgaggaggaagagaccagcatcaaggccgcacgctcagagctgctcctagctgaagagccaggttttctagaaggggaagacggcgaggacaccgcaaaaatctgccaggccgacattgtcgaggcagtcgacattgcttctgccgctaagttcggaccctaccgtctaaactactctagaactggacgccatctcgcgtttggtggaaggcgcggtcatgtggccgccttggattgggtgacaaagaagctcatgtgcgagatcaacgtaatggaagctgtccgcgacatcaggttccttcactcagaggcgctcctggctgtcgcacagaatcgctggctgcatatttatgacaaccagggaattgagttacattgcatccggcgttgcgaccgtgtcacacgcctcgagtttctaccctttcacttcctgcttgccactgcatcagagaccggcttccttacctaccttgatgtcagcgtgggaaaaatcgtggccgcactgaacgcgagagcagggcgtctcgatgtaatgagtcaaaatccgtataacgccgtgattcatctgggtcactctaatggcactgcttccctgtggtcccccgccatgaaagagcccttggccaaaatactctgccataggggtggggtacgtgctgtggcagtggactcaaccggaacctatatggcaactagtggtcttgatcaccagctcaaaatttttgatttgagagggacctaccagcccttgtag

SEQ ID NO: 156245 - DNA, 1833 bp, Artificial Sequence
  derived and/or modified sequence
atggagaccgcccccaagcccggcaaggacgtgccccccaagaaggacaaacttcaaaccaagagaaaaaagccacgccgctactgggaggaagagacggttccaacgaccgcgggggcctcacccgggcctcctaggaataaaaagaacagggagctcagaccccagcggccaaaaaatgcatacattctgaaaaaaagccgcatctccaaaaagcctcaggtccccaaaaaaccccgcgagtggaagaatcccgaatctcagcgcggcttatccggggcacaggatccgtttcctggacccgctcctgtgccggtggaggtggttcaaaaattttgtcggatcgacaaaagccgaaaactaccacactcaaaggctaagacccggagtcggctggaagttgccgaggctgaagaagaggagacaagtatcaaggcggcgagatcagagctgctcctggccgaagaaccgggtttcctcgagggcgaagatggcgaggacaccgccaaaatttgccaggcagatatcgttgaagctgtagatattgctagtgctgcgaagcactttgatctcaacctgaggcagttcggaccctaccgcttgaattattcgagaacagggcggcatctggcatttggtgggcggcgcggccatgtcgcagccttagactgggttacaaagaagctcatgtgcgaaatcaatgtgatggaggcagtccgggatatcagattcttgcacagcgaggcactcctggccgtggctcaaaaccgctggctccacatctatgataaccagggcattgaactgcactgcatacggaggtgtgaccgggtcacgcgccttgagtttctgccttttcatttccttttggccactgcctcagaaaccggtttcctgacatacctcgacgtatccgtgggaaaaattgtggcagctttgaacgcgcgcgcaggaaggctcgacgtgatgtcgcaaaacccctacaacgccgtgatccacctcggccattccaacggtacagtgtcactctggagccccgccatgaaggagcctctggcaaaaatactatgccaccgtggcggcgtgcgggctgttgccgtggatagcacagggacatatatggcaaccagtggactggaccaccagttgaagatttttgatctgaggggtacgtatcagcctttgtccactcgaacactgccgcatggagccggacaccttgctttctcacagaggggactgttggtcgccgggatgggcgatgtggtcaacatctgggccgggcagggtaaggcatccccaccgtcacttgaacagccatatttgacacatcgcctttccgggccagtgcacggactgcagttctgtcccttcgaggacgtactaggagttggacacactggtgggattacgtccatgctggtgccgggggcaggggaacccaacttcgatgggcttgagtccaacccgtacagaagtaggaagcagagacaggagtgggaagtgaaagcactcctggaaaaagtgccggctgagttgatttgtctggacccacgcgccttggccgaggttgatgtgatttccctagaacagggaaaaaaggagcagatcgagagacttggctatgatccacaagcaaaggccccattccagcctaagccaaagcagaagggacgatctagtacggcatcgttggtgaagaggaaacgcaaggtgatggacgaggagcatcgagataaagtgcgacagtctctgcagcagcagcaccataaagaggcaaaggccaagcctactggagcacgaccatctgctttggataggtttgtgagatag

SEQ ID NO: 156246 - DNA, 1833 bp, Artificial Sequence
  derived and/or modified sequence
atggagaccgcccccaagcccggcaaggacgtgccccccaagaaggataaactccagactaagcgcaagaagccgcgccggtactgggaagaggagactgtgccaacgaccgcgggcgcaagtcccgggccccctagaaacaagaaaaaccgggaattgagaccccaacggccaaaaaatgcatacatcctgaagaagtcacgtattagcaagaagccacaggtgccaaaaaagccgcgggaatggaagaatcccgagtcccaacgaggactatcgggcgctcaggatcctttccctggtcccgccccagtaccggtggaggtggtgcagaagttctgccgcatcgacaagagcaggaagctgccacattccaaggcaaagaccaggagccgtttggaggtggcggaggccgaggaggaagagacttcgataaaagccgcccggagcgagcttcttctggccgaggagcctggatttctcgagggggaggatggtgaggatactgctaaaatttgccaagcagatatcgtggaagctgtcgatatcgctagtgccgcaaaacattttgacctcaacctcagacagttcgggccatatcggctcaattactcccgaacgggacggcacctagccttcggggggcgccgggggcatgtcgcagccctcgattgggtgacgaaaaaactcatgtgtgaaatcaacgtcatggaggccgtgagggatattagattcctgcatagtgaggcgctgctggcggtggctcagaatcggtggctgcacatttatgacaatcaggggatagaactgcactgtatccgacgatgtgatcgcgtgaccaggcttgagtttttacctttccacttcttgcttgctaccgctagcgagactggcttcttgacctatttggacgtgagtgtcggtaagattgtggctgccctgaacgcgagagcggggcgacttgacgtaatgtcacaaaatccttacaatgctgtaatacatctgggccactccaatgggacggtttcattgtggagtccagccatgaaagaaccactggccaaaattctgtgtcaccgtggcggggttcgcgctgtggccgtcgatagtacaggcacttacatggccacttccggcctcgaccatcagctcaaaatctttgacctcaggggaacgtaccaaccgctctctaccaggacgttgccgcatggagccggccatctagctttttctcagagaggtctgctggtcgctggtatgggagatgtggttaacatctgggcaggccagggcaaagccagccccccatcactcgagcagccctatctgacacaccggctaagcggacctgtccacggtctccagttttgtcctttcgaagatgtgctcggcgtcggccatacaggaggaataactagcatgctcgtcccgggcgcaggagaacccaacttcgatggtttggagagtaacccttataggagtagaaagcagcggcaggagtgggaggtgaaggctctcctggagaaggtgccggctgaactgatctgtctggaccctagggccctagccgaggtggacgtcattagtctcgaacagggaaaaaaagaacagatcgagcgtttaggctatgacccgcaagctaaggccccctttcagccgaaacctaagcagaagggtcggagcagcaccgcatccctggtcaagagaaagagaaaggtgatggacgaggagcacagagacaaagtgaggcagtctttgcaacagcagcatcacaaagaggccaaggccaaacctacaggcgcgcgcccgagcgccttagatcgtttcgtgagatag

SEQ ID NO: 156247 - DNA, 969 bp, Artificial Sequence
  derived and/or modified sequence
aagagccggatcagcaagaagccccaggtgcccaagaagccccgggagtggaagaacccggagtcacagcgcggcctcagcggagcgcaggacccctttcccggaccagcacccgtaccggttgaggtcgtccagaagttctgtaggatagataaatccagaaagctcccgcactcgaaggccaagactcgatccagattggaggtggcagaggcagaggaagaggagaccagtataaaagctgcccgtagcgagctgctcctggccgaagagccaggttttctggaaggagaggatggcgaggataccgctaaaatatgtcaagccgacatcgtggaggccgtagatatcgcttccgctgcaaagtttgggccctatcgactcaactactctagaacaggccggcacctcgctttcgggggtcggaggggccatgttgctgctttggactgggtcaccaaaaaactcatgtgcgagatcaatgtgatggaggctgtgcgcgatatccggttcctacactccgaagccctgctggcagtagcccaaaatcggtggcttcacatctacgataatcagggaatcgagctccactgcatccggcgctgtgatcgcgtcacacggttagagtttttgccctttcatttcttactcgctactgccagcgagactggattccttacttacctcgatgtgagcgttggaaagattgtagccgcgctgaatgctagagccggcagactcgacgtgatgagccaaaacccatataacgcagttattcatctgggacactcaaatggaacggtatccctttggtccccagccatgaaagagcctcttgctaagatcctttgtcaccgaggcggggtcagagctgttgccgtagattccacggggacctacatggctaccagtggactggaccaccagttgaagatcttcgacctaagggggacataccagcccctgtag

SEQ ID NO: 156248 - DNA, 969 bp, Artificial Sequence
  derived and/or modified sequence
aagagccggatcagcaagaagccccaggtgcccaagaagccccgggaatggaaaaaccctgagagtcaacgcggactgagcggaacccaggatccgtttcctggcccagcacctgtaccagttgaagtggtgcagaaattttgtcgaattgacaagtcgcggaagctgccacacagcaaggccaagacacgctctaggctagaggttgcggaggccgaagaagaggagacctcaattaaagccgcgaggtctgaactcctgctggccgaggagcccggcttcctcgagggcgaggatggggaggataccgccaaaatttgccaggctgatatcgtcgaggccgtcgatatcgcctcggctgcaaaattcggtccttacaggctgaactactcacggaccggccgacatctggccttcggtggcagaaggggacacgtggctgccctcgactgggtgaccaaaaagctaatgtgcgagataaacgttatggaagcagttagggacatacgtttccttcatagcgaagcgttactggcagtggcccagaatcgatggttgcacatttacgataaccagggaatcgagttgcactgcatccgccgctgtgatcgggtgactcgcctggagtttctccctttccacttcctcttagccactgcgagtgaaaccggatttcttacttacttagacgtgagtgtcggaaagatcgtcgccgcactgaacgctagagcaggcaggctcgacgtgatgtctcagaacccttacaacgccgttattcacctgggccattctaacggcaccgtgagtttgtggagccctgcaatgaaggaacctctggccaagatcctgtgccatcgcggaggtgttcgggcggtggcagtggattccaccggcacctacatggcgacctcgggtcttgaccaccagctcaagatatttgacctgcggggaacctatcagcccttgtag

SEQ ID NO: 156249 - DNA, 969 bp, Artificial Sequence
  derived and/or modified sequence
aagagccggatcagcaagaagccccaggtgcccaagaagccccgggaatggaagaaccccgagtcccagagaggacttagtggcgcacaggaccccttccctggccctgcccctgtaccagttgaggtggtccaaaaattctgtagaattgacaaatcacgaaagctcccacacagtaaagccaagacacggtcacggctggaggtcgccgaggctgaagaagaagaaacatccataaaggccgcaagatccgaacttctgctggccgaggagcccggctttcttgagggagaagacggggaggatacggctaagatttgccaggccgacatagtggaagcagtggatatagcgagcgccgccaaattcggcccatatcgtctcaactattctaggactggcagacatctcgctttcggaggacgcaggggtcacgtggcggcccttgactgggtgacgaagaaactaatgtgcgagatcaacgtcatggaagcagtccgcgacattaggtttctacattccgaggctctgcttgcagtggcccagaacaggtggctgcacatttatgacaaccaggggatcgaacttcattgtatcagacgttgcgacagggttacacggctcgagtttctacctttccattttctgctcgcaactgcctccgagactgggtttcttacctacttggatgtttcagtaggaaagattgtagccgccctgaacgcccgcgcaggcagactggatgttatgtcgcagaacccttataatgcagtaatccatcttggccactctaacggcaccgtatccctctggtcccccgccatgaaagagccactggctaagatcctgtgtcatagaggcggagtccgggctgtggcagtagactcaactggcacttatatggctacttccggactcgaccatcagttgaaaatctttgaccttcggggcacgtatcagcccctctag

SEQ ID NO: 156250 - DNA, 969 bp, Artificial Sequence
  derived and/or modified sequence
aagagccggatcagcaagaagccccaggtgcccaagaagccccgggaatggaaaaatcctgagtcccagcgcggtctctccggcgcccaggacccttttcccgggccggctccagtgccagttgaagtcgtgcagaaattctgtcggatcgacaagagccggaagctgccccacagtaaggccaaaacacgctcaaggctggaagtggctgaggccgaagaagaggaaacatcaatcaaagctgcccggtcggaactgcttctggcagaggagcccgggtttctggaaggcgaggatggagaagatacggcaaagatctgccaggcggatattgtcgaggcggtggatatagcttctgctgctaagttcggtccgtacagattgaactattcaaggaccgggcgtcatctcgcctttggagggcgaaggggccacgtggcagctctggactgggtcactaagaagctgatgtgcgagattaacgtcatggaagcggtccgagacatccggtttttgcatagcgaggccttactcgctgtggctcagaatcgttggttacacatctacgacaaccaggggatcgagctgcattgtattcggagatgtgaccgcgtgacaaggctcgagttcctgccttttcatttcttgttggctaccgcttccgagacaggattcttaacatatcttgacgtgagcgtggggaaaatcgtcgcggctttaaatgcgagagctggaagactggacgttatgtcacagaacccatacaacgccgtaatccacctcggccactctaatggaacagtgtccctctggtcacctgcgatgaaagagccactggccaaaatcctgtgccaccgaggtggagtacgagcagttgccgtggactcaactggaacatacatggccaccagtggcctcgaccaccagctgaagattttcgacttgcgcggaacctatcaacccctgtag

SEQ ID NO: 156251 - DNA, 1833 bp, Artificial Sequence
  derived and/or modified sequence
atggagaccgcccccaagcccggcaaggacgtgccccccaagaaggataagctgcagaccaaacgcaagaagccgagaaggtactgggaggaggaaactgttcccaccaccgccggcgcctcaccagggcccccccgcaacaaaaagaatagggaactgaggccccagagacccaaaaatgcatatatactgaagaagagccgcatctcgaaaaagcctcaggtgccgaaaaagccgcgtgagtggaagaatccagaaagtcagagaggcctctccggcgcccaggatccctttcccggtccagctccagtccccgttgaggtggtgcaaaagttctgccggatcgataaaagcaggaaactacctcactccaaagccaaaacacgcagcagactcgaagtggctgaagcagaagaggaagaaaccagcattaaagccgccagatctgaactattgctggccgaagagcccggattcctagagggtgaggacggagaagatacagcaaagatttgccaagcagatattgtggaagcagtggacatcgcgtcagcagcaaagcatttcgatttgaacttgcggcaattcggaccatatcgcttgaactattcccgaactggccgccacctggcttttggaggacgaagaggacacgtggccgccctggactgggtaacaaagaagctgatgtgcgaaattaacgtgatggaggccgtgcgagatatccggttcctgcactcggaggcgttgctcgcagtcgcccagaatcgttggcttcatatttatgacaatcagggtattgagttacactgcatccgacgatgcgatagggttacaaggctcgagttcctccctttccactttctgctggccacagcctccgagactggatttcttacatatcttgatgtttctgtgggtaaaatcgtggcagctctcaacgcaagagccggacggctggacgtcatgtcccaaaacccttacaatgccgtgattcacctcggccattccaatggaactgtctctctgtggagtccagccatgaaggagcccctggcgaagatcctctgccaccggggcggagttcgagccgtggcagtggacagcaccgggacatatatggccacgtctggcctggatcaccagctcaagatatttgacctacgcggcacgtatcagccactttccacgcgcacactaccacatggcgctggacacctggcattttcccagagggggctactggtagccggcatgggagatgtagtgaatatctgggcaggacagggaaaggccagcccaccttctctcgaacaaccatacctcacccaccgtctctcgggtccagtgcacggactgcaattttgcccctttgaggacgtgctgggggttgggcatactggcggaatcacttctatgcttgttcccggcgccggagaaccaaactttgacggcttggagtccaatccctatcgttctcgaaagcagcgtcaagagtgggaagtcaaagctctgttggagaaggtgccggcagagctgatctgcttggaccccagggccctggcagaagtggacgtaatatcactggagcagggcaaaaaggagcagatagagcggctgggatacgatccccaggccaaggcaccatttcagcccaaacccaaacagaaagggcgatcatctaccgcctcactggtcaagcggaagcgcaaggtgatggatgaggaacaccgggataaggtgagacagtctctgcagcaacagcaccacaaagaagcaaaagccaaaccaaccggagcgcggccttctgctttggatcgatttgttagatag

SEQ ID NO: 156252 - DNA, 1833 bp, Artificial Sequence
  derived and/or modified sequence
atggaaactgcccctaagcccggtaaagatgtcccaccgaagaaagataagctccagacaaaaaggaagaaaccaaggaggtactgggaggaggagactgtccctacaaccgccggagcatctcctggaccccctcgcaacaagaagaacagagaactccggccacaacgacctaaaaacgcgtacatcctgaagaaaagcaggatatccaagaagcctcaggtgcctaaaaagccaagagagtggaagaatccagagagccagcgcggtctttccggaacacaggatcccttccctggacctgcacccgtgcccgtcgaagtggtgcagaagttctgccgaatcgacaagtctagaaagctgcctcactcaaaggccaagacacggtcacgtctggaggtagccgaagccgaagaagaggaaaccagcatcaaagccgctcggtccgagctcttacttgccgaagaacctggcttcctggaaggagaggacggtgaagataccgccaagatctgtcaggccgacatcgtagaggcagtggatattgcctctgcagccaagcacttcgatctgaatctacgccagttcggcccttataggctcaactattctaggaccggaaggcatctagcattcggcggaaggcggggtcacgtggccgcactggactgggtgactaaaaagctgatgtgtgagatcaatgtcatggaagctgtgcgcgatattagatttctgcactcagaagcgctgctggctgtggctcaaaaccggtggctgcacatttacgacaaccagggtattgaattgcactgcattcgcaggtgcgacagggtgacaaggctcgagtttctgcccttccactttctgctggccaccgcatccgagacagggtttcttacctacctagacgtgtctgtaggcaagatagtggcagcactcaacgctagggcaggcaggctggatgtcatgtcacagaatccctacaacgctgtgattcacctcggccattccaacgggaccgtaagtctgtggtcccctgctatgaaagagcccctggccaagatcttatgtcaccgtggaggagtccgggcagttgccgtggactccacaggcacttatatggccacatcaggcttagatcaccagctgaaaattttcgacctacggggtacttaccagccactgagtacccggactctcccccatggagccggacatcttgccttctcccagcggggattgctggttgcaggaatgggcgacgtagttaacatctgggctggccaggggaaggcttcccctcctagcctcgagcagccctacctaacccacagactaagtgggccagtgcacggactgcagttttgtccgttcgaagatgtcttgggcgtcgggcacacagggggaatcacatctatgctggtacctggagccggagagcccaatttcgacggcctggaatccaatccatacagatctcggaagcaaaggcaggagtgggaggtcaaagcattacttgagaaagtgcccgctgagctgatttgtctggatcccagggccctcgctgaggttgacgtaattagtctggagcagggaaaaaaggagcagattgagcgactgggatatgatcctcaggctaaggcaccgtttcagcccaagcccaagcagaagggcaggtctagcacagcatccctggtgaagcgtaagcggaaggtgatggatgaggaacatcgcgataaggtgaggcagtctctgcagcagcagcatcacaaggaggccaaggctaaacctactggcgcacgcccttctgcactagatcggttcgtccgctag

SEQ ID NO: 156253 - DNA, 1833 bp, Artificial Sequence
  derived and/or modified sequence
atggagacagcaccaaagcccggaaaggacgtgcctcctaagaaggataaactgcaaaccaaacgtaaaaagcctcgaagatattgggaagaggaaacggttcccaccacagctggcgctagtcctggccctcctcggaacaagaagaaccgagaactgcgcccacaacgacctaagaatgcatacattctgaaaaaatccaggatctcaaaaaaaccccaggttccaaagaagccacgtgaatggaagaatcctgagagtcaacggggtttgtccggggctcaggatccatttccaggtccggcacccgtaccggtggaagtcgtccagaagttttgtcgcatcgacaaaagtcgcaaactgccacattccaaggcaaagacccggtccaggctggaggtggctgaagccgaagaggaggagacaagcattaaagcggcacgctcagaactgctgctagccgaggaacctggttttttggagggagaagacggcgaagacactgccaagatatgtcaagctgatatcgtggaggcagtagacattgcttccgccgcaaagcattttgacctgaacctgcggcaattcggaccttatagattgaactatagccgaaccggtcgccatctggcctttgggggacgcagaggtcacgtggctgcactggactgggtgactaagaaactgatgtgtgaaataaacgtcatggaggccgttcgagatatcagattcctgcactccgaggcactgctggctgtagcacagaacaggtggttacatatatacgacaatcaaggtatcgagctgcactgcatcaggaggtgcgatcgggtcacacgcttagagtttctgccttttcacttccttctggcaacagcctccgaaacagggttcctcacttatttggatgtgagcgtgggcaagattgtagctgctctcaacgctcgcgcaggtcgcctggatgtgatgtctcagaacccttacaacgccgtgatccatctgggccattccaatgggacagcttccctatggagtcccgctatgaaggagcctctggcgaagattctgtgtcacagaggaggggtgcgcgctgtagcagtggatagtaccggaacctacatggctacttcgggactagaccaccaacttaaaatcttcgatttaaggggcacgtaccagcctctgtcgacgaggacacttccgcatggggctggtcatctagctttttctcagcgaggattattagtcgccggaatgggcgacgtggtaaacatttgggccggacaagggaaggctagtcccccaagcctagagcagccttatttaacacataggctctctggccctgttcacggtctacagttctgtcctttcgaggatgtactaggggtgggacataccgggggtattacttccatgctggtgcctggtgccggagaacctaactttgacggactcgaaagcaacccctatcgctcacggaaacaaagacaggagtgggaggtcaaagcactgctggagaaggttcctgccgaattaatatgtcttgacccccgagctctcgcggaggttgacgtgatctccctcgagcagggtaagaaggaacaaattgagagacttggatatgacccacaggctaaagcaccatttcagccaaaacctaagcagaagggtcgtagttcaacagccagcctggtgaagcgtaagagaaaagtcatggatgaggaacacagagataaagtgagacagagcctgcagcagcaacaccacaaggaagcaaaggccaagcctacaggagctcgtccgtcagcccttgatcgctttgtccgttag

SEQ ID NO: 156254 - DNA, 969 bp, Artificial Sequence
  derived and/or modified sequence
aaatcacgaataagcaagaagccccaggtgccaaagaagcccagagagtggaagaaccccgagtctcaaaggggactttcaggagcccaagacccttttccgggtcccgctcccgttccggttgaggtagtgcaaaaattctgcaggattgacaagagccgcaagctcccgcacagcaaagctaagacacgctctcgcctggaagtggcagaggccgaggaagaagagacaagcatcaaggccgctagaagcgagctgctgttagccgaggagcctgggttccttgagggcgaggatggcgaagacactgcaaagatatgccaagcggacattgtggaagcagtggatatcgcatcagctgctaagttcggtccataccggcttaattacagtcggactggtagacatctggcgttcggcggtcgtcggggtcatgtggctgcgctcgattgggtcaccaaaaaactcatgtgtgagatcaacgtcatggaagctgttcgggatatacgcttcctccattctgaagctctattggctgtggcacagaatagatggctgcatatctatgacaaccaaggaatcgagcttcactgcatcaggagatgtgacagagttactcgtttggaattcctcccctttcacttcctgctggcaacagcgtccgaaaccggatttctcacttacttggacgtttccgtgggcaaaatcgtcgccgctctgaatgcaagagccggtagacttgacgtgatgtcccagaacccttacaacgccgtgatccatttgggtcattcaaatggtaccgcctctctgtggagtccggctatgaaagaaccacttgctaaaattctgtgccaccgcggtggggtgagggcagttgccgtggattcgactgggacctacatggccacgagcggcctggaccaccaacttaaaatctttgacctccgtggtacttatcagccactctag

SEQ ID NO: 156255 - DNA, 1833 bp, Artificial Sequence
  derived and/or modified sequence
atggagaccgcccctaagccaggaaaagacgtcccaccgaaaaaggacaaactacagacaaaaaggaagaagcctaggcggtactgggaggaggagaccgttcccacaaccgcaggagcctctccgggaccaccacgtaacaaaaaaaatagagaactacgaccccagagacctaagaacgcatatattctaaagaagtctaggattagtaaaaagccgcaggtccccaagaagccaagagagtggaaaaatccagagtcccagagggggctgtccggagcccaagacccatttcctgggccagcccctgttcccgtcgaggtcgtacagaagttttgtcgaatcgataaatccagaaaactaccacactccaaagccaagactaggtcaagacttgaagtcgcagaggcagaagaggaagagacctctattaaggccgcaagatccgaactacttctcgccgaggagcctggcttcctagaaggtgaggatggagaagatacagctaagatctgtcaggcagacatcgtggaggccgtggatatcgccagcgcggctaagcatttcgacctgaatctgcggcagttcggaccataccgattgaactactcacggactgggagacacctggcctttggaggacgcagggggcatgttgctgccctggattgggtgacaaaaaagctgatgtgtgagattaacgtaatggaggcggtgagggacatcagattcttacactctgaggccctactggccgtggcccagaaccggtggttacacatctacgacaatcaggggatcgaattacactgcatccgacggtgcgatcgcgtgacccgcctcgaatttctgcccttccatttcttgctggccactgcgtcggagacgggctttttaacctacctggatgtgtctgttggaaagatcgttgcagctctgaacgccagggccggacgtctcgacgtgatgtcgcagaacccttacaacgctgtgatccacctgggacattctaatggaacagtgtcattatggtccccagccatgaaagaaccccttgctaagatattgtgccaccgcggaggagttcgcgctgtcgcagtggactctacaggcacttatatggccacatcgggcctcgaccaccagctgaagatctttgatctcaggggtacctaccaacccctaagtactagaactctaccccatggggctgggcacctggcttttagccagcggggactgttggtggctggtatgggtgacgtcgtcaacatctgggctggacagggcaaggcctctccacccagcctcgaacagccatatctcacgcaccggctgtcaggccctgtgcacggcttacagttttgcccttttgaggatgttctgggagtgggacacaccgggggaatcacgtcaatgctggtgcccggtgccggagagcctaattttgacggcctagagtctaatccctaccgttcacgaaaacagcggcaggagtgggaggtgaaagctctacttgaaaaagtgccagcagaactgatttgcctggacccgagagctctggctgaagtcgatgtcatctccctcgaacaggggaaaaaggaacagattgagagattgggctacgaccctcaagcaaaagccccatttcagccaaaacccaagcagaaagggagatcctcgaccgcgtccctagttaagcgcaagagaaaggtgatggacgaggaacatcgcgacaaggtccgccagagccttcaacagcagcaccataaggaggctaaagccaaaccaacaggtgcacgcccttctgcactggacagatttgtcagatag

SEQ ID NO: 156256 - DNA, 1833 bp, Artificial Sequence
  derived and/or modified sequence
atggagacggcaccgaagcctggcaaagacgttcccccaaaaaaggataaactccagactaagcgtaaaaagccacgccgttactgggaagaggaaacagtgcccaccactgccggtgccagccctggcccaccccgaaataagaagaaccgtgagctaaggccccaaaggccaaagaacgcttatatcctcaaaaagtccaggattagtaaaaagccacaggtgcccaagaagcctagggagtggaaaaaccctgaatcgcagcgcggactgagcggagcccaggacccgttccccggaccggctccggtgcccgtggaggtcgtccagaagttctgtcggatagataagtctcgtaagctcccccatagcaaagctaaaacccgctcacggttagaggtagcagaagctgaggaggaggagaccagcatcaaagcagccaggtctgaactgctactggcggaggagccgggattccttgagggagaggatggcgaggacaccgcgaaaatttgccaggccgacattgtggaggcagtggatattgcttccgcagcaaaacactttgatttgaatctcagacaattcgggccataccggctgaactatagccgaaccggcagacatctcgcgttcggtgggcgacgcggtcatgtagctgcactggactgggttaccaaaaaattaatgtgtgagatcaatgtgatggaggccgtgagggatattcgcttccttcactctgaggcactcttggcagtggcccagaacaggtggctgcacatatatgataatcagggaatcgagctgcactgtatcaggaggtgcgaccgcgttactcgcctagagttcctgccgtttcactttcttctggcaaccgcttctgagacgggatttctgacatacctggatgtgtccgtagggaagatagtggctgcactcaatgccagagcgggaaggttagacgtaatgagtcagaatccttacaatgccgtcatccatctgggccattccaacggcacagtgagcttgtggagtcctgcgatgaaggagcctctggccaagattctatgccaccgcggtggggtgagagctgttgctgttgatagtactgggacttacatggctacctctggcctggatcatcagctgaaaatctttgatctcaggggaacatatcagccactttctacccgcactctgcctcacggtgcgggacacctcgcattcagccagcgaggcctcctggtagctggaatgggtgatgtagtgaatatttgggccggacaggggaaggcctcccctcccagcctcgagcagccgtacctgactcatcgcctgagcggacctgtgcatggcctacaattttgcccctttgaagacgtacttggtgtgggccataccggaggcatcacatcgatgcttgttcccggtgctggagagcctaactttgacggcttggaaagtaacccataccgtagtcgcaagcagcggcaagagtgggaggtgaaggcactactggagaaggtcccagccgagctgatctgccttgaccctcgggcattggccgaggtcgacgttataagtctcgaacagggcaagaaagagcagatcgaaagactgggatacgacccccaagctaaggcgccatttcaacccaaaccaaagcagaagggcagaagttccaccgccagtctggttaagcgcaagcgcaaggtgatggatgaggaacatcgggataaggtcagacagagcttacaacagcagcatcacaaagaggctaaagccaaacctaccggcgcaagacctagcgctttggaccgctttgtccggtag

SEQ ID NO: 156257 - DNA, 969 bp, Artificial Sequence
  derived and/or modified sequence
aagagcaggatcagcaaaaagccccaggtgcctaagaagccccgagagtggaaaaaccccgagtctcagcgtggactttcaggcgctcaggacccgtttcctggccctgcccctgtgccagtagaggtcgttcaaaaattttgtcgaatagataagagccgaaaattgccgcatagtaaagcaaaaacacgttcaagactggaggtcgccgaagccgaagaggaagaaacctctatcaaagccgctaggtccgagctcctgctcgccgaggagcccggattcttggaaggggaggacggggaggatacggctaaaatctgtcaggctgatatcgttgaggccgtggacatcgcatccgctgctaagttcggcccttatcggttaaattattcgcggaccgggaggcacctggcttttggagggcgacgtggccacgttgctgcccttgactgggtgaccaaaaaactgatgtgcgaaatcaatgtaatggaggctgttagagacataaggtttctgcattctgaggccctcttggccgttgcccagaaccggtggttacatatatacgataatcagggcatcgagttgcactgcatacgacgatgtgacagggtcacacggcttgagtttctgcctttccattttctcctggcaactgcttccgaaacaggctttttgacttatctggatgtttcagtcggcaaaattgtggctgcactgaacgctcgggcagggagactggacgtgatgtcccagaacccatacaatgccgtgattcaccttggccattccaacggcacggtgtccctatggagccccgctatgaaggaacctctggcgaaaattctgtgccatagaggcggagtgcgcgctgtcgcggtcgattctacaggcacctacatggctacaagtggccttgatcaccaacttaagatctttgatctaagggggacgtatcagcctctttag

SEQ ID NO: 156258 - DNA, 969 bp, Artificial Sequence
  derived and/or modified sequence
aagtcccgcatctctaaaaagccacaggttcctaaaaagccccgagagtggaagaatccagagtcacagcgcggactgtctggaacacaggatccatttcccggacccgcacctgtgcctgtggaggtcgtacagaaattttgtaggattgacaagtcaaggaaacttcctcatagcaaagctaagacaagaagccgcttggaggtggcagaggccgaagaggaagagacatctataaaagccgctagaagcgaactgctcctggccgaagaacctgggtttctagaaggggaagacggcgaggacactgcgaaaatttgccaggcggatattgtggaagccgtggacattgcctcagcagctaagtttgggccatatagattgaactactccaggaccggcaggcaccttgcgttcgggggtagacggggtcatgtcgccgctctggactgggtgaccaaaaagctgatgtgtgagatcaatgttatggaagccgtacgggacattagatttctgcacagcgaagcgctccttgccgtcgcccagaacagatggctccatatctatgacaaccagggcattgagctgcattgtatccggagatgtgaccgcgtgactcgactggaattcctgccgttccacttcttactggctacagctagcgagacgggcttcctgacgtatttggacgtgagtgtcggcaagatcgtggctgccttgaacgccagggcaggcagattagatgtgatgtcccagaatccctataacgccgtaatccatctgggccattccaacggtaccgtaagtctttggtctcccgcaatgaaagaaccgcttgccaaaatactatgtcatcgcggaggcgtcagggctgttgcagtagactccacgggcacttatatggccacctcaggcctggaccaccaactgaagatcttcgaccttagaggtacctatcagccgttgtag

SEQ ID NO: 156259 - DNA, 969 bp, Artificial Sequence
  derived and/or modified sequence
aagtcaagaatttctaaaaaaccccaggtgcctaagaagcctcgggagtggaagaatcctgagagccagagggggctctccggtgcgcaggatcccttcccaggaccagcccctgtgcccgtcgaggttgtacagaagttttgtcgaattgacaagtccagaaagctgccacatagcaaggccaagacccgcagccgcttagaagtggccgaagccgaggaagaagaaaccagcattaaagccgcaagatcggagctcctccttgcagaagaacctggattcctggagggtgaagacggagaagataccgcaaaaatatgccaggctgatatcgtggaagccgtggacatcgcctctgccgctaagtttggaccctacagactcaattactccagaaccggcagacatttagcatttggtggacgcaggggacacgtggctgcactagattgggttactaaaaaactaatgtgtgagatcaatgtgatggaggctgtgagagatatccggttcctgcactctgaggccctacttgccgttgcgcagaaccggtggctgcatatctatgacaaccaagggatcgagctacattgcattcgcaggtgcgaccgggtgactcgcctcgaatttctacctttccactttctgctcgcaaccgcctctgaaactggatttctcacgtatctggatgtctctgtggggaaaatcgtcgctgccctcaacgcacgggcaggcagactggatgtcatgagtcagaacccatacaacgcagtgattcatctgggtcactctaacggaacagtctctttatggtcacctgcaatgaaagagcctctggccaaaatcctttgtcatagaggaggagttagagcagtggctgttgactccacaggcacctatatggctacctccggcctggatcaccagctcaagatattcgacctgcgaggaacatatcagccactctag

SEQ ID NO: 156260 - DNA, 969 bp, Artificial Sequence
  derived and/or modified sequence
aagagtcgcatctctaaaaaaccccaggtgcccaagaaacctagagagtggaagaaccctgaatcccagagaggcctgtccggcgcacaggacccatttccaggaccggctccagtacctgtggaggttgttcagaagttctgccgaatcgataagagccgtaagctcccacacagtaaggctaagacccggtctcggttagaggttgcagaagctgaagaggaggaaacctctattaaggcagcgagatctgagctcctgctcgcagaagagcccggtttcctagagggagaggatggtgaggatactgcaaaaatatgccaagccgatattgtcgaagctgtagacatcgcgtccgctgctaagtttggtccataccgcctgaactattccagaacggggcgacacttagctttcgggggaaggcgtggccacgttgcagcgctcgactgggtcaccaaaaagctgatgtgtgagataaatgtgatggaggccgtgagagatatcaggtttctgcatagtgaagccttgctagccgtcgcccaaaatcggtggctgcacatctacgataaccagggcattgaattgcattgcattcgtcgttgtgatcgcgtgacgcgcctcgaatttttgccgttccacttcctgctggcaactgcttccgagactggatttctgacatatctggacgtgagcgtgggtaaaattgttgctgccctgaacgcgcgagcgggaaggctcgatgttatgtcccagaatccttacaatgctgttattcatcttgggcacagcaatggcaccgttagtctgtggtcaccagcaatgaaggagcctctggcaaagattctgtgtcaccgtgggggtgtgcgtgccgtggccgtcgattcaacaggaacatatatggcgactagcggtcttgatcaccagctgaagatatttgacctccgtgggacgtaccagccattgtag

SEQ ID NO: 156261 - DNA, 1833 bp, Artificial Sequence
  derived and/or modified sequence
atggagaccgctcctaagccaggcaaggacgtcccaccgaagaaagacaagctgcagaccaagaggaagaaacctcgcagatattgggaagaggagacggtcccaaccaccgccggagccagtcccggaccaccacggaacaagaagaatcgagagctcaggccacagagaccgaagaacgcgtacatcctaaaaaaatcccgtattagcaaaaagccgcaggtgccaaaaaagccaagggagtggaagaatccagaatcgcaaagaggcttgtccggggcacaggacccgttccctgggccagctcctgtgcccgtcgaagtagttcagaagttctgccggattgataaaagccggaagctgcctcatagtaaggcaaagacacgttccagattggaagttgccgaagccgaagaggaggaaactagcatcaaggcagccagatctgagctgctgttagccgaggaacccggattccttgagggcgaggacggagaagataccgccaaaatttgccaggcggatattgtagaagcagtcgatatcgcatctgctgctaaacactttgacctgaacctgcgtcagttcgggccatacagactcaactactctagaactgggcgtcatctggctttcggaggccgacgaggccatgttgcggctttggattgggtgactaaaaagttaatgtgcgagataaacgtcatggaggctgtgcgcgacattcggttcctgcacagcgaagcccttctggcagtggctcagaatagatggcttcatatatatgacaatcagggtatcgagctgcattgtatccgaagatgtgatcgcgtcacccgcctggagtttctaccattccactttcttctggcaactgcttctgaaactggctttctgacttatctcgacgtgtcagtcggtaaaatagtggcggctctcaatgcacgcgctgggagactcgacgtgatgtcacaaaatccttacaacgcagtgattcacctggggcactccaacggcacggtaagtctgtggtctcccgctatgaaggaacccttagcgaaaatcctttgtcatcggggaggtgtcagagcggtggcagtcgactctacaggcacctatatggccacctccggccttgatcatcaattaaagatatttgacctccgcggaacctaccagcccctgtccactcgaacattgccccacggggctggtcatctcgctttcagccagagaggcttgctggtggcgggaatgggcgatgttgtcaatatttgggccggacaggggaaggcttcaccaccgtcgctggagcagccctatctgacccaccggctgtccggccctgtccacggcctgcaattctgcccctttgaggatgtcctaggcgtaggccatacaggcggtatcacctccatgctcgttcccggagcgggtgagccaaatttcgatggtctagaatccaatccatacaggtcacgcaaacagcgccaggaatgggaggttaaggccctgttggagaaggtgcccgctgagctgatctgtctggaccccagggccctcgcagaagtggacgttattagcctggagcagggaaagaaggagcagatcgagcggcttggttatgaccctcaagcgaaagctccttttcaaccaaaaccgaagcagaagggtcgcagttccaccgcttccctagtgaagagaaagcgcaaagtgatggacgaggagcaccgtgacaaggtgcgccagtccctgcaacagcaacaccataaggaggctaaagccaaaccgaccggtgctaggcctagcgcccttgacagattcgtgagatag

SEQ ID NO: 156262 - DNA, 2358 bp, Artificial Sequence
  derived and/or modified sequence
gtagttctgacatgtttagggagtggagttctgctaaaaagactagactaggacatttttaggcaagatggggaaactaatccagaaaaagaaaccgcaccgctacttagcccctggctccggacctgcctttcttttttaaatcactcttgcataagctgccgctcgcgataaggtgccaaaaactgttccgcccctctaaggagagcgtgccctcactcaagatggcacctagagagcttcatacctggtacgctgctgattggatgaaggacagagggcttccgggagttttcaagccgactgtgtggcagctgagaggagttttgcacgtggatcgccgttcgggtgggcgagatggagacagcccccaagccgggcaaggatgtcccgcccaagaaagacaaacttcagaccaagagaaagaaaccgcggcgatactgggaggaagagaccgttccgaccacagccggagcctctccagggcctcctcgtaacaagaagaatcgggagctccgtcctcagagaccaaaaaatgcttacatcttaaagaagtctcggatctctaagaagcctcaggtcccgaagaaaccccgagaatggaagaacccggagtcccagcgcggcttgtccgggacccaagatccattcccaggccccgcccccgtccctgtggaagtggtccagaagttctgtcgcattgacaaatcccgaaagctaccacattctaaagccaaaactcgaagccgacttgaggtggctgaagctgaggaagaggaaacaagtatcaaagctgctcgttctgagctgctgcttgctgaagaacctgggtttctggaaggggaggatggggaagacacagcaaagatatgccaggctgacattgtggaggctgtggacattgcaagtgcagccaagcactttgacttgaatctgcggcagtttggaccctacagactaaactactctcgaactggaagacacctggcttttggagggcgccgaggtcatgtggctgcccttgattgggtaacaaagaagcttatgtgcgagatcaacgtcatggaggcggtgcgggacatccggtttctccattctgaggcactgcttgctgttgctcagaaccgctggctccacatctatgacaatcagggcattgagctccactgtatccgccgctgtgaccgagtaacacggcttgagttcctgcccttccacttcctcctggctacagcttcagaaacagggtttctaacctacctggatgtgtcagtggggaagattgtggcagctctgaatgctcgagctgggcggctcgatgttatgagtcagaacccttacaatgccgtcatccatctcggacacagcaatggtactgtgtctttatggagtccagctatgaaggagccactggcaaagattctctgtcatcgtggtggggtccgggctgtggcagtagattctacaggcacgtacatggccacctctggcctagaccaccagctgaagatctttgacttgcgagggacgtaccagcctctgagcactcggaccctgccccatggagcagggcacctggccttctcccagaggggactgctggtggcgggaatgggtgacgttgtcaacatctgggcagggcagggcaaggccagcccaccctcccttgaacagccctacctcacccaccggctctcaggccctgtgcatggccttcagttctgcccctttgaagatgtgctgggggtggggcacactgggggcatcaccagcatgctggtccctggggccggtgagcccaacttcgatggcctggagagtaatccatacagaagccggaagcagcgccaggagtgggaggtgaaggccctgctagagaaggtacctgcagagcttatttgtctggacccacgagccctggccgaggtggatgtcatctccctggagcagggaaagaaggagcagatagagaggctgggctatgacccgcaggctaaggctcccttccagccaaagccaaagcagaagggccgcagctccacggcaagcctggtgaagaggaagaggaaggtcatggatgaggaacacagggacaaggtccggcagagccttcagcagcagcatcataaggaggcgaaggccaagcccacgggggcccggccatctgccctggacagatttgtgcgctgagccagactccagggttgcctgggaacagtctctccccaagatcacctgtagggaaatgagtgttccctggaacaaggaggtgggggcagtgtggccccttccccaactgggggtggacagctgtctcctggggtgggttggtattaaagaggaaagcgattttttgga

SEQ ID NO: 156263 - DNA, 2358 bp, Artificial Sequence
  derived and/or modified sequence
gtagttctgacatgtttagggagtggagttctgctaaaaagactagactaggacatttttaggcaagatggggaaactaatccagaaaaagaaaccgcaccgctacttagcccctggccccggacctgcctttcttttttaagtcactcttgcataagctgccgctcgcgataaggtgccaaaaactgttccgcccctctaaggagagcgtgccctcactcaagatggcacctagagagcttcatacctggtacgctgctgattggatgaaggacagagggcttccgggagttttcaagccgactgtgtggcagctgagaagagttttgcacgtggatcgccgttcgggtgggcgagatggagacagcccccaagccgggcaaggatgtcccgcccaagaaagacaaacttcagaccaagagaaagaaaccgcggcgatactgggaggaagagaccgttccgaccacagccggagcctctccagggcctcctcgtaacaagaagaatcgggagctccgtcctcagagaccaaaaaatgcttacatcttaaagaagtctcggatctctaagaagcctcaggtcccgaagaaaccccgagaatggaagaacccggagtcccagcgcggcttgtccggggcccaagatccattcccaggccccgcccccgtccctgtggaagtggtccagaagttctgtcgcattgacaaatctcgaaagctaccacattctaaagccaaaactcgaagccgacttgaggtggctgaagctgaggaagaggaaacaagtatcaaagctgctcgttctgagctgctgcttgctgaagaacctgggtttctggaaggggaggatggggaagacacagcaaagatatgccaggctgacattgtggaggctgtggacattgcaagtgcagccaagcactttgacttgaatctgcggcagtttggaccctacagactaaactactctcgaactggaagacacctggcttttggagggcgccgaggtcatgtggctgcccttgattgggtaacaaagaagcttatgtgcgagatcaacgtcatggaggcggtgcgggacatccggtttctccattctgaggcactgcttgctgttgctcagaaccgctggctccacatctatgacaatcagggcattgagctccactgtatccgccgctgtgaccgagtaacacggcttgagttcctgcccttccacttcctcctggctacagcttcagaaacagggtttctaacctacctggatgtgtcagtggggaagattgtggcagctctgaatgctcgagctgggcggctcgatgttatgagtcagaacccttacaatgccgtcatccatctcggacacagcaatggtactgcgtctttatggagtccagctatgaaggagccactggcaaagattctctgtcatcgtggtggggtccgggctgtggcagtagattctacaggcacgtacatggccacctctggcctagaccaccagctgaagatctttgacttgcgagggacgtaccagcctctgagcactcggaccctgccccatggagcagggcacctggccttctcccagaggggactgctggtggcgggaatgggtgacgttgtcaacatctgggcagggcagggcaaggccagcccaccctcccttgaacagccctacctcacccaccggctctcaggccctgtgcatggccttcagttctgcccctttgaagatgtgctgggggtggggcacactgggggcatcaccagcatgctggtccctggggccggtgagcccaacttcgatggcctggagagtaatccatacagaagccggaagcagcgccaggagtgggaggtgaaggccctgctagagaaggtacctgcagagcttatttgtctggacccacgagccctggccgaggtggatgtcatctccctggagcagggaaagaaggagcagatagagaggctgggctatgacccgcaggctaaggctcccttccagccaaagccaaagcagaagggccgcagctccacggcaagcctggtgaagaggaagaggaaggtcatggatgaggaacacagggacaaggtccggcagagccttcagcagcagcatcataaggaggcgaaggccaagcccacgggggcccggccatctgccctggacagatttgtgcgctgagccagactccagggttgcctgggaacagtctctccccaagatcacctgtagggaaatgagtgttccctggaacaaggaggtgggggcagtgtggccccttccccaactgggggtggacagctgtctcctggggtgggttggtattaaagaggaaagcgattttttgga

SEQ ID NO: 156264 - DNA, 968 bp, Artificial Sequence
  derived and/or modified sequence
aagtctcggatctctaagaagcctcaggtcccgaagaaaccccgagaatggaagaacccggagtcccagcgcggcttgtccggggcccaagatccattcccaggccccgcccccgtccctgtggaagtggtccagaagttctgtcgcattgacaaatctcgaaagctaccacattctaaagccaaaactcgaagccgacttgaggtggctgaagctgaggaagaggaaacaagtatcaaagctgctcgttctgagctgctgcttgctgaagaacctgggtttctggaaggggaggatggggaagacacagcaaagatatgccaggctgacattgtggaggctgtggacattgcaagtgcagccaagtttggaccctacagactaaactactctcgaactggaagacacctggcttttggagggcgccgaggtcatgtggctgcccttgattgggtaacaaagaagcttatgtgcgagatcaacgtcatggaggcggtgcgggacatccggtttctccattctgaggcactgcttgctgttgctcagaaccgctggctccacatctatgacaatcagggcattgagctccactgtatccgccgctgtgaccgagtaacacggcttgagttcctgcccttccacttcctcctggctacagcttcagaaacagggtttctaacctacctggatgtgtcagtggggaagattgtggcagctctgaatgctcgagctgggcggctcgatgttatgagtcagaacccttacaatgccgtcatccatctcggacacagcaatggtactgcgtctttatggagtccagctatgaaggagccactggcaaagattctctgtcatcgtggtggggtccgggctgtggcagtagattctacaggcacgtacatggccacctctggcctagaccaccagctgaagatctttgacttgcgagggacgtaccagcctctgag

SEQ ID NO: 156265 - DNA, 2358 bp, Artificial Sequence
  derived and/or modified sequence
gtagttctgacatgtttagggagtggagttctgctaaaaagactagactaggacatttttaggcaagatggggaaactaatccagaaaaagaaaccgcaccgctacttagcccctggctccggacctgcctttcttttttaagtcactcttgcataagctgccgctcgcgataaggtgccaaaaactgttccgcccctctaaggagagcgtgccctcactcaagatggcacctagagagcttcatacctggtacgctgctgattggatgaaggacagagggcttccgggagttttcaagccgactgtgtggcagctgagaggagttttgcacgtggatcgccgttcgggtgggcgagatggagacagcccccaagccgggcaaggatgtcccgcccaagaaagacaaacttcagaccaagagaaagaaaccgcggcgatactgggaggaagagaccgttccgaccacagccggagcctctccagggcctcctcgtaacaagaagaatcgggagctccgtcctcagagaccaaaaaatgcttacatcttaaagaagtctcggatctctaagaagcctcaggtcccgaagaaaccccgagaatggaagaacccggagtcccagcgcggcttgtccggggcccaagatccattcccaggccccgcccccgtccctgtggaagtggtccagaagttctgtcgcattgacaaatcccgaaagctaccacattctaaagccaaaactcgaagccgacttgaggtggctgaagctgaggaagaggaaacaagtatcaaagctgctcgttctgagctgctgcttgctgaagaacctgggtttctggaaggggaggatggggaagacacagcaaagatatgccaggctgacattgtggaggctgtggacattgcaagtgcagccaagcactttgacttgaatctgcggcagtttggaccctacagactaaactactctcgaactggaagacacctggcttttggagggcgccgaggtcatgtggctgcccttgattgggtaacaaagaagcttatgtgcgagatcaacgtcatggaggcggtgcgggacatccggtttctccattctgaggcactgcttgctgttgctcagaaccgctggctccacatctatgacaatcagggcattgagctccactgtatccgccgctgtgaccgagtaacacggcttgagttcctgcccttccacttcctcctggctacagcttcagaaacagggtttctaacctacctggatgtgtcagtggggaagattgtggcagctctgaatgctcgagctgggcggctcgatgttatgagtcagaacccttacaatgccgtcatccatctcggacacagcaatggtactgtgtctttatggagtccagctatgaaggagccactggcaaagattctctgtcatcgtggtggggtccgggctgtggcagtagattctacaggcacgtacatggccacctctggcctagaccaccagctgaagatctttgacttgcgagggacgtaccagcctctgagcactcggaccctgccccatggagcagggcacctggccttctcccagaggggactgctggtggcgggaatgggtgacgttgtcaacatctgggcagggcagggcaaggccagcccaccctcccttgaacagccctacctcacccaccggctctcaggccctgtgcatggccttcagttctgcccctttgaagatgtgctgggggtggggcacactgggggcatcaccagcatgctggtccctggggccggtgagcccaacttcgatggcctggagagtaatccatacagaagccggaagcagcgccaggagtgggaggtgaaggccctgctagagaaggtacctgcagagcttatttgtctggacccacgagccctggccgaggtggatgtcatctccctggagcagggaaagaaggagcagatagagaggctgggctatgacccgcaggctaaggctcccttccagccaaagccaaagcagaagggccgcagctccacggcaagcctggtgaagaggaagaggaaggtcatggatgaggaacacagggacaaggtccggcagagccttcagcagcagcatcataaggaggcgaaggccaagcccacgggggcccggccatctgccctggacagatttgtgcgctgagccagactccagggttgcctgggaacagtctctccccaagatcacctgtagggaaatgagtgttccctggaacaaggaggtgggggcagtgtggccccttccccaactgggggtggacagctgtctcctggggtgggttggtattaaagaggaaagcgattttttgga

SEQ ID NO: 156266 - DNA, 2358 bp, Artificial Sequence
  derived and/or modified sequence
gtagttctgacatgtttagggagtggagttctgctaaaaagactagactaggacatttttaggcaagatggggaaactaatccagaaaaagaaaccgcaccgctacttagcccctggccccggacctgcctttcttttttaagtcactcttgcataagctgccgctcgcgataaggtgccaaaaactgttccgcccctctaaggagagcgtgccctcactcaagatggcacctagagagcttcatacctggtacgctgctgattggatgaaggacagagggcttccgggagttttcaagccgactgtgtggcagctgagaagagttttgcacgtggatcgccgttcgggtgggcgagatggagacagcccccaagccgggcaaggatgtcccgcccaagaaagacaaacttcagaccaagagaaagaaaccgcggcgatactgggaggaagagaccgttccgaccacagccggagcctctccagggcctcctcgtaacaagaagaatcgggagctccgtcctcagagaccaaaaaatgcttacatcttaaagaagtctcggatctctaagaagcctcaggtcccgaagaaaccccgagaatggaagaacccggagtcccagcgcggcttgtccggggcccaagatccattcccaggccccgcccccgtccctgtggaagtggtccagaagttctgtcgcattgacaaatcccgaaagctaccacattctaaagccaaaactcgaagccgacttgaggtggctgaagctgaggaagaggaaacaagtatcaaagctgctcgttctgagctgctgcttgctgaagaacctgggtttctggaaggggaggatggggaagacacagcaaagatatgccaggctgacattgtggaggctgtggacattgcaagtgcagccaagcactttgacttgaatctgcggcagtttggaccctacagactaaactactctcgaactggaagacacctggcttttggagggcgccgaggtcatgtggctgcccttgattgggtaacaaagaagcttatgtgcgagatcaacgtcatggaggcggtgcgggacatccggtttctccattctgaggcactgcttgctgttgctcagaaccgctggctccacatctatgacaatcagggcattgagctccactgtatccgccgctgtgaccgagtaacacggcttgagttcctgcccttccacttcctcctggctacagcttcagaaacagggtttctaacctacctggatgtgtcagtggggaagattgtggcagctctgaatgctcgagctgggcggctcgatgttatgagtcagaacccttacaatgccgtcatccatctcggacacagcaatggtactgtgtctttatggagtccagctatgaaggagccactggcaaagattctctgtcatcgtggtggggtccgggctgtggcagtagattctacaggcacgtacatggccacctctggcctagaccaccagctgaagatctttgacttgcgagggacgtaccagcctctgagcactcggaccctgccccatggagcagggcacctggccttctcccagaggggactgctggtggcgggaatgggtgacgttgtcaacatctgggcagggcagggcaaggccagcccaccctcccttgaacagccctacctcacccaccggctctcaggccctgtgcatggccttcagttctgcccctttgaagatgtgctgggggtggggcacactgggggcatcaccagcatgctggtccctggggccggtgagcccaacttcgatggcctggagagtaatccatacagaagccggaagcagcgccaggagtgggaggtgaaggccctgctagagaaggtacctgcagagcttatttgtctggacccacgagccctggccgaggtggatgtcatctccctggagcagggaaagaaggagcagatagagaggctgggctatgacccgcaggctaaggctcccttccagccaaagccaaagcagaagggccgcagctccacggcaagcctggtgaagaggaagaggaaggtcatggatgaggaacacagggacaaggtccggcagagccttcagcagcagcatcataaggaggcgaaggccaagcccacgggggcccggccatctgccctggacagatttgtgcgctgagccagactccagggttgcctgggaacagtctctccccaagatcacctgtagggaaatgagtgttccctggaacaaggaggtgggggcagtgtggccccttccccaactgggggtggacagctgtctcctggggtgggttggtattaaagaggaaagcgattttttgga

SEQ ID NO: 156267 - DNA, 968 bp, Artificial Sequence
  derived and/or modified sequence
aagtctcggatctctaagaagcctcaggtcccgaagaaaccccgagaatggaagaacccggagtcccagcgcggcttgtccggggcccaagatccattcccaggccccgcccccgtccctgtggaagtggtccagaagttctgtcgcattgacaaatcccgaaagctaccacattctaaagccaaaactcgaagccgacttgaggtggctgaagctgaggaagaggaaacaagtatcaaagctgctcgttctgagctgctgcttgctgaagaacctgggtttctggaaggggaggatggggaagacacagcaaagatatgccaggctgacattgtggaggctgtggacattgcaagtgcagccaagtttggaccctacagactaaactactctcgaactggaagacacctggcttttggagggcgccgaggtcatgtggctgcccttgattgggtaacaaagaagcttatgtgcgagatcaacgtcatggaggcggtgcgggacatccggtttctccattctgaggcactgcttgctgttgctcagaaccgctggctccacatctatgacaatcagggcattgagctccactgtatccgccgctgtgaccgagtaacacggcttgagttcctgcccttccacttcctcctggctacagcttcagaaacagggtttctaacctacctggatgtgtcagtggggaagattgtggcagctctgaatgctcgagctgggcggctcgatgttatgagtcagaacccttacaatgccgtcatccatctcggacacagcaatggtactgtgtctttatggagtccagctatgaaggagccactggcaaagattctctgtcatcgtggtggggtccgggctgtggcagtagattctacaggcacgtacatggccacctctggcctagaccaccagctgaagatctttgacttgcgagggacgtaccagcctctgag

SEQ ID NO: 156268 - DNA, 968 bp, Artificial Sequence
  derived and/or modified sequence
aagtctcggatctctaagaagcctcaggtcccgaagaaaccccgagaatggaagaacccggagtcccagcgcggcttgtccgggacccaagatccattcccaggccccgcccccgtccctgtggaagtggtccagaagttctgtcgcattgacaaatcccgaaagctaccacattctaaagccaaaactcgaagccgacttgaggtggctgaagctgaggaagaggaaacaagtatcaaagctgctcgttctgagctgctgcttgctgaagaacctgggtttctggaaggggaggatggggaagacacagcaaagatatgccaggctgacattgtggaggctgtggacattgcaagtgcagccaagtttggaccctacagactaaactactctcgaactggaagacacctggcttttggagggcgccgaggtcatgtggctgcccttgattgggtaacaaagaagcttatgtgcgagatcaacgtcatggaggcggtgcgggacatccggtttctccattctgaggcactgcttgctgttgctcagaaccgctggctccacatctatgacaatcagggcattgagctccactgtatccgccgctgtgaccgagtaacacggcttgagttcctgcccttccacttcctcctggctacagcttcagaaacagggtttctaacctacctggatgtgtcagtggggaagattgtggcagctctgaatgctcgagctgggcggctcgatgttatgagtcagaacccttacaatgccgtcatccatctcggacacagcaatggtactgtgtctttatggagtccagctatgaaggagccactggcaaagattctctgtcatcgtggtggggtccgggctgtggcagtagattctacaggcacgtacatggccacctctggcctagaccaccagctgaagatctttgacttgcgagggacgtaccagcctctgag

SEQ ID NO: 156269 - protein, 267 aa, Artificial Sequence
  derived and/or modified sequence
MHLLLFQLLVLLPLGKTTRHQDGRQNQSSLSPVLLPRNQRELPTGNHEEAEEKPDLFVAVPHLVATSPAGEGQRQREKMLSRFGRFWKKPEREMHPSRDSDSEPFPPGTQSLIQPIDGMKMEKSPLREEAKKFWHHFMFRKTPASQGVILPIKSHEVHWETCRTVPFSQTITHEGCEKVVVQNNLCFGKCGSVHFPGAAQHSHTSCSHCLPAKFTTMHLPLNCTELSSVIKVVMLVEECQCKVKTEHEDGHILHAGSQDSFIPGVSA

SEQ ID NO: 156270 - DNA, 804 bp, Artificial Sequence
  derived and/or modified sequence
atgcacctgttgctgttccagctcctcgtgctgctccctctgggcaagacaacccgtcaccaggacgggagacagaaccagagctcactgagcccagtgctgcttcccagaaaccagcgagagctgccaactgggaatcacgaggaggcagaagagaagcctgatctgttcgtagcggtcccacacttagttgccacatccccggccggagaaggacaacgtcaaagagaaaaaatgctgtcccgttttggcaggttctggaagaaacccgaacgagagatgcacccgtcgagggacagtgactctgagccctttccacccggaacccagtctttgatccagcccatcgacggtatgaagatggagaagagccctctacgcgaggaggcaaaaaaattctggcatcacttcatgttcaggaagaccccagcgagccagggtgtcatcctacccattaagtcccacgaggttcactgggaaacctgtaggacggtacccttctcccagacaatcacccacgaagggtgtgaaaaggtcgtggtgcagaacaacctgtgtttcggcaagtgtggctcggtccacttccccggtgctgcacagcacagccacacttcctgttcccactgcttacccgcgaaatttacaacgatgcatcttcctctgaactgtaccgagctgagttctgtgatcaaggtggtgatgctggtggaggagtgtcagtgcaaggtgaaaacagaacatgaagacgggcatatcctacacgctggctcacaggactcctttatccccggcgtgtccgcatag

SEQ ID NO: 156271 - DNA, 804 bp, Artificial Sequence
  derived and/or modified sequence
atgcacctgctgctcttccagctgctggtgctgctgcccctgggcaagaccaccaggcaccaggacggccggcagaaccagagcagcctgagccctgtgctgctgcccaggaaccagcgggagctgcccaccggcaaccacgaggaggccgaggagaagccagacctgtttgtggccgtgccccacctggtggccaccagccctgctggggagggccagaggcagcgggagaagatgctgagcagatttggccgcttctggaagaagccagagcgggagatgcaccccagccgggacagcgacagcgagcccttccccccaggcacccagagcctcatccagcccattgatggcatgaagatggagaagagccccctgcgggaggaggccaagaagttctggcaccacttcatgttcaggaagaccccagccagccagggcgtcatcctgcccatcaagagccatgaggtgcactgggagacctgcaggacagtgcccttcagccagaccatcacccatgagggctgtgagaaggtggtggtgcagaacaacctgtgctttggaaaatgtggctctgtgcacttccctggggccgcccagcacagccacaccagctgcagccactgcctgcctgccaagttcaccaccatgcacctgcccctgaactgcacagagctgagcagcgtcatcaaggtggtgatgctggtggaggagtgccagtgcaaggtgaagacagaacatgaagatggccacatcctgcatgctggcagccaggacagcttcatccctggggtgtctgcctag

SEQ ID NO: 156272 - DNA, 804 bp, Artificial Sequence
  derived and/or modified sequence
atgcacctgctgctgttccagctgctggtgctgctgcccctgggcaaaaccacacgccaccaggacgggaggcagaatcagtccagcctatcccctgtcttgctccctcgcaaccagagagaattgcctaccggcaaccacgaggaggcagaggagaagccagatctgttcgtcgctgttcctcatctggtggcgacaagtccggctggcgagggtcagcgccagagggagaagatgctgtcccggtttggtaggttctggaagaagcctgagcgcgagatgcacccaagcagagactccgatagcgagcccttcccccctggtacacagtctctgatccagccaatcgacggcatgaaaatggagaaaagtccgcttcgggaggaggcaaaaaagttctggcatcattttatgttccggaagaccccagcctctcagggcgttatcttgcctatcaagtcacacgaggtacactgggaaacctgccgaactgtgccattttcccagactataacacacgaaggctgtgaaaaggtcgtggtccagaacaacctgtgcttcgggaagtgcgggtctgttcacttcccaggcgctgctcagcattctcacacaagctgctctcactgcctgcctgcgaagtttacaaccatgcatctgcctttgaactgcacagagctgtcttcagtgatcaaagtagtgatgttggttgaggaatgtcagtgcaaagtcaagacagaacacgaagacggacacatcctgcatgcgggctctcaggattcatttattccgggcgtcagcgcctag

SEQ ID NO: 156273 - DNA, 804 bp, Artificial Sequence
  derived and/or modified sequence
atgcatctactgcttttccagctactcgtcttattgcccttgggcaaaacaacacggcaccaggacggccgacagaaccagtcgtctttatctccggtgctgttaccccgtaatcagcgagaacttcctacggggaaccatgaggaagccgaagaaaaaccagatctgttcgtagcagtcccccaccttgtggctacatcgcctgcaggcgaagggcagcggcagagagagaagatgctgtcaaggtttggacggttctggaagaagcctgagagggaaatgcacccaagtagagattcagactccgagccatttcctccagggacacagagcctaattcagcctattgatggcatgaagatggaaaagtccccactgcgggaagaagctaagaagttctggcatcactttatgttcaggaaaacacctgccagccagggcgtgatcctgccgatcaaaagccacgaggtgcattgggaaacctgtagaacggttccattctcacagaccatcacacacgaaggctgcgaaaaagtggtcgtccagaataatctgtgcttcggcaaatgcgggagtgtgcatttcccgggagctgcccagcacagtcacaccagctgttcgcattgcttacccgctaaattcaccaccatgcacctcccattgaactgcaccgaactgagctctgttattaaggttgtgatgctagtggaggaatgtcaatgtaaggtgaaaacagaacatgaggacggacacatcctgcacgcaggatcccaggattcctttattcccggagttagcgcatag

SEQ ID NO: 156274 - DNA, 1215 bp, Artificial Sequence
  derived and/or modified sequence
ctttgggcctcatcatttacaaaagaagcttgggcccctgacagcatgcatctcctcttatttcagctgctggtactcctgcctctaggaaagaccacacggcaccaggatggccgccagaatcagagttctctttcccccgtactcctgccaaggaatcaaagagagcttcccacaggcaaccatgaggaagctgaggagaagccagatctgtttgtcgcagtgccacaccttgtagccaccagccctgcaggggaaggccagaggcagagagagaagatgctgtccagatttggcaggttctggaagaagcctgagagagaaatgcatccatccagggactcagatagtgagcccttcccacctgggacccagtccctcatccagccgatagatggaatgaaaatggagaaatctcctcttcgggaagaagccaagaaattctggcaccacttcatgttcagaaaaactccggcttctcagggggtcatcttgcccatcaaaagccatgaagtacattgggagacctgcaggacagtgcccttcagccagactataacccacgaaggctgtgaaaaagtagttgttcagaacaacctttgctttgggaaatgcgggtctgttcattttcctggagccgcgcagcactcccatacctcctgctctcactgtttgcctgccaagttcaccacgatgcacttgccactgaactgcactgaactttcctccgtgatcaaggtggtgatgctggtggaggagtgccagtgcaaggtgaagacggagcatgaagatggacacatcctacatgctggctcccaggattcctttatcccaggagtttcagcttgaagagctatcccactattacctttgaaaagcaaaaccacaacagcaaagatgctgattattcagtctgaaaatgttaagtgggtacataacattttcagggaaaggtgacttgaaacgtagttttaaattagaacgatagaggaaatgatattagtctagttattggtacacgtttgagaccttgtctcagctctgccactaactagccgtagaatgttaagttgtaaaacctttctccatctaaagattttcatctataaatgacggacccgacctagatgattgctaaaatcctttccactactaatattccgtgatgcattttctccaagtttgggtaaaagccctccatctaaagaaggaaaa

SEQ ID NO: 156275 - DNA, 804 bp, Artificial Sequence
  derived and/or modified sequence
atgcacctgctgctgttccagctgctggtgctgctgcccctgggcaagaccaccagacaccaggacggcagacagaaccagagcagcctgagccccgtgctgctgcccagaaaccagagagagctgcccaccggcaaccacgaggaggccgaggagaagcccgacctgttcgtggccgtgccccacctggtggccaccagccccgccggcgagggccagagacagagagagaagatgctgagcagattcggcagattctggaagaagcccgagagagagatgcaccccagcagagacagcgacagcgagcccttcccccccggcacccagagcctgatccagcccatcgacggcatgaagatggagaagagccccctgagagaggaggccaagaagttctggcaccacttcatgttcagaaagacccccgccagccagggcgtgatcctgcccatcaagagccacgaggtgcactgggagacctgcagaaccgtgcccttcagccagaccatcacccacgagggctgcgagaaggtggtggtgcagaacaacctgtgcttcggcaagtgcggcagcgtgcacttccccggcgccgcccagcacagccacaccagctgcagccactgcctgcccgccaagttcaccaccatgcacctgcccctgaactgcaccgagctgagcagcgtgatcaaggtggtgatgctggtggaggagtgccagtgcaaggtgaagaccgagcacgaggacggccacatcctgcacgccggcagccaggacagcttcatccccggcgtgagcgcctag

SEQ ID NO: 156276 - protein, 291 aa, Artificial Sequence
  derived and/or modified sequence
SAGGGGAGSRLQAEMLQMDLIDATGDSTPDEPDVHFSKKFLNIFMSGRSRSSSAESFGLFSCIINREEQEQTHRTIFRFVPRHEDEPELEVDDPLLVELQAEDYWYEAYNMRTGARGFFTAYYAIEVTKEPEHMAALAKNSDWVDQFRVKFLGSVQVPYHKGDVVLSAAMQKIATTRRLTVHFNPPSSCVLEISVRGVKIGVKADDSQEAKGNKCSHFFQLKNISFRGYHPKNNKYFGFITKHLADHRFACHVFVSEDSTKALAESVGRAFQQFHKQFVEYTCPTEDIYLE

SEQ ID NO: 156277 - protein, 711 aa, Artificial Sequence
  derived and/or modified sequence
MAERESGGLGGGAASPPAASPFLGLHIASPPNFRLTHDISLEEFEDEDLSEITDECGISLQCKDTLSLRPPRAGLLSAGGGGAGSRLQAEMLQMDLIDATGDTPGAEDDEEDDDEERAARRPGAGPPKAESGQEPASRGQGQSQGQSQGPGSGDTYRPKRPTTLNLFPQVPRSQDTLNNNSLGKKHSWQDRVSRSSSPLKTGEQTPPHEHICLSDELPPQSGPAPTTDRGTSTDSPCRRSTATQMAPPGGPPAAPPGGRGHSHRDRIHYQADVRLEATEEIYLTPVQRPPDAAEPTSAFLPPTESRMSVSSDPDPAAYPSTAGRPHPSISEEEEGFDCLSSPERAEPPGGGWRGSLGEPPPPPRASLSSDTSALSYDSVKYTLVVDEHAQLELVSLRPCFGDYSDESDSATVYDNCASVSSPYESAIGEEYEEAPRPQPPACLSEDSTPDEPDVHFSKKFLNVFMSGRSRSSSAESFGLFSCIINGEEQEQTHRAIFRFVPRHEDELELEVDDPLLVELQAEDYWYEAYNMRTGARGVFPAYYAIEVTKEPEHMAALAKNSDWVDQFRVKFLGSVQVPYHKGNDVLCAAMQKIATTRRLTVHFNPPSSCVLEISVRGVKIGVKADDSQEAKGNKCSHFFQLKNISFCGYHPKNNKYFGFITKHPADHRFACHVFVSEDSTKALAESVGRAFQQFYKQFVEYTCPTEDIYLE

SEQ ID NO: 156278 - DNA, 2136 bp, Artificial Sequence
  derived and/or modified sequence
atggctgaaagagagagcggaggactcggcggcggcgccgcttctccccccgccgcctctcccttccttggtctgcatatagcctctccgcccaatttcaggttgacacatgacataagtttagaggagttcgaagatgaggatttaagtgagatcaccgatgagtgcggaatctctcttcaatgcaaggataccttgagtctgcgccctccgcgcgcgggactccttagtgccggtggcgggggtgcagggagcaggctgcaggctgagatgcttcagatggacctgattgacgcgaccggtgacaccccgggcgcagaagacgacgaagaggacgacgatgaagagagggcagcgagacgtccgggggccggtccaccgaaagcagaatcgggtcaggagcccgctagtcgaggccaaggccagtcacaaggccagagccaaggccccggatccggggatacctaccgccccaagaggccaacaaccttaaacctctttccacaagtgccgagaagccaggacactctgaacaataatagtctggggaaaaagcatagctggcaggaccgggtgagcagatcatcctctccattgaagaccggagagcaaaccccaccccacgagcacatctgcttgtcggacgaacttcctccccaaagcggacctgctcctactactgacagggggacatcaaccgactcaccgtgtaggcgcagcacagccacccagatggctcccccaggtggacccccagccgctccacctggaggaagagggcacagtcacagggaccgcatccactaccaagccgatgtgcggctggaagccaccgaagagatctatctgaccccagtgcaacggccaccagatgccgcagaaccgacaagcgcattccttccgcctacagagagccggatgagcgtcagttcggaccccgaccctgctgcctatccttctacagccggaaggccacacccatctatcagcgaggaggaagaaggctttgattgcctcagctctccagaacgcgctgagcccccgggcggaggatggcggggaagtctgggcgaacccccgccccccccccgggcctctctctctagtgatacttccgccctgtcgtacgatagcgtgaagtatacactggtggtcgatgaacacgcccagctggagctcgttagcctgagaccttgttttggagactattcagatgagtcagacagtgccacagtgtacgacaattgcgcgagcgtaagctcaccttatgagtccgcaatcggcgaagagtatgaggaagctccgcgccctcaacctcctgcctgcctcagtgaggacagtaccccggatgagccagacgtccacttttccaaaaagttcctcaacgtgttcatgagcgggagatcccgctccagttccgctgagtcctttggtctgttcagctgcatcattaacggtgaggaacaggaacagacacatagagccatatttcggtttgtgcctagacacgaggacgagcttgaactggaggtggatgatccacttctggtggaactgcaagccgaggattactggtatgaggcgtacaatatgagaacaggtgctcgcggggtgtttcctgcttattatgccattgaagtcactaaggagcccgagcacatggctgctctggccaaaaacagcgattgggtggaccagttcagagttaagttcttaggatcggtgcaggtcccctaccataaaggaaatgacgtcctgtgcgccgccatgcagaagatagcaactacgagacgtttaacagtgcattttaaccccccatctagctgcgtactggaaatctcggtgagaggagtgaagattggagtgaaagcagacgactctcaggaagctaagggcaataagtgtagccacttcttccagctgaagaacataagcttttgcgggtatcatcccaaaaacaataagtattttgggttcattaccaagcaccccgcagatcaccgatttgcctgtcatgtgttcgtttctgaagactcaacaaaagcactcgcggagtccgtgggcagagcattccagcagttctataagcagttcgttgagtatacatgccccactgaagacatctatctggaatag

SEQ ID NO: 156279 - DNA, 2136 bp, Artificial Sequence
  derived and/or modified sequence
atggccgagcgggagagcggcggcctgggcggcggggccgccagccccccagctgccagccccttcctgggcctgcacatcgccagcccccccaacttccggctgacccatgacatcagcctggaggagtttgaagatgaggacctgtctgagatcacagatgaatgtggcatcagcctgcagtgcaaggacaccctgagcctgcggccccccagggctggcctgctgtctgctgggggcggcggggccggcagccggctgcaggccgagatgctgcagatggacctgattgatgccaccggggacaccccaggagcagaagatgatgaagaagatgatgatgaggagcgggccgcccggcggcctggggccggcccccccaaggccgagagcggccaggagcccgccagccggggccagggccagagccagggccagagccagggccctggcagcggggacacctaccggcccaagaggcccaccaccctgaacctcttcccccaggtgcccaggagccaggacaccctgaacaacaacagcctgggcaagaagcacagctggcaggacagagtgagccgcagcagcagccccctgaagacaggagagcagaccccacctcatgagcacatctgcctgagtgatgagctgcccccccagagcggccctgcccccaccacagaccggggcaccagcacagacagcccctgccgccgcagcacagccacccagatggcccctcctgggggccccccagctgcccctcctgggggccggggccacagccaccgggaccgcatccactaccaggctgatgtgcggctggaggccacagaggagatctacctgacccctgtgcagaggcccccagatgctgctgagcccaccagcgccttcctgcccccaacagagagcaggatgtctgtgtccagtgaccctgaccctgctgcctaccccagcacagctggccggccccaccccagcatcagcgaggaggaggagggctttgactgcctgagcagccctgagagagctgagcccccaggcggcggctggaggggcagcctgggggagcccccacctccaccccgggccagcctgagcagtgacaccagcgccctgtcctatgacagcgtgaagtacaccctggtggtggatgagcacgcccagctggagctggtgtccctgcggccctgcttcggggactacagtgatgaaagtgacagcgccaccgtgtatgacaactgtgcctctgtgagcagcccctatgaaagtgccatcggggaggagtatgaggaggccccccggccccagcccccagcctgcctgtctgaggacagcaccccagatgagccagatgtgcacttcagcaagaagttcctgaatgtgttcatgagcggccgcagccgcagcagcagcgctgagagctttggcctcttcagctgcatcatcaatggagaggagcaggagcagacccaccgggccatcttccgctttgtgcccaggcatgaagatgagctggagctggaggtggatgaccccctgctggtggagctgcaggccgaggactactggtatgaggcctacaacatgaggactggagcccggggcgtcttccctgcctactatgccatcgaggtgaccaaggagcctgagcacatggccgccctggccaagaacagcgactgggtggaccagttccgggtgaagttcctgggctctgtgcaggtgccctaccacaagggaaatgatgtgctgtgtgccgccatgcagaagatcgccaccacccggcggctgactgtgcacttcaacccccccagcagctgtgtgctggagatctctgtgcggggcgtgaagattggagtgaaggcagatgacagccaggaggccaagggcaacaagtgcagccacttcttccagctgaagaacatctccttctgtggctaccaccccaagaacaacaagtacttcggcttcatcaccaagcaccctgctgaccacagatttgcctgccacgtgtttgtgtctgaggacagcaccaaggccctggccgagagcgtgggccgggccttccagcagttctacaagcagtttgtggagtacacctgccccacagaggacatctacctggagtag

SEQ ID NO: 156280 - DNA, 3050 bp, Artificial Sequence
  derived and/or modified sequence
agtcccgcgggccgtgcgcggtgctgtgccgcgccctgccagacacaggtgcgcccgcctagcccgaactccgcggcggcggctgccctctcgccgcgcctccgcctccttcgcagccgccgcctcctccgcgccgcgctccgcccggatggccagggctgtgcccgagaatggcggagcgagaaagcggcggcctgggagggggggccgcgtccccgcccgccgcctccccgttcctggggctgcacatcgcttcgcctcccaatttcaggctcacccatgacatcagcctggaggagtttgaggatgaagacctctcggagatcactgatgagtgtggcatcagcttacagtgcaaagacaccctgtccttacggcccccgcgcgccgggctgctctctgcgggcggcggcggcgcggggagccggttgcaggccgagatgctgcagatggacctgatcgacgcgacgggggacactcccggggccgaggacgacgaggaggacgacgacgaggagcgcgcggcccggcggccgggagcggggccgcccaaggccgagtccggccaggagccggcgtcccgcggccagggccagagccaaggccagagccagggcccgggcagcggggacacgtaccggcccaagcggcccaccacgctcaacctctttccgcaggtgccgcggtctcaggacacactgaataataattctctgggcaaaaagcacagttggcaggatcgggtgtctcgatcatcctcacccctgaagacaggggagcagacaccaccgcatgaacacatctgcctgagcgatgagctgcccccccagagcggccccgcccccaccacagatcgaggcacctccaccgacagcccttgccgccgcagcacagccacccagatggcacctccgggtggtccccctgctgccccgcctgggggtcggggccactcgcatcgagaccgaatccactaccaggccgatgtgcgactagaggccactgaggagatctacctgaccccagtgcagaggcccccagacgctgcagagcccacctccgccttcctgccgcccactgagagccggatgtcagtcagctccgatccagaccctgccgcctacccctccacggcagggcggccgcacccctccatcagtgaagaggaagagggcttcgactgcctgtcgtccccagagcgggctgagcccccaggcggagggtggcgggggagcctgggggagccgccgccacctccacgggcctctctgagctcggacaccagcgccctgtcctatgactctgtcaagtacacgctggtggtagatgagcatgcacagctggagctggtgagcctgcggccgtgcttcggagactacagtgacgagagtgactctgccaccgtctatgacaactgtgcctccgtctcctcgccctatgagtcggccatcggagaggaatatgaggaggccccgcggccccagccccctgcctgcctctccgaggactccacgcctgatgaacccgacgtccatttctccaagaaattcctgaacgtcttcatgagtggccgctcccgctcctccagtgctgagtccttcgggctgttctcctgcatcatcaacggggaggagcaggagcagacccaccgggccatattcaggtttgtgcctcgacacgaagacgaacttgagctggaagtggatgaccctctgctagtggagctccaggctgaagactactggtacgaggcctacaacatgcgcactggtgcccggggtgtctttcctgcctattacgccatcgaggtcaccaaggagcccgagcacatggcagccctggccaaaaacagtgactgggtggaccagttccgggtgaagttcctgggctcagtccaggttccctatcacaagggcaatgacgtcctctgtgctgctatgcaaaagattgccaccacccgccggctcaccgtgcactttaacccgccctccagctgtgtcctggagatcagcgtgcggggtgtgaagataggcgtcaaggccgatgactcccaggaggccaaggggaataaatgtagccactttttccagttaaaaaacatctctttctgcggatatcatccaaagaacaacaagtactttgggttcatcaccaagcaccccgccgaccaccggtttgcctgccacgtctttgtgtctgaagactccaccaaagccctggcagagtccgtggggagagcattccagcagttctacaagcagtttgtggagtacacctgccccacagaagatatctacctggagtagctgtgcagccccgccctctgcgtcccccagccctcaggccagtgccaggacagctggctgctgacaggatgtggcactgcttgaggaggggcacctgccaccgccagaggacaaggaagtgggggccgctggcccagggtaggggagggtggggcaatggggagaggcaaatgcagtttattgtaatatatgggattagattcatctatggagggcagagtgggctgcctggggattgggagggacagggcttggggagcaggtctctggcagagaaggatgtccgttccaggagcacacggccctgccccatcctgggccttacctcccctgccagggctcgggcgctgtggctcctgccttgatgaagcccgtgtcctgccttgatgaagcctgtgccacctgcaagtgcccgccctgcccctgccccaacccccaccgaagagccctgagctcaggctgagcccagccacctcccaaggactttccagtgaggaaatggcaacacgtggaggtgaagtccctgttctcagctccgtcatctgcggggcttctgggtggctcctgccactgacctcaccggcatgctggcctgtggcaggcctaggacctcaggcggggaggaggagctgccgcaaggccctgtcccagcagaagagggaggcttcctgactgacacaggccagccccatcttggtcctgtcaccctggccccaactattaaagtgccatttcctgtctgga

SEQ ID NO: 156281 - DNA, 2136 bp, Artificial Sequence
  derived and/or modified sequence
atggccgagcgggagagcggcggcctgggcggcggcgccgccagcccccctgccgcgtcccctttcctcggtttgcacatcgctagccccccaaactttcggcttacccatgatatcagccttgaagagtttgaagacgaagatctgtctgagatcaccgacgagtgtggaatttccctgcagtgcaaagacactctgtccctcaggccgcccagggctgggctgctgtcagctggcggaggaggtgcagggagccgcctccaggctgaaatgcttcagatggacttaattgatgcaacaggagatacacctggtgcagaagatgacgaggaagatgacgatgaggagcgcgcagcccgcaggccgggcgctggcccaccaaaagcagagagtgggcaggaacccgcttcaagaggtcaggggcagtcacaggggcagagccagggacctggcagtggcgacacatatcgacctaaaagaccaactacattaaacttgtttcctcaggtgcccagaagccaagacactctgaataacaattccctcggcaaaaagcactcctggcaggatagggtctcccgcagctcgagcccactgaaaacgggcgaacagacacctcctcacgaacacatttgcctaagtgatgagctgcctcctcagtcaggcccggcacctacaaccgatagaggtacttctacggactccccctgcaggaggagcactgccactcagatggccccaccaggcggacccccggccgctcctcctggcggtcgaggccactctcatagggatagaatccattatcaggccgatgtcaggttggaggccacagaagaaatctaccttacacccgtgcaacgacctcctgatgccgcggagccaactagcgcatttctgccccctacagaaagtaggatgtcagtgtccagcgatccagatcccgccgcttaccccagtacggcaggtaggccacacccctctataagtgaagaggaggaggggtttgactgcctgtcaagcccagaaagagccgaaccgccagggggtggatggcggggatccctaggggaacccccccccccgccccgcgcttcattatcttctgatacgtcagctctgagttacgatagtgtcaagtatacccttgtagttgacgaacatgctcagctggagctggtgtctctaagaccctgttttggcgattacagtgatgagtccgatagtgctaccgtttatgataactgcgcttccgttagcagcccctacgaaagcgctattggtgaagagtacgaagaagccccgaggccacagccccccgcatgtctgagcgaagacagtacgcccgacgagcccgacgtgcatttttctaagaaatttttgaatgtctttatgagcggccggagcaggtcgtcaagtgccgaatcttttggattattctcttgcataatcaatggggaagagcaggagcaaacccaccgcgccatttttcggtttgttccccgtcacgaggacgagctggaactcgaggtggatgatccacttctggtggagctacaggctgaggattactggtacgaagcctataacatgcggacaggggcccgtggcgtctttcccgcctattacgcaatcgaagttaccaaggaacccgaacacatggcagcacttgctaaaaacagcgactgggtggatcaattccgggtgaaattcctgggctcggtgcaggtcccataccataaaggaaacgacgtgctctgtgcggcaatgcagaagattgccacaacccggagacttaccgttcacttcaatcctccaagcagttgcgtcctagaaatctcggtccgtggagtaaagatcggtgtgaaggcggacgattctcaggaagccaaggggaataagtgcagccacttctttcaactcaaaaatataagcttctgcggctatcatcctaagaataataagtattttggttttattaccaaacatcctgccgatcataggtttgcctgccatgtctttgtgagtgaggatagcactaaggctttggccgaaagtgtgggcagagcatttcagcagttctacaagcagttcgtggagtacacctgtcctactgaggacatctacctggagtag

SEQ ID NO: 156282 - DNA, 2136 bp, Artificial Sequence
  derived and/or modified sequence
atggcagagcgggagtccggtggcctggggggtggcgcagcttccccacctgccgctagcccattcttgggactccatatcgcctcaccaccgaattttaggctgacccatgacatctccctggaggaattcgaagacgaggacttgtcagaaattacagacgaatgcgggatcagtctacagtgcaaagataccctgagtttgcggcctcccagagcgggactcctcagcgctggcggaggaggagccggtagcagactgcaggccgagatgcttcagatggacctcattgatgctactggggataccccaggagcagaagacgatgaggaggacgacgatgaagaaagagctgccaggagacctggagccggtccacctaaggcggagtcaggtcaagagcccgcttcccggggacaggggcagagtcagggccaatcgcaaggtccgggatcgggagatacttacaggccgaaacggcctaccaccctgaatctctttccccaggtccctcggtcacaggacacgctcaataacaattctctgggtaaaaaacactcgtggcaggaccgagtcagtcgaagctcaagtcctcttaaaactggggagcaaactccaccccacgaacacatctgtctgagcgatgagctgcctcctcagtctggcccagctccgacgacagatcgcggaactagtaccgacagcccctgtcgcaggagcactgcaacccagatggcccctccaggaggtcctcctgcagccccaccagggggacggggtcacagtcatcgtgaccgcatacattatcaggcagacgtgagattggaggcaacagaggaaatttacttaacgccagttcaacgtcctcccgacgccgctgaacccacctctgcattcttgccacccactgagtcaaggatgtctgtctcatccgaccctgaccccgcagcatacccgtcaactgctggtcgaccccatccatctattagtgaagaggaagagggttttgattgcttgagctctcctgaaagagcagagcccccaggcggaggatggcgcggttctctgggggagcctcctccccctccccgtgcctcactcagcagcgacaccagcgctctgagttatgactccgtcaaatataccctggtggtggacgaacatgcccagctcgagctcgtgagcctgaggccttgctttggcgactactcagatgaatcggactccgcaacagtctatgataattgcgctagtgtctcttctccttacgaatcggccatcggggaagaatacgaggaggcacctcggccacaacctccagcttgcttatctgaggatagtactccagacgagcctgacgtgcacttcagtaaaaaattcctaaacgtttttatgtctggcaggagtagatccagctccgctgagtcattcggtctcttttcctgtattatcaatggagaggagcaggaacaaacacaccgtgcaatcttcagattcgtgcccaggcacgaagatgaactggaactcgaagtcgacgacccccttttggtcgagctacaggccgaggattattggtatgaggcttacaacatgcgcaccggcgctaggggagtctttcctgcgtactacgccatagaggtaacaaaggaacctgagcatatggcggctttggccaagaattccgactgggtcgaccagtttcgggtgaaattcctgggatccgtgcaagtgccatatcacaaaggaaatgacgttctctgcgcggcaatgcagaagattgctaccactagaagactgacggtgcactttaatcccccatcttcctgcgtcctcgaaatttccgtccgaggggttaagatcggagtgaaggctgatgactcccaggaggctaaaggaaataagtgttctcatttctttcagctcaagaacatctccttctgcgggtatcaccctaagaataataaatactttggctttatcaccaaacaccccgcagaccatcggttcgcatgtcacgtgttcgtgagcgaagactctactaaggccctcgccgagagcgtcggtagggcttttcagcagttttacaaacagtttgtggaatacacctgtccaaccgaggatatttatcttgaatag

SEQ ID NO: 156283 - DNA, 2136 bp, Artificial Sequence
  derived and/or modified sequence
atggccgagagagagagcggcggcctgggcggcggcgccgccagcccccccgccgccagccccttcctgggcctgcacatcgccagcccccccaacttcagactgacccacgacatcagcctggaggagttcgaggacgaggacctgagcgagatcaccgacgagtgcggcatcagcctgcagtgcaaggacaccctgagcctgagaccccccagagccggcctgctgagcgccggcggcggcggcgccggcagcagactgcaggccgagatgctgcagatggacctgatcgacgccaccggcgacacccccggcgccgaggacgacgaggaggacgacgacgaggagagagccgccagaagacccggcgccggcccccccaaggccgagagcggccaggagcccgccagcagaggccagggccagagccagggccagagccagggccccggcagcggcgacacctacagacccaagagacccaccaccctgaacctgttcccccaggtgcccagaagccaggacaccctgaacaacaacagcctgggcaagaagcacagctggcaggacagagtgagcagaagcagcagccccctgaagaccggcgagcagacccccccccacgagcacatctgcctgagcgacgagctgcccccccagagcggccccgcccccaccaccgacagaggcaccagcaccgacagcccctgcagaagaagcaccgccacccagatggccccccccggcggcccccccgccgccccccccggcggcagaggccacagccacagagacagaatccactaccaggccgacgtgagactggaggccaccgaggagatctacctgacccccgtgcagagaccccccgacgccgccgagcccaccagcgccttcctgccccccaccgagagcagaatgagcgtgagcagcgaccccgaccccgccgcctaccccagcaccgccggcagaccccaccccagcatcagcgaggaggaggagggcttcgactgcctgagcagccccgagagagccgagccccccggcggcggctggagaggcagcctgggcgagcccccccccccccccagagccagcctgagcagcgacaccagcgccctgagctacgacagcgtgaagtacaccctggtggtggacgagcacgcccagctggagctggtgagcctgagaccctgcttcggcgactacagcgacgagagcgacagcgccaccgtgtacgacaactgcgccagcgtgagcagcccctacgagagcgccatcggcgaggagtacgaggaggcccccagaccccagccccccgcctgcctgagcgaggacagcacccccgacgagcccgacgtgcacttcagcaagaagttcctgaacgtgttcatgagcggcagaagcagaagcagcagcgccgagagcttcggcctgttcagctgcatcatcaacggcgaggagcaggagcagacccacagagccatcttcagattcgtgcccagacacgaggacgagctggagctggaggtggacgaccccctgctggtggagctgcaggccgaggactactggtacgaggcctacaacatgagaaccggcgccagaggcgtgttccccgcctactacgccatcgaggtgaccaaggagcccgagcacatggccgccctggccaagaacagcgactgggtggaccagttcagagtgaagttcctgggcagcgtgcaggtgccctaccacaagggcaacgacgtgctgtgcgccgccatgcagaagatcgccaccaccagaagactgaccgtgcacttcaacccccccagcagctgcgtgctggagatcagcgtgagaggcgtgaagatcggcgtgaaggccgacgacagccaggaggccaagggcaacaagtgcagccacttcttccagctgaagaacatcagcttctgcggctaccaccccaagaacaacaagtacttcggcttcatcaccaagcaccccgccgaccacagattcgcctgccacgtgttcgtgagcgaggacagcaccaaggccctggccgagagcgtgggcagagccttccagcagttctacaagcagttcgtggagtacacctgccccaccgaggacatctacctggagtag

SEQ ID NO: 156284 - protein, 941 aa, Artificial Sequence
  derived and/or modified sequence
MASPRSSGQPGPPPPPPPPPARLLLLLLLPLLLPLAPGAWGWARGAPRPPPSSPPLSIMGLMPLTKEVAKGSIGRGVLPAVELAIEQIRNESLLRPYFLDLRLYDTECDNAKGLKAFYDAIKYGPNHLMVFGGVCPSVTSIIAESLQGWNLVQLSFAATTPVLADKKKYPYFFRTVPSDNAVNPAILKLLKHYQWKRVGTLTQDVQRFSEVRNDLTGVLYGEDIEISDTESFSNDPCTSVKKLKGNDVRIILGQFDQNMAAKVFCCAYEENMYGSKYQWIIPGWYEPSWWEQVHTEANSSRCLRKNLLAAMEGYIGVDFEPLSSKQIKTISGKTPQQYEREYNNKRSGVGPSKFHGYAYDGIWVIAKTLQRAMETLHASSRHQRIQDFNYTDHTLGRIILNAMNETNFFGVTGQVVFRNGERMGTIKFTQFQDSREVKVGEYNAVADTLEIINDTIRFQGSEPPKDKTIILEQLRKISLPLYSILSALTILGMIMASAFLFFNIKNRNQKLIKMSSPYMNNLIILGGMLSYASIFLFGLDGSFVSEKTFETLCTVRTWILTVGYTTAFGAMFAKTWRVHAIFKNVKMKKKIIKDQKLLVIVGGMLLIDLCILICWQAVDPLRRTVEKYSMEPDPAGRDISIRPLLEHCENTHMTIWLGIVYAYKGLLMLFGCFLAWETRNVSIPALNDSKYIGMSVYNVGIMCIIGAAVSFLTRDQPNVQFCIVALVIIFCSTITLCLVFVPKLITLRTNPDAATQNRRFQFTQNQKKEDSKTSTSVTSVNQASTSRLEGLQSENHRLRMKITELDKDLEEVTMQLQDTPEKTTYIKQNHYQELNDILNLGNFTESTDGGKAILKNHLDQNPQLQWNTTEPSRTCKDPIEDINSPEHIQRRLSLQLPILHHAYLPSIGGVDASCVSPCVSPTASPRHRHVPPSFRVMVSGL

SEQ ID NO: 156285 - DNA, 2826 bp, Artificial Sequence
  derived and/or modified sequence
atggcctccccaaggtcctctggacagcccggcccgcccccgccaccaccccctccacctgcacgtctgctgcttctgctgctgctaccacttctcctcccgctggcccccggggcttggggttgggctcggggcgctccacggcctccaccttcctccccacctctcagcattatgggactgatgcctctgaccaaggaggttgcaaaagggtcaatcggacggggcgtgctgcctgccgttgagctggctatcgagcagattcgcaacgagtcactgctgcggccatacttcctcgatttacggctgtacgacaccgagtgtgacaatgcaaaggggttaaaagccttttatgatgcgatcaaatatggaccaaatcatctgatggtgttcggaggtgtgtgtccaagcgtgacctctatcatcgccgagagtttacagggttggaatctggtccagttgtcttttgcagccaccaccccagttctcgctgataagaaaaaatacccttacttctttagaactgtgccttccgacaatgccgtaaaccctgccatcctgaaactactaaagcactaccagtggaaacgagtgggaactctaacccaagatgtgcagcggtttagcgaggtaagaaacgatctgacaggtgtgctgtacggtgaggatattgagatctcagacactgaaagcttttctaatgacccttgtacaagcgttaaaaagctgaagggtaacgacgtgagaatcattttgggacagttcgaccagaatatggctgccaaggttttctgctgtgcttacgaggagaacatgtatggctccaaatatcagtggatcatacctggttggtacgaaccttcctggtgggagcaggttcacaccgaagccaacagctcacggtgcttacgcaaaaatctccttgcagccatggagggctacattggggttgacttcgagccactgtcaagtaagcagattaagaccatatccggtaaaaccccgcaacagtacgagagagagtataacaacaaaagatccggggtgggcccttctaagttccacggctacgcctacgacggcatctgggtgatcgctaagaccctacagcgtgctatggagacacttcatgcctcctcacggcaccaacggatccaggactttaattacacagatcatacactcggaaggattatccttaacgctatgaacgagacaaacttcttcggggtgaccggacaggtggtctttcggaatggcgaacgcatggggaccatcaagtttacccaatttcaagattcccgcgaggtgaaagtgggcgaatacaacgcagtcgcagatacactcgaaatcattaacgacaccattcgctttcagggctccgaacccccgaaggacaagaccatcatccttgaacagctccgcaaaattagtctccccctgtattctatcctctctgccctgactatactaggcatgatcatggcgagcgccttcctgttctttaacattaagaataggaaccagaagctaatcaagatgagctctccatatatgaacaatctcatcatcttgggcgggatgctttcgtacgccagcatcttcctgtttgggctcgacggttctttcgtctctgaaaagactttcgagaccctgtgcacagtgcggacatggatactcaccgttggatatacaacagcctttggcgccatgttcgccaagacttggagggtccacgctatcttcaaaaacgtcaaaatgaaaaagaaaattattaaagatcagaaactcctcgttattgtggggggtatgctgctcatcgatctttgtatcctcatttgctggcaggccgtggacccgctgagaaggaccgtcgagaagtactccatggaaccagatcctgccgggcgggacatttcaataagacctctcttggagcattgtgaaaacacccatatgacaatttggctaggtatagtttacgcatacaagggcctcctgatgctgttcggatgttttctggcatgggagacgcgcaatgtcagcatccctgccctgaatgattcgaaatatataggtatgagtgtctacaatgtgggcatcatgtgtattattggcgccgctgtttcatttcttactcgagatcagccaaatgtgcagttttgcatcgtggctttagttatcatcttctgttccacaatcaccttatgtctagtttttgtccccaaactgatcactcttcgcaccaatcccgacgcagccacccaaaatcgcagatttcaattcactcaaaaccagaagaaggaggatagcaaaactagtacatcagttacatccgtgaaccaggccagcacatcccgcctggagggccttcaatccgagaatcatcggcttagaatgaaaatcacagaattggacaaagacctggaggaggtgaccatgcagctgcaggacacaccagagaaaaccacttacatcaagcagaatcactatcaagaactgaacgacatcctgaatttgggcaattttactgagtcaactgacggaggcaaggctatactgaagaaccaccttgaccagaacccacagctacagtggaacacaacggagccgtcccggacttgcaaggaccccattgaggacatcaatagtcctgagcatattcagcgtaggctatcactccagctgcccatcctgcaccacgcctatctgccctccataggaggggtggacgcaagctgcgtctccccttgtgtgtccccaacagcttccccgaggcacagacacgtgcccccgtcatttagagtgatggtttccggcttatag

SEQ ID NO: 156286 - DNA, 5761 bp, Artificial Sequence
  derived and/or modified sequence
gccgcccctgagcagcctcgccttcgcctcccgcgtttcctgccgtccgccctcccccggccgagctccaggggctgccgcctagcagctcccggcgggagagcggttcagagcgcgcacgggggcgggcggaggcggcccggtgcggggcggccgcgctggagagaggcgcgcgcggagacgccggcccccctctccgcgtttgctcgcttgctccccgcctcccgcactccgctcgctcccaccccttcccggcgtgattgatccgtcacgggcgccgccgctgccgccgccgccgccgcggccgttctgagccgagccggaaccctagcccgagacggagccggggcccgggccggcgccattgcgcgggcgccgcgggaagaccttggcgcggggcggcgggccgggccaggccatgcgggccgagtgagccggcgcccgcagcccgcggcgcggcatggcttccccgcggagctccgggcagcccgggccgccgccgccgccgccaccgccgcccgcgcgcctgctactgctactgctgctgccgctgctgctgcctctggcgcccggggcctggggctgggcgcggggcgccccccggccgccgcccagcagcccgccgctctccatcatgggcctcatgccgctcaccaaggaggtggccaagggcagcatcgggcgcggtgtgctccccgccgtggaactggccatcgagcagatccgcaacgagtcactcctgcgcccctacttcctcgacctgcggctctatgacacggagtgcgacaacgcaaaagggttgaaagccttctacgatgcaataaaatacgggcctaaccacttgatggtgtttggaggcgtctgtccatccgtcacatccatcattgcagagtccctccaaggctggaatctggtgcagctttcttttgctgcaaccacgcctgttctagccgataagaaaaaatacccttatttctttcggaccgtcccatcagacaatgcggtgaatccagccattctgaagttgctcaagcactaccagtggaagcgcgtgggcacgctgacgcaagacgttcagaggttctctgaggtgcggaatgacctgactggagttctgtatggcgaggacattgagatttcagacaccgagagcttctccaacgatccctgtaccagtgtcaaaaagctgaaggggaatgatgtgcggatcatccttggccagtttgaccagaatatggcagcaaaagtgttctgttgtgcatacgaggagaacatgtatggtagtaaatatcagtggatcattccgggctggtacgagccttcttggtgggagcaggtgcacacggaagccaactcatcccgctgcctccggaagaatctgcttgctgccatggagggctacattggcgtggatttcgagcccctgagctccaagcagatcaagaccatctcaggaaagactccacagcagtatgagagagagtacaacaacaagcggtcaggcgtggggcccagcaagttccacgggtacgcctacgatggcatctgggtcatcgccaagacactgcagagggccatggagacactgcatgccagcagccggcaccagcggatccaggacttcaactacacggaccacacgctgggcaggatcatcctcaatgccatgaacgagaccaacttcttcggggtcacgggtcaagttgtattccggaatggggagagaatggggaccattaaatttactcaatttcaagacagcagggaggtgaaggtgggagagtacaacgctgtggccgacacactggagatcatcaatgacaccatcaggttccaaggatccgaaccaccaaaagacaagaccatcatcctggagcagctgcggaagatctccctacctctctacagcatcctctctgccctcaccatcctcgggatgatcatggccagtgcttttctcttcttcaacatcaagaaccggaatcagaagctcataaagatgtcgagtccatacatgaacaaccttatcatccttggagggatgctctcctatgcttccatatttctctttggccttgatggatcctttgtctctgaaaagacctttgaaacactttgcaccgtcaggacctggattctcaccgtgggctacacgaccgcttttggggccatgtttgcaaagacctggagagtccacgccatcttcaaaaatgtgaaaatgaagaagaagatcatcaaggaccagaaactgcttgtgatcgtggggggcatgctgctgatcgacctgtgtatcctgatctgctggcaggctgtggaccccctgcgaaggacagtggagaagtacagcatggagccggacccagcaggacgggatatctccatccgccctctcctggagcactgtgagaacacccatatgaccatctggcttggcatcgtctatgcctacaagggacttctcatgttgttcggttgtttcttagcttgggagacccgcaacgtcagcatccccgcactcaacgacagcaagtacatcgggatgagtgtctacaacgtggggatcatgtgcatcatcggggccgctgtctccttcctgacccgggaccagcccaatgtgcagttctgcatcgtggctctggtcatcatcttctgcagcaccatcaccctctgcctggtattcgtgccgaagctcatcaccctgagaacaaacccagatgcagcaacgcagaacaggcgattccagttcactcagaatcagaagaaagaagattctaaaacgtccacctcggtcaccagtgtgaaccaagccagcacatcccgcctggagggcctacagtcagaaaaccatcgcctgcgaatgaagatcacagagctggataaagacttggaagaggtcaccatgcagctgcaggacacaccagaaaagaccacctacattaaacagaaccactaccaagagctcaatgacatcctcaacctgggaaacttcactgagagcacagatggaggaaaggccattttaaaaaatcacctcgatcaaaatccccagctacagtggaacacaacagagccctctcgaacatgcaaagatcctatagaagatataaactctccagaacacatccagcgtcggctgtccctccagctccccatcctccaccacgcctacctcccatccatcggaggcgtggacgccagctgtgtcagcccctgcgtcagccccaccgccagcccccgccacagacatgtgccaccctccttccgagtcatggtctcgggcctgtaagggtgggaggcctgggcccggggcctcccccgtgacagaaccacactgggcagaggggtctgctgcagaaacactgtcggctctggctgcggagaagctgggcaccatggctggcctctcaggaccactcggatggcactcaggtggacaggacggggcagggggagacttggcacctgacctcgagccttatttgtgaagtccttatttcttcacaaagaagaggaacggaaatgggacgtcttccttaacatctgcaaacaaggaggcgctgggatatcaaacttgcaaaaaaaaaaaaaaaaaaaaaaaaacaaaaaaactagacaaggagagaggcactagaactccagctggaagtcacggagtggctcgagcagccttgggaagaggcaaggagcttctgaagaaactgcctctgcacacacatcactggctgtgacccctcaggctagcccttctccactctgggggaggaggtgggaagggccaccaggcccccagctgccaggccagctgaccccagccttcctggaacagggagtctgcaggagcgcagacaggcacagccctggagcaggcaggccgagggctgcggcactggagcaggctgacttacatgctccacatgggacctgtgtcacccaatgagatgtttgttactctggtaaatgccacacgttaacacaataacacccattcctgggaccgtggggatttagggcacgtcactgcagacacgctctgcagcattcaccgacagtctgtcatgcacccaccacgttggccatgtccttgtgttcctatcggatgctcccagtaaccagggggaccacccgagctaatcatggaatgtctgttcccagcaaacacgataaagaaagattgtgcactttaacctctctcatcagggcccaagggctggctgggattttttttttttttttcccactaactttgtttctgaccaaagtgaattggaggcactctgctaaaagacatccccgtagacataggggagagagttgctggctgagggcttcccttggcttccagaaggcagccttccatccagacaagccagtgagctctccccttgggatcactggggtgatcagtcagcagattgattctcattcataagatcattcctccctttaaattgagcccctaagagcactggcctgggagtcagacagacctgggttcaagtcctcagtcccctgcccactccctacgtgactttgatcaggtcactagtgtctctctgagcctcagtttcccctctgtaacttggggttgaactaaaacacctgtcctgcctacctcacaaggtcactctgaggattgaaacttgatcttgtccaggaaagctttgtaccaaacagtgaagccgccctgatccgtgaggtatgagtatgactctgaccttcagccctccctacagccgggggtgtggcccagagaagcttccagcacagccctctacccagaacatccgggctggagggaggctcccagtgacttttctgacattcctagacaggttcattctttgctcaagaaaggcctgaatgacaatgtccaggatgtctgcacaactgagcagctcgctcactccctaaagaaacctattggcagcttcaacaggcaggcaataatctcttcccagaaccactgcagtcaggaataaactgttttctccaccaggctttgacaaaagggcccacaggaatcttaccaatgccaacatttcaaagcaccctatttcacgtagcatagctttctgctccccttccccaaagagaggttatggaggtactgtagcttttagggaaaaaaaaatgttaacacatcacaggtcaagttgaagtcattctctgtttaggcactaaaaatcggtgttgtcactcactgtgtattaccagtatttacttgctttcttgatttcaccaaaaccaaatttaatttaaaggaccacattaatttttcaaagggaaagagacaattaattgtacataatgtatacacacacacaaaaaaaaatacctgtagaaatattattccagcatagcaggaaaacaaacaaaagtattggactgtcggaggtgagcctgtgcgtctgtaaccctttgtgactcctgagcgtgcgctgtcttctaggttaactcacgaagtacattctctgtcttactgatactgtaggttcacccatttttttttaatttcctcgcaaataacaagacccacagaagtgactctagctacttaatggttctgttcttttatatgcagcaaacacaccgtccatttctgaagaggcttcggcctgaaggcattttccaatgatgttagtgcacaaaacgctttaaattagactggaactgccagaatcaaatgtaaatgaggaatttctcgtacccctactgcatggtatcgatttttaataaattgttgcaaatttgtttttatgaa

SEQ ID NO: 156287 - DNA, 2826 bp, Artificial Sequence
  derived and/or modified sequence
atggccagccccaggagcagcggccagcccggccccccacctcctcctcctcctcctccagcccggctgctgctgctgctgctgctgcccctgctgctgcccctggcccctggggcctggggctgggcccggggggccccccggcccccacccagcagcccccccctgagcatcatgggcctgatgcccctgaccaaggaggtggccaagggcagcatcggccggggcgtgctgcctgctgtggagctggccatcgagcagatcagaaatgaaagcctgctgcggccctacttcctggacctgcggctgtatgacacagaatgtgacaatgccaagggcctgaaggccttctatgatgccatcaagtatggccccaaccacctgatggtgtttggaggagtgtgccccagcgtgaccagcatcatcgccgagagcctgcagggctggaacctggtgcagctgagctttgctgccaccacccctgtgctggccgacaagaagaagtacccctacttcttcagaacagtgcccagcgacaatgctgtgaacccagccatcctgaagctgctgaagcactaccagtggaagagggtgggcaccctgacccaggatgtgcagcgcttcagcgaggtgagaaatgacctgactggagtgctgtatggagaggacatcgagatcagtgacacagagagcttcagcaatgacccctgcacctctgtgaagaagctgaagggaaatgatgtgcgcatcatcctgggccagtttgaccagaacatggccgccaaggtgttctgctgtgcctatgaggagaacatgtatggcagcaagtaccagtggatcatccctggctggtatgagcccagctggtgggagcaggtgcacacagaggccaacagcagccgctgcctgaggaagaacctgctggccgccatggagggctacatcggcgtggactttgagcccctgagcagcaagcagatcaagaccatcagcggcaagaccccccagcagtatgaaagagagtacaacaacaagaggtctggagtgggccccagcaagttccacggctacgcctatgatggcatctgggtgattgccaagaccctgcagagggccatggagaccctgcacgccagcagccgccaccagaggatccaggacttcaactacacagaccacaccctgggccgcatcatcctgaatgccatgaatgagaccaacttctttggagtgacaggccaggtggtgttcagaaatggagagaggatgggcaccatcaagttcacccagttccaggacagccgggaggtgaaggtgggggagtacaatgctgtggccgacaccctggagatcatcaatgacaccatccgcttccagggcagcgagccccccaaggacaagaccatcatcctggagcagctgaggaagatcagcctgcccctgtacagcatcctgagcgccctgaccatcctgggcatgatcatggccagcgccttcctgttcttcaacatcaagaacagaaaccagaagctgatcaagatgagcagcccctacatgaacaacctgatcatcctgggcggcatgctgtcctatgccagcatcttcctgtttggcctggatggcagctttgtgtctgagaagacctttgagaccctgtgcaccgtgaggacctggatcctgactgtgggctacaccacagccttcggggccatgtttgccaagacctggagggtgcacgccatcttcaagaatgtgaagatgaagaagaagatcatcaaggaccagaagctgctggtgattgtgggcggcatgctgctgattgacctgtgcatcctgatctgctggcaggccgtggaccccctgcggaggacagtggagaagtacagcatggagccagaccctgctggccgggacatcagcatccggcccctgctggagcactgtgagaacacccacatgaccatctggctgggcatcgtgtatgcctacaagggcctgctgatgctgtttggctgcttcctggcctgggagaccagaaatgtgtccatcccagccctgaatgacagcaagtacatcggcatgtctgtgtacaacgtgggcatcatgtgcatcattggagctgctgtgtccttcctgacccgggaccagcccaacgtgcagttctgcatcgtggccctggtgatcatcttctgcagcaccatcaccctgtgcctggtgtttgtgcccaagctgatcaccctgcggaccaacccagatgctgccacccagaacagacgcttccagttcacccagaaccagaagaaggaggacagcaagaccagcacctctgtgacctctgtgaaccaggccagcaccagccggctggagggcctgcagagcgagaaccaccggctgaggatgaagatcacagagctggacaaggacctggaggaggtgaccatgcagctgcaggacaccccagagaagaccacctacatcaagcagaaccactaccaggagctgaatgacatcctgaacctgggcaacttcacagagagcacagatggcggcaaggccatcctgaagaaccacctggaccagaacccccagctgcagtggaacaccacagagcccagcaggacctgcaaggaccccatcgaggacatcaacagccctgagcacatccagaggcggctgagcctgcagctgcccatcctgcaccacgcctacctgcccagcattggaggagtggatgccagctgtgtgagcccctgtgtgagccccacagccagccccaggcacagacatgtgcccccatccttccgggtgatggtgtctggcctgtag

SEQ ID NO: 156288 - DNA, 2826 bp, Artificial Sequence
  derived and/or modified sequence
atggccagcccccggagcagcggccagcccggcccccccccccccccccccccacctcccgctagactactgctgcttctgctgctgcccctgttactgcccctcgcccccggggcatggggctgggcccgaggggcaccacggcctcctccctcatctcctcccctatcaatcatgggccttatgcctttaacaaaggaggtcgcaaaggggagtatcgggcgtggtgtgctgcctgccgtcgaactcgcgatagagcagatccggaacgaatcgttgcttaggccgtatttcctggacctgaggttatacgacactgagtgcgataatgccaaaggcctgaaggccttctatgatgccatcaagtacggaccgaaccatctgatggtgttcgggggagtctgtcccagtgttaccagcattatagcagaatccctgcaaggttggaacctcgtgcagttgtccttcgcggctacaaccccagtgttagccgacaaaaagaaatatccttatttttttagaaccgttccaagtgataatgcggtgaaccctgcgattctaaagttgctgaaacactatcagtggaagcgggtgggcactttgacccaggatgttcagcggttctctgaagttagaaacgacctgactggcgtgttgtacggtgaggacatcgaaatctctgataccgaaagtttctctaatgacccttgcacttcagtcaaaaagctcaagggcaatgacgttcgcataatactcgggcaattcgatcagaacatggccgcaaaggtgttttgctgtgcttatgaagagaatatgtatggctccaaataccagtggattatccccggatggtatgagccctcctggtgggagcaagtgcacactgaagctaattctagtcgatgtttgcggaaaaatctgctagcagccatggagggctacattggcgtagactttgagcctctgagttccaaacagattaaaactataagcggcaagacgccgcagcagtacgagagggagtacaacaacaagcggtccggagtgggaccttcaaaattccacggctacgcttacgacggcatttgggtgatcgccaagactctgcagagggccatggagacactgcatgcttcgtcccgacatcagagaattcaggatttcaattataccgaccatactctcggcaggattattctgaacgccatgaatgagaccaacttctttggagtaactgggcaagttgtttttcgaaacggggagaggatgggaaccataaagttcacccaattccaggacagtagagaagtcaaggtgggagagtacaacgcagtggccgatactctggagataatcaatgacacaattagatttcagggatcagagccaccaaaagataagaccatcattctggagcaattgaggaaaattagcctccctctgtacagcatcttatctgctttgaccattctcggcatgattatggccagcgcattccttttcttcaacattaagaatcgtaaccagaaactgattaagatgtctagtccctatatgaacaacctcattatcttggggggaatgctgtcctacgcatctatattcttatttggtttagatggctcctttgtgagcgagaagacatttgagactctgtgtaccgttagaacctggatattgaccgtggggtacacaactgcatttggtgcaatgttcgccaagacatggcgagttcacgccatctttaaaaacgtcaagatgaaaaagaagatcatcaaggatcagaaactgctggtgatagtaggtggcatgctgttgattgatctctgtattctgatctgttggcaagccgtggaccccctgcggcgcaccgtggagaagtattccatggaacctgatcccgccggtagagatattagcatccgccccctgctcgaacactgtgagaatacgcacatgactatctggctcggaatcgtgtatgcttataagggcctgctgatgctgtttggctgcttcctcgcttgggaaacgagaaatgtgtccatccctgccctcaacgactccaagtacatcggaatgagcgtttacaatgtgggaatcatgtgcattattggtgccgctgtatcttttctcactcgcgaccagccaaacgtgcagttttgcattgtagctctggtcattatcttctgctcaaccatcaccttgtgcttggtgttcgtgcccaagctgatcacactgcgcactaacccagatgctgctacccagaataggaggttccagttcacgcagaaccagaagaaggaagattcaaagacatccacatccgttacctccgtgaatcaggcttctaccagtcggctggagggccttcagagtgaaaaccatcgtctgcgtatgaagatcaccgagctggacaaggatttggaggaggtaacaatgcagcttcaggacacccccgagaagactacatacattaaacagaaccattatcaagagctgaacgatatcctgaacctcggaaacttcactgaaagcacagacggagggaaggcaatccttaagaatcacttggatcagaatcctcagctgcagtggaacacaacagagcctagccgtacttgcaaggatcccattgaggacattaactcgcccgaacacattcagagacgactctctcttcaactccctatactacatcacgcttacctgccttctatcggaggagtcgatgcatcctgtgtttccccttgtgtgagccctacagctagccctagacataggcatgtccccccttcgtttcgggtcatggttagcggactgtag

SEQ ID NO: 156289 - DNA, 2826 bp, Artificial Sequence
  derived and/or modified sequence
atggcctcccctcgatcttcaggccagcccggtccccctccccctcccccaccaccacctgctcggctcctgctgcttctactcctgccactgctgctgcccctggcaccaggcgcatgggggtgggctaggggcgcacccagaccgcctccctcctcaccacccctctctatcatgggcctgatgcccctcactaaggaggtggccaagggttccataggacggggagtcctgcccgctgttgagctggcaattgagcagatccggaacgaaagcttgctgcgcccatacttcctggacctcagactctatgatactgagtgtgacaacgcaaaggggttaaaggccttctatgatgccatcaaatatggcccaaatcatctgatggtattcgggggagtctgtccgtccgtgaccagcatcatcgctgagtctctgcaaggttggaacctggtgcagttatccttcgctgcaaccactcctgttctggcagacaagaaaaagtacccctacttctttcgcactgtgcccagcgataacgccgtcaaccctgctattctgaagctgctgaagcattatcagtggaaacgtgtcggtacacttacgcaggacgtgcagcgatttagtgaggtgagaaatgatttgactggggtcctctacggcgaggatattgagatttctgacacagaatcatttagtaacgacccttgtactagcgttaagaagctcaagggaaacgacgtgcgcataattctggggcagttcgaccagaatatggccgcaaaggtgttctgctgtgcttacgaagagaatatgtacggatccaagtaccagtggattatccccggatggtacgagccttcttggtgggaacaggttcacactgaggcaaatagctcccgctgcctgagaaaaaacctgttagcagcaatggagggatatattggcgtggattttgaacccttgtcatcaaagcagattaaaacgatctcaggcaaaacccctcagcagtacgagcgcgaatacaacaacaagagatccggtgtcgggccttcaaaattccacggctatgcctacgacggaatatgggtaattgccaagactctccagcgtgcaatggagaccctccacgcgagctcaaggcaccaaagaattcaagatttcaattatacggaccacacattggggaggataatcctgaatgcaatgaatgagaccaatttctttggtgtgacaggtcaggtagtgttccggaacggcgaacgcatgggcaccataaaatttacccaatttcaggattcgagggaagtgaaagtcggtgagtataacgctgtggccgacacactggagattatcaatgacacgatcaggttccagggaagcgaaccccctaaagacaaaaccatcattctcgagcagcttcggaagatcagtcttcccttgtattctatcctcagtgctctaacaatacttggcatgatcatggcaagtgcctttctgttcttcaacatcaaaaatcgaaaccaaaagctcatcaaaatgtccagcccgtatatgaataatctaatcatcctgggcggaatgctgagttacgcctccatatttctgttcggtctggacggttcttttgttagtgaaaagacctttgagaccctgtgtacggtgaggacctggattctgactgtgggatacacaacggcatttggcgcaatgtttgccaagacctggcgagtgcacgccatattcaaaaacgtcaaaatgaaaaagaagatcattaaagatcagaagctgcttgtcatcgtcggcggaatgctgctgatcgacctgtgcattttgatctgctggcaggctgtcgaccctcttcgacgtaccgtcgagaagtactctatggaacctgacccagcaggcagggatatcagcatccgtcccctactggaacactgcgaaaacacacacatgacaatctggcttggcattgtgtatgcttacaagggtctcttaatgttgtttggctgcttcctggcctgggaaacacgcaacgtgtctattcccgcactgaacgattcaaaatacatcgggatgagtgtctacaacgtgggcatcatgtgcattattggagctgctgttagctttctaacccgcgaccagccaaatgttcagttttgtatagtggctctggttattatcttttgttccaccatcaccctgtgccttgtctttgtccccaagctgattactctgcgtaccaatcctgatgccgctactcagaaccgcaggtttcagtttactcagaatcagaagaaagaggactccaagacctctacatcagtgacctctgtgaaccaagccagcacttcaagactcgaggggttacagtccgagaatcacaggttgcgcatgaaaatcaccgaacttgataaggatttagaagaggtgactatgcagctccaagatacacctgaaaaaacgacatatattaagcagaaccattatcaggagctgaacgacatcctcaatctagggaattttaccgaaagcacagatggtggaaaagccatcttgaagaaccatctggatcaaaatccccagctgcagtggaataccacagaacctagccggacttgtaaggatcccattgaagacattaatagcccagaacatattcagcgcaggctttcgttacagctgcccattcttcatcatgcttacttgccgtccataggtggagtcgatgcatcttgtgtgtcgccttgcgtgtccccgacagcctctcccagacataggcatgtgccacctagctttagggtcatggtgtccggattatag

SEQ ID NO: 156290 - DNA, 2826 bp, Artificial Sequence
  derived and/or modified sequence
atggccagccccagaagcagcggccagcccggccccccccccccccccccccccccccccgccagactgctgctgctgctgctgctgcccctgctgctgcccctggcccccggcgcctggggctgggccagaggcgcccccagacccccccccagcagcccccccctgagcatcatgggcctgatgcccctgaccaaggaggtggccaagggcagcatcggcagaggcgtgctgcccgccgtggagctggccatcgagcagatcagaaacgagagcctgctgagaccctacttcctggacctgagactgtacgacaccgagtgcgacaacgccaagggcctgaaggccttctacgacgccatcaagtacggccccaaccacctgatggtgttcggcggcgtgtgccccagcgtgaccagcatcatcgccgagagcctgcagggctggaacctggtgcagctgagcttcgccgccaccacccccgtgctggccgacaagaagaagtacccctacttcttcagaaccgtgcccagcgacaacgccgtgaaccccgccatcctgaagctgctgaagcactaccagtggaagagagtgggcaccctgacccaggacgtgcagagattcagcgaggtgagaaacgacctgaccggcgtgctgtacggcgaggacatcgagatcagcgacaccgagagcttcagcaacgacccctgcaccagcgtgaagaagctgaagggcaacgacgtgagaatcatcctgggccagttcgaccagaacatggccgccaaggtgttctgctgcgcctacgaggagaacatgtacggcagcaagtaccagtggatcatccccggctggtacgagcccagctggtgggagcaggtgcacaccgaggccaacagcagcagatgcctgagaaagaacctgctggccgccatggagggctacatcggcgtggacttcgagcccctgagcagcaagcagatcaagaccatcagcggcaagaccccccagcagtacgagagagagtacaacaacaagagaagcggcgtgggccccagcaagttccacggctacgcctacgacggcatctgggtgatcgccaagaccctgcagagagccatggagaccctgcacgccagcagcagacaccagagaatccaggacttcaactacaccgaccacaccctgggcagaatcatcctgaacgccatgaacgagaccaacttcttcggcgtgaccggccaggtggtgttcagaaacggcgagagaatgggcaccatcaagttcacccagttccaggacagcagagaggtgaaggtgggcgagtacaacgccgtggccgacaccctggagatcatcaacgacaccatcagattccagggcagcgagccccccaaggacaagaccatcatcctggagcagctgagaaagatcagcctgcccctgtacagcatcctgagcgccctgaccatcctgggcatgatcatggccagcgccttcctgttcttcaacatcaagaacagaaaccagaagctgatcaagatgagcagcccctacatgaacaacctgatcatcctgggcggcatgctgagctacgccagcatcttcctgttcggcctggacggcagcttcgtgagcgagaagaccttcgagaccctgtgcaccgtgagaacctggatcctgaccgtgggctacaccaccgccttcggcgccatgttcgccaagacctggagagtgcacgccatcttcaagaacgtgaagatgaagaagaagatcatcaaggaccagaagctgctggtgatcgtgggcggcatgctgctgatcgacctgtgcatcctgatctgctggcaggccgtggaccccctgagaagaaccgtggagaagtacagcatggagcccgaccccgccggcagagacatcagcatcagacccctgctggagcactgcgagaacacccacatgaccatctggctgggcatcgtgtacgcctacaagggcctgctgatgctgttcggctgcttcctggcctgggagaccagaaacgtgagcatccccgccctgaacgacagcaagtacatcggcatgagcgtgtacaacgtgggcatcatgtgcatcatcggcgccgccgtgagcttcctgaccagagaccagcccaacgtgcagttctgcatcgtggccctggtgatcatcttctgcagcaccatcaccctgtgcctggtgttcgtgcccaagctgatcaccctgagaaccaaccccgacgccgccacccagaacagaagattccagttcacccagaaccagaagaaggaggacagcaagaccagcaccagcgtgaccagcgtgaaccaggccagcaccagcagactggagggcctgcagagcgagaaccacagactgagaatgaagatcaccgagctggacaaggacctggaggaggtgaccatgcagctgcaggacacccccgagaagaccacctacatcaagcagaaccactaccaggagctgaacgacatcctgaacctgggcaacttcaccgagagcaccgacggcggcaaggccatcctgaagaaccacctggaccagaacccccagctgcagtggaacaccaccgagcccagcagaacctgcaaggaccccatcgaggacatcaacagccccgagcacatccagagaagactgagcctgcagctgcccatcctgcaccacgcctacctgcccagcatcggcggcgtggacgccagctgcgtgagcccctgcgtgagccccaccgccagccccagacacagacacgtgccccccagcttcagagtgatggtgagcggcctgtag

SEQ ID NO: 156291 - protein, 919 aa, Artificial Sequence
  derived and/or modified sequence
MEAPEYLDLDEIDFSDDISYSVTSLKTIPELCRRCDTQNEDRSVSSSSWNCGISTLITNTQKPTGIADVYSKFRPVKRVSPLKHQPETLENNESDDQKNQKVVEYQKGGESDLGPQPQELGPGDGVGGPPGKSSEPSTSLGELEHYDLDMDEILDVPYIKSSQQLASFTKVTSEKRILGLCTTINGLSGKACSTGSSESSSSNMAPFCVLSPVKSPHLRKASAVIHDQHKLSTEETEISPPLVKCGSAYEPENQSKDFLNKTFSDPHGRKVEKTTPDCQLRAFHLQSSAAESKPEEQVSGLNRTSSQGPEERSEYLKKVKSILNIVKEGQISLLPHLAADNLDKIHDENGNNLLHIAASQGHAECLQHLTSLMGEDCLNERNTEKLTPAGLAIKNGQLECVRWMVSETEAIAELSCSKDFPSLIHYAGCYGQEKILLWLLQFMQEQGISLDEVDQDGNSAVHVASQHGYLGCIQTLVEYGANVTMQNHAGEKPSQSAERQGHTLCSRYLVVVETCMSLASQVVKLTKQLKEQTVERVTLQNQLQQFLEAQKSEGKSLPSSPSSPSSPASRKSQWKSPDADDDSVAKSKPGVQEGIQVLGSLSASSRARPKAKDEDSDKILRQLLGKEISENVCTQEKLSLEFQDAQASSRNSKKIPLEKRELKLARLRQLMQRSLSESDTDSNNSEDPKTTPVRKADRPRPQPIVESVESMDSAESLHLMIKKHTLASGGRRFPFSIKASKSLDGHSPSPTSESSEPDLESQYPGSGSIPPNQPSGDPQQPSPDSTAAQKVATSPKSALKSPSSKRRTSQNLKLRVTFEEPVVQMEQPSLELNGEKDKDKGRTLQRTSTSNESGDQLKRPFGAFRSIMETLSGNQNNNNNYQAANQLKTSTLPLTSLGRKTDAKGNPASSASKGKNKAA

SEQ ID NO: 156292 - protein, 98 aa, Artificial Sequence
  derived and/or modified sequence
MEAPEYLDLDEIDFSDDISYSVTSLKTIPELCRRCDTQNEDRSVSSSSWNCGISTLITNTQKPTGIADVYSKFRPVKRVSPLKHQPETLENNESDDQK

SEQ ID NO: 156293 - DNA, 2760 bp, Artificial Sequence
  derived and/or modified sequence
atggaggcccccgagtacctggacctggacgagatcgacttcagcgacgacatcagctacagcgtgaccagcctgaagaccatccccgagctgtgcagaagatgcgacacccagaacgaggacagaagcgtgagcagcagcagctggaactgcggcatcagcaccctgatcaccaacacccagaagcccaccggcatcgccgacgtgtacagcaagttcagacccgtgaagagagtgagccccctgaagcaccagcccgagaccctggagaacaacgagagcgacgaccagaagaaccagaaggtggtggagtaccagaagggcggcgagagcgacctgggcccccagccccaggagctgggccccggcgacggcgtgggcggcccccccggcaagagcagcgagcccagcaccagcctgggcgagctggagcactacgacctggacatggacgagatcctggacgtgccctacatcaagagcagccagcagctggccagcttcaccaaggtgaccagcgagaagagaatcctgggcctgtgcaccaccatcaacggcctgagcggcaaggcctgcagcaccggcagcagcgagagcagcagcagcaacatggcccccttctgcgtgctgagccccgtgaagagcccccacctgagaaaggccagcgccgtgatccacgaccagcacaagctgagcaccgaggagaccgagatcagcccccccctggtgaagtgcggcagcgcctacgagcccgagaaccagagcaaggacttcctgaacaagaccttcagcgacccccacggcagaaaggtggagaagaccacccccgactgccagctgagagccttccacctgcagagcagcgccgccgagagcaagcccgaggagcaggtgagcggcctgaacagaaccagcagccagggccccgaggagagaagcgagtacctgaagaaggtgaagagcatcctgaacatcgtgaaggagggccagatcagcctgctgccccacctggccgccgacaacctggacaagatccacgacgagaacggcaacaacctgctgcacatcgccgccagccagggccacgccgagtgcctgcagcacctgaccagcctgatgggcgaggactgcctgaacgagagaaacaccgagaagctgacccccgccggcctggccatcaagaacggccagctggagtgcgtgagatggatggtgagcgagaccgaggccatcgccgagctgagctgcagcaaggacttccccagcctgatccactacgccggctgctacggccaggagaagatcctgctgtggctgctgcagttcatgcaggagcagggcatcagcctggacgaggtggaccaggacggcaacagcgccgtgcacgtggccagccagcacggctacctgggctgcatccagaccctggtggagtacggcgccaacgtgaccatgcagaaccacgccggcgagaagcccagccagagcgccgagagacagggccacaccctgtgcagcagatacctggtggtggtggagacctgcatgagcctggccagccaggtggtgaagctgaccaagcagctgaaggagcagaccgtggagagagtgaccctgcagaaccagctgcagcagttcctggaggcccagaagagcgagggcaagagcctgcccagcagccccagcagccccagcagccccgccagcagaaagagccagtggaagagccccgacgccgacgacgacagcgtggccaagagcaagcccggcgtgcaggagggcatccaggtgctgggcagcctgagcgccagcagcagagccagacccaaggccaaggacgaggacagcgacaagatcctgagacagctgctgggcaaggagatcagcgagaacgtgtgcacccaggagaagctgagcctggagttccaggacgcccaggccagcagcagaaacagcaagaagatccccctggagaagagagagctgaagctggccagactgagacagctgatgcagagaagcctgagcgagagcgacaccgacagcaacaacagcgaggaccccaagaccacccccgtgagaaaggccgacagacccagaccccagcccatcgtggagagcgtggagagcatggacagcgccgagagcctgcacctgatgatcaagaagcacaccctggccagcggcggcagaagattccccttcagcatcaaggccagcaagagcctggacggccacagccccagccccaccagcgagagcagcgagcccgacctggagagccagtaccccggcagcggcagcatcccccccaaccagcccagcggcgacccccagcagcccagccccgacagcaccgccgcccagaaggtggccaccagccccaagagcgccctgaagagccccagcagcaagagaagaaccagccagaacctgaagctgagagtgaccttcgaggagcccgtggtgcagatggagcagcccagcctggagctgaacggcgagaaggacaaggacaagggcagaaccctgcagagaaccagcaccagcaacgagagcggcgaccagctgaagagacccttcggcgccttcagaagcatcatggagaccctgagcggcaaccagaacaacaacaacaactaccaggccgccaaccagctgaagaccagcaccctgcccctgaccagcctgggcagaaagaccgacgccaagggcaaccccgccagcagcgccagcaagggcaagaacaaggccgcctag

SEQ ID NO: 156294 - DNA, 2760 bp, Artificial Sequence
  derived and/or modified sequence
atggaggcgcctgaatatctggacctggacgagattgacttcagcgatgacatctcatatagcgttacgtctcttaagacaatacccgagctgtgcaggcgctgcgatacgcaaaatgaggatcgaagcgtgtcctcatcttcatggaactgcgggataagtacgctgataacaaacacacagaaacccaccggtattgcagatgtgtactccaagtttagacccgttaagagggtgtctcccctgaaacatcaacccgagactttggagaacaacgagagcgacgatcaaaaaaatcaaaaggtggttgaataccagaagggtggtgaatctgacctgggaccccagccacaagaacttggacccggggacggcgtgggcggaccacccgggaaaagctcagagccaagcacctccctcggcgagttggagcactacgacctggacatggatgagatcttagatgtcccctacatcaaaagctctcagcagctggcttcgtttacgaaggttacatccgagaagcgcatcttaggcttgtgtacaaccatcaacggcttatctggtaaggcctgttctactggatcatccgagtccagctccagtaacatggccccattttgtgtgctttccccagtcaaatccccccacctcagaaaagcttcagccgtaatacatgatcagcacaagttatccacagaggagactgagatctccccccccttagttaaatgtggcagcgcttatgaacccgagaatcagagtaaagacttccttaacaaaacattttccgacccacacggccgcaaggtcgagaaaactacccctgactgtcagcttcgagcttttcatttgcagagctctgccgctgagagtaaaccagaggaacaggtgtcgggactcaaccgcactagctcccaaggcccggaggaaaggagtgagtaccttaagaaggtcaagtctatactgaacatagttaaggagggtcagataagcctgttgccccacctggcagctgacaatctggataagattcacgatgaaaacgggaataatctgcttcacatagctgcgtctcaaggacacgctgagtgcttacagcaccttacaagtctgatgggtgaagattgtttgaatgaaagaaacactgagaagctcacccctgcaggactggccattaaaaatggccagctggagtgcgtaaggtggatggtgtccgagaccgaggccatagcagaactgtcatgcagcaaagattttccgagcctgatccactacgctggctgttacggccaggagaagattctgctgtggctgctccaatttatgcaagagcaaggaatctcccttgatgaagtggatcaagacgggaacagcgctgtgcatgtggcctcacaacacggctaccttggctgtatccagaccttagtggagtacggtgccaacgtgactatgcagaatcatgccggtgaaaaacccagtcagtctgccgaacggcagggccatacactctgctcccggtatttggtcgtagtcgagacatgcatgagtttggcttcccaggtggttaaactgaccaaacagctgaaagagcagactgtagaaagggtgactctccagaatcagcttcagcagtttctcgaagcccagaaatctgagggcaagtccctaccctcatccccctcaagcccgtccagtccagcatcccgtaagagtcaatggaagtcacctgacgctgacgatgatagcgtggccaagtctaagccaggcgtccaggagggcatccaggtgttgggatctctaagtgcttccagcagagcacgccccaaggccaaggacgaagatagcgataagattctcagacagctgcttgggaaggagatcagcgagaacgtttgtacacaagaaaaactttcacttgaatttcaggacgctcaggcttccagccggaattccaagaagatccctctggagaagagggagttaaagctggcccgtcttaggcagcttatgcagaggtcactgagtgagtctgacactgattcaaataatagcgaagatcctaaaactacgcccgtgcgcaaggctgaccggcccagaccccagccaattgtggagtccgtggagtcaatggactctgcagaaagtctgcatctaatgattaagaagcacactctggcctcaggcggaaggagattcccctttagtatcaaagcttcaaaaagcctcgatggtcattcaccctcccccacatcagaaagctcagagcctgatcttgaaagtcagtaccccgggtctggttcgattcccccgaaccagccttcgggagaccctcagcagccgtctccagattcaaccgctgcccaaaaggtcgctaccagccctaagagtgcgctgaagtccccatcatcaaagaggagaacgagccagaacctgaagctacgggtgacttttgaagagccagtagtgcagatggagcagccctctcttgagctcaatggggaaaaagataaagataagggccgaaccctgcagcgaacgtctacatcaaatgagagtggggaccagctgaagagaccgtttggagctttccgctccattatggaaactctcagcggtaatcagaacaataacaacaactaccaagcggctaaccagctgaagacatctacactcccgctgacctcgctgggccgtaagactgacgccaagggcaatcctgccagttctgcctccaaggggaagaacaaggctgcctag

SEQ ID NO: 156295 - DNA, 2760 bp, Artificial Sequence
  derived and/or modified sequence
atggaggcccctgagtacctggacctggatgaaattgacttcagtgatgacatctcctacagcgtgaccagcctgaagaccatccctgagctgtgcagaagatgtgacacccagaatgaagatagatctgtgagcagcagctcctggaactgtggcatcagcaccctcatcaccaacacccagaagcccaccggcattgctgatgtgtacagcaagttccggcctgtgaagagggtgagccccctgaagcaccagcctgagaccctggagaacaatgaaagtgatgaccagaagaaccagaaggtggtggagtaccagaagggcggggagagtgacctgggcccccagccccaggagctgggccctggagatggagtgggcggccccccaggcaagagcagcgagcccagcaccagcctgggggagctggagcactatgacctggacatggatgagatcctggatgtgccctacatcaagagcagccagcagctggccagcttcaccaaggtgaccagcgagaagaggatcctgggcctgtgcaccaccatcaatggcctgagcggcaaggcctgcagcacaggcagcagcgagagcagcagcagcaacatggcccccttctgtgtgctgagccctgtgaagagcccccacctgaggaaggccagcgctgtgattcatgaccagcacaagctgagcacagaggagacagagatcagcccccccctggtgaagtgtggcagcgcctatgagcctgagaaccagagcaaggacttcctgaacaagaccttcagtgacccccacggcaggaaggtggagaagaccaccccagactgccagctgcgggccttccacctgcagagcagcgctgctgagagcaagccagaggagcaggtgtctggcctgaacagaaccagcagccagggccctgaggagaggtctgagtacctgaagaaggtgaagagcatcctgaacatcgtgaaggagggccagatcagcctgctgccccacctggccgctgacaacctggacaagatccatgatgaaaatggaaacaacctgctgcacatcgccgccagccagggccatgctgagtgcctgcagcacctgaccagcctgatgggagaggactgcctgaatgaaagaaacacagagaagctgaccccagctggcctggccatcaagaatggccagctggagtgtgtgcgctggatggtgtctgaaacagaggccatcgccgagctgagctgcagcaaggacttccccagcctcatccactacgccggctgctacggccaggagaagatcctgctgtggctgctgcagttcatgcaggagcagggcatcagcctggatgaggtggaccaggacggcaacagcgctgtgcacgtggccagccagcacggctacctgggctgcatccagaccctggtggagtatggagccaacgtgaccatgcagaaccacgccggggagaagcccagccagagcgctgagcggcagggccacaccctgtgcagccgctacctggtggtggtggagacctgcatgagcctggccagccaggtggtgaagctgaccaagcagctgaaggagcagacagtggagcgggtgaccctgcagaaccagctgcagcagttcctggaggcccagaagtctgagggcaagagcctgcccagcagccccagcagccccagcagccctgccagcaggaagagccagtggaagagcccagatgctgatgatgattctgtggccaagagcaagccaggagtgcaggagggcatccaggtgctgggcagcctgagcgccagcagccgggcccggcccaaggccaaggatgaggacagcgacaagatcctgcggcagctgctgggcaaggagatcagtgaaaatgtgtgcacccaggagaagctgagcctggagttccaggatgcccaggccagcagcaggaacagcaagaagatccccctggagaagcgggagctgaagctggcccggctgcggcagctgatgcagaggagcctgtctgagagtgacacagacagcaacaacagcgaggaccccaagaccacccctgtgaggaaggctgaccggccccggccccagcccatcgtggagagcgtggagagcatggattctgctgagagcctgcacctgatgatcaagaagcacaccctggccagcggcggccgccgcttccccttcagcatcaaggccagcaagagcctggatggccacagccccagccccaccagcgagagcagcgagccagacctggagagccagtacccaggcagcggcagcatcccccccaaccagcccagcggggacccccagcagcccagcccagacagcacagctgcccagaaggtggccaccagccccaagagcgccctgaagagccccagcagcaagaggaggaccagccagaacctgaagctgcgggtgacctttgaggagcctgtggtgcagatggagcagcccagcctggagctgaatggagagaaggacaaggacaagggccgcaccctgcagaggaccagcaccagcaatgaaagtggggaccagctgaagaggccctttggagccttccgcagcatcatggagaccctgagcggcaaccagaacaacaacaacaactaccaggccgccaaccagctgaagaccagcaccctgcccctgaccagcctgggcaggaagacagatgccaagggcaacccagccagcagcgccagcaagggcaagaacaaggccgcctag

SEQ ID NO: 156296 - DNA, 2760 bp, Artificial Sequence
  derived and/or modified sequence
atggaggcccccgagtacctggacctggacgagatcgacttcagcgacgatataagctactctgtaacctctctcaaaacaatccctgaactatgtcggcggtgcgatactcagaatgaggacagaagtgtttccagcagctcatggaattgtgggatttcgaccctgatcacaaacacccaaaagcccacaggtattgcggacgtgtattctaaattccgccccgtgaaacgggtcagtcccctgaagcaccagcccgaaacactggagaacaatgagagcgatgatcaaaaaaatcagaaggttgtggaataccaaaagggaggagaaagcgaccttggtccccagccccaggaactaggacctggcgatggcgtaggggggcctcccggcaagagctctgaacctagcacctctttaggggagcttgagcattacgatttggacatggacgaaattctggacgttccgtacatcaagtctagtcagcagctcgcctctttcaccaaagtcacaagtgagaagagaattctgggattatgcacgaccataaatgggctcagcgggaaagcctgctctaccggtagctccgaaagtagttctagtaatatggctcccttttgcgttttatccccagtgaaatctccccatctacgaaaggcttccgctgttatccacgatcagcataagctctccacggaggagacggaaatttcaccacccctggtaaagtgtggttccgcatacgaacccgagaaccagtcaaaagactttcttaataagacattctcagatcctcacggccggaaggtggagaagacgaccccggactgccagctgcgggcttttcatctgcagagctccgccgctgaaagcaagcctgaggaacaggtgtcaggtctgaaccgaacatcctcacagggaccagaggaaagaagtgagtacctaaaaaaggttaagagtatcctgaatatcgtcaaagaggggcagatttcactactgcctcacttagcggctgataatctggacaagattcatgatgagaacgggaacaatctcctgcatatagccgccagccaaggtcatgctgagtgtcttcagcacctcacttctctaatgggcgaggactgtttgaacgagagaaataccgagaagctgacacctgcgggtctcgccattaagaacggccagctggaatgcgtgaggtggatggtgtctgagacagaggccatagctgagctctcatgttccaaagacttcccctctctcattcactatgccgggtgttacggccaggaaaagatcctcctgtggttactgcagttcatgcaggaacagggtatcagcttggacgaggtggatcaagatggcaactccgctgtgcacgtcgctagccagcatggctatctcggctgtattcagaccctggtcgagtatggtgctaatgttactatgcagaaccacgcgggcgagaagccctcacagagcgcggaacgtcagggccacacactgtgctcacgctatctggttgtggtggaaacttgcatgtctcttgcctcccaagtcgtcaagctaacgaaacagctgaaagagcagacagtggaaagagtgactctacagaaccagctacaacaattccttgaagcgcagaaaagtgaaggtaaatccctccctagctctcctagctctccctccagtccagctagtagaaaaagccagtggaagtctccagacgctgacgacgactcagttgctaaatctaagccaggggtacaagagggtatccaggtcctaggatctctgagcgccagttcgagagctaggccaaaagctaaggacgaagatagcgataaaattctgcgacagctcctgggcaaagagatcagcgagaatgtctgcacacaggaaaagctttcactggagttccaggacgcccaagcctcaagcagaaattctaagaaaattccactcgaaaagcgagagctgaagctggcccgactgcggcaacttatgcagaggagcctgagtgagtctgatactgactcaaataattctgaggaccccaagaccacacctgtaagaaaagcggatcgtccacggcctcagcccatcgttgagtccgtggagagcatggatagcgcagaatccctgcaccttatgattaagaagcacacacttgcctccggcggtagacgttttcccttcagtataaaggcgtctaaaagcttggacggacactcccccagcccaacgagcgaaagcagcgaacctgacttagaatctcagtatcctggctctggatctatccctccaaaccagcctagtggcgatccacaacagcccagcccggatagtaccgccgcacagaaagtggcaacaagcccaaagtccgcacttaagtcccctagtagcaagagacggaccagccaaaatctgaagttgagggtgaccttcgaagaaccagtcgtgcaaatggaacagccgagcctcgaattaaacggcgaaaaggacaaggacaagggcaggacattgcagcggacttcaaccagcaatgagtccggtgaccagcttaaaaggcctttcggagctttccgcagtatcatggagactctgagtggcaatcagaataacaacaacaattatcaggctgccaatcagctgaaaacgagcaccctgcctttgactagtctgggccgaaagacagacgctaaagggaacccagctagttccgcctctaaaggtaagaacaaagcagcatag

SEQ ID NO: 156297 - DNA, 2760 bp, Artificial Sequence
  derived and/or modified sequence
atggaggctccagagtaccttgacctcgacgagatcgacttttcagacgacatatcatattcggtgacttctctcaaaaccatcccagagctgtgtaggcggtgtgacacacagaacgaggaccgttccgtgtcctcctcttcgtggaactgcggtatttctacccttatcacgaacacacagaagccaactggcattgcggacgtctattctaaatttagaccggttaagcgagtgagcccactcaagcaccagccggagaccctggagaacaacgagtccgacgaccaaaaaaatcaaaaggttgttgagtaccagaagggtggggagtccgatctgggtccccagccccaggagctcggacccggagacggggtcggcggtccaccaggtaaatcctcggaacccagtaccagcctgggggagttggaacactacgacctggacatggacgaaattcttgacgtcccatatattaaaagttcgcagcaactagcctcattcacgaaggtgaccagcgagaagagaatcctcggactgtgtacaaccattaatggtttgtcagggaaggcctgtagcactggatcctctgaatcttctagtagtaacatggcgcctttctgcgtgctatcccctgtaaaatcgccacacctccggaaggcatctgccgtgattcatgaccagcacaagctgtccaccgaggaaacagaaatatcccccccattagtgaaatgtggaagtgcctatgagcccgagaatcagagtaaagatttcttaaacaaaaccttcagcgacccacacggcaggaaggtagaaaagacaactccagattgtcagcttcgagccttccacctccagagtagtgccgcagaaagcaagcctgaggaacaagtgtccggactcaaccgcacaagctcgcagggacccgaggagcgtagtgaatatcttaagaaggtgaagagtattctgaatatcgtgaaagaaggccagatatcattgctcccccaccttgctgctgataacctggacaagatccacgatgaaaatggaaacaatttgctgcacattgctgcctcccagggccacgctgaatgtctgcagcacctcacaagtctaatgggcgaagattgcctgaatgaacgcaatactgagaaactaacccctgcaggcttggccattaaaaacgggcagctggaatgtgtgcgttggatggtgtcagagaccgaagccatcgccgagctttcctgctccaaagactttccgtcgttgatccactatgctggatgctatgggcaggagaaaattctgctatggctcctccagttcatgcaggagcagggcataagtctggacgaagtcgatcaagatggcaacagtgctgtccacgtggctagtcagcacggttacctgggttgcattcaaaccctggtggaatacggagccaacgtgacaatgcagaatcacgctggtgagaaaccctctcagagtgccgaacggcagggccacacgctgtgttccagatatctggtcgtggtggagacttgtatgtccttggcttctcaggtcgtgaagttgaccaaacagttgaaggaacagacagtcgagcgagtcacactccaaaatcagctccaacagtttctggaggcccagaaatcagagggcaagagtttgccaagctcaccctctagcccaagttcgccagcttccagaaaaagccagtggaagagtccagatgccgacgatgatagcgttgccaaaagtaaaccaggcgtgcaagaagggattcaggttttaggaagcctgtccgcctcctcccgagcgagacctaaagccaaagacgaagattcagataagatcctgcgccaactgctgggtaaagaaatctcagagaatgtgtgcacccaggagaagctctcattggagttccaggatgctcaggcctcaagcagaaacagcaaaaaaataccactagagaagcgggagctcaaactggcaagacttcggcaactgatgcaacggtccctgagcgagagcgacacggattcaaataactcggaggaccccaaaactacccctgtgagaaaggctgaccgcccacgaccgcagcccatagtggagtctgtcgaaagtatggacagtgccgaatcattgcatttaatgatcaaaaaacacaccttagcctccggagggagacggtttccattttcgataaaagcctctaagtctctggacggacacagtccttcccctacttctgaaagctccgaaccagacctggagtctcagtatcccggatctggatccattccacccaatcagccatccggagacccacagcagccgtcccctgactccaccgccgcacagaaggtcgccaccagccctaagtccgctctgaaatcaccttcaagcaagcgtcgtacctcacagaatttaaagctccgagtcacctttgaagaacctgtggtccagatggagcagccctcactcgagcttaatggagagaaagataaggacaaggggaggacgctgcagcggacttccacctctaacgagtccggagaccaacttaagagaccttttggggcttttcgaagcatcatggaaaccctgagcggcaaccagaataataataacaattaccaagccgcaaatcagttaaagacatctactcttccgctgacatcccttggccgtaaaacagacgcaaagggcaaccctgcctctagcgcttcaaagggaaagaacaaagcagcctag

SEQ ID NO: 156298 - DNA, 3745 bp, Artificial Sequence
  derived and/or modified sequence
gcggccgcccaggctgcccccgcccgcgcgcgcccgttggggggcccggggagcggcgcccgcggccgggccgcattgtgacgtagcggggccgcggcagcgcctccaccgcccgcctacttcggctgaggctgttctgctcctgccgctgcggtccgtcggtcggtcagtcagtcccttcgcgctcctgagccgccggcgcgccgggcgccccgggaatttataagtatttgaccgtactcaaaatgtgcaaggaagaataatggaagcccctgaataccttgatttggatgaaattgactttagtgatgacatatcttattcagtcacatcactcaagacgatcccagaactgtgccgaagatgtgatacgcaaaacgaagacagatcagtttctagctctagctggaattgtggcatctcaactcttattacaaacacgcaaaagcccacaggaatcgctgatgtgtacagtaagttccgcccagtgaagcgggtttcgccactgaaacatcagccagagactctggagaacaatgaaagtgatgaccaaaagaaccagaaagtggttgagtaccagaaagggggtgagtctgacctgggcccccagcctcaggagcttggccctggagatggagtgggcggcccaccaggtaagagctctgagcccagcacatcgctgggtgaactggagcactacgacctcgacatggatgagattctggatgtgccttatattaaatccagtcagcagcttgcctcttttaccaaggtgacttcagaaaaaagaattttgggcttatgcacaaccatcaatggcctttctggcaaagcctgctctacaggaagttctgagagctcatcatccaacatggcaccattttgtgttctttctcccgtgaaaagccctcacttgagaaaagcatcagctgtcatccacgaccagcacaagctgtccactgaagaaaccgagatctcacctcctctggttaaatgtggctctgcatatgagcctgaaaaccagagtaaagacttcctaaacaagacatttagtgatcctcatggtcgaaaagttgagaagacaacaccagactgccagctcagggccttccacctacaatcctcagcagcagaatccaaaccagaagagcaggtcagtggcctaaaccggaccagctcccaaggcccagaagaaaggagtgagtatctgaaaaaagtgaaaagcatcttgaacattgttaaagaaggacagatctctctcctgccacacctagctgcagacaatctagacaaaattcacgacgaaaatggaaacaatctattacatattgcggcgtcacagggacacgcagagtgtctacagcacctcacttctttgatgggagaagactgcctcaatgagcgcaacactgagaagttgactccagcaggcctggccattaagaatggtcagttggagtgcgtacgctggatggtgagcgaaacagaagccattgcagaactgagttgttctaaggattttccaagccttattcattacgcaggttgctatggccaggaaaagattcttctgtggcttcttcagtttatgcaagaacagggcatctcgttggatgaagtagaccaggatggcaacagtgccgttcacgtagcctcacagcatggctaccttggatgcatacagaccttggttgaatatggagcaaatgtcaccatgcagaaccacgctggggaaaagccctcccagagcgccgagcggcaggggcacaccctgtgctccaggtacctggtggtggtggagacctgcatgtcgctggcctctcaagtggtgaagttaaccaagcagctaaaggaacaaacagtagaacgtgtcacgctgcagaaccaactccaacaatttctagaagcccagaaatcagagggcaagtcactcccttcttcacccagttcaccatcctcacctgcctccagaaagtcccagtggaaatctccagatgcagatgatgattctgtagccaaaagcaagccaggagtccaagaggggattcaggttcttggaagcctgtcagcctccagccgggctagacccaaagcaaaagatgaagattctgataaaatcttacgccagttattgggaaaggaaatctcagaaaatgtctgcacccaggaaaaactgtccttggaattccaggatgctcaggcttcctctagaaattctaaaaagatcccactggagaagagggaactgaagttagccaggctgagacagctgatgcagaggtcactgagtgagtctgacacagactccaacaactctgaggaccccaagactaccccagtgaggaaggctgaccgaccaaggccgcagcccattgtagaaagcgtagagagtatggacagcgcagaaagcctgcacctgatgattaagaaacacaccttggcatcagggggacgcaggtttcctttcagcatcaaggcctccaaatccctggatggccacagcccatctcccacctcagagagcagcgaaccagacttagaatcccagtatccaggctcagggagtattcctccaaaccagccctctggtgaccctcagcagcccagccctgacagtactgctgcccagaaagttgccacaagtcccaagagtgccctcaagtctccatcttccaagcgtaggacatctcagaacttaaaactgagagttacctttgaggagcctgtggtgcagatggagcagcctagccttgaactgaatggagaaaaagacaaagataagggcaggactctccagcggacctccacaagtaacgaatcgggggatcaactgaaaaggccttttggagcctttcgatctatcatggagacactaagtggcaaccaaaacaataataataactaccaggcagccaaccagctgaaaacctctacattgcccttgacctcacttgggaggaagacagatgccaagggaaaccctgccagctccgctagcaaaggaaagaataaggcagcataatgacatcaatagaaaaatgaagaaatcctacagcataaagcacattgctgagccagagtcaaaagaactcttcttgtaaatcactttttaaattttctctcactgatgccctttggaaattattggaaatttctggactatcctctttggaaagagaaccatgaaaacaatgcctcaccagcagaagaacagaatatcaggatgccttaaatttatagtagtagactgtaaaagattcattttggggtgatatctgtatatataacttgtttttttaaaagatgccgtttaaaagcatgattgggaaaatgtatgttttttaagagtagattgattcaccctacccacaggacattcaccaagccactgataccattttatatttcatcaattgcatgagtatttgctaatgttgattgaacctccctttccccataatgtgggcagatttggctcagctccttcatgagatcaggtcagtggtattgtttctgtcaagagtgttttttctgtcatttctactttttgtataaaggaaataaaacaatgttaacagccacctataagcttggggcacctactttctaacaaatctgtgatgttctgatttctaagggactttgcaagtattttgattgctgatatttgatttcaggaacaaactgctcagtttagcagttttcccataggcgtcaaataaaacattctatatttcattaagta

SEQ ID NO: 156299 - protein, 323 aa, Artificial Sequence
  derived and/or modified sequence
MAAELSMGPELPTSPLAMEYVNDFDLLKFDVKKEPLGRAERPGRPCTRLQPAGSVSSTPLSTPCSSVPSSPSFSPTEQKTHLEDLYWMASNYQQMNPEALNLTPEDAVEALIGSHPVPQPLQSFDSFRGAHHHHHHHHPHPHHAYPGAGVAHDELGPHAHPHHHHHHQASPPPSSAASPAQQLPTSHPGPGPHATASATAAGGNGSVEDRFSDDQLVSMSVRELNRHLRGFTKDEVIRLKQKRRTLKNRGYAQSCRYKRVQQKHHLENEKTQLIQQVEQLKQEVSRLARERDAYKVKCEKLANSGFREAGSTSDSPSSPEFFL

SEQ ID NO: 156300 - DNA, 3378 bp, Artificial Sequence
  derived and/or modified sequence
acagctgcaccgccgagctgcgagcggctgcgagcgagagagcgtaagagcaagagagctagagagcgagcaacgggcactcgccccacgcctcccctcagccccaccgcgcgctccgcttgcctctccaccccgcccgactctacccggcccggtccctgcgcgggcacagcccagagctctggggcggtgcaggcagcctcgggactctccggcgcgccgccgcgtccccagacaaaggcttggccggcggccccggcccgctgcgccctcgctccccgcctccccagctcttctccgctcttcccccccgcgcttggctcggcgcgctccggccggccgcaaagtttcccgggcggcagcggcggctgcgcctcgcttcagcgatggccgcggagctgagcatggggccagagctgcccaccagcccgctggccatggagtatgtcaacgacttcgacctgctcaagttcgacgtgaagaaggagccactggggcgcgcggagcgtccgggcaggccctgcacacgcctgcagccagccggctcggtgtcctccacaccgctcagcactccgtgtagctccgtgccctcgtcgcccagcttcagcccgaccgaacagaagacacacctcgaggatctgtactggatggcgagcaactaccagcagatgaaccccgaggcgctcaacctgacgcccgaggacgcggtggaagcgctcatcggctcgcacccagtgccacagccgctgcaaagcttcgacagctttcgcggcgctcaccaccaccaccatcaccaccaccctcacccgcaccacgcgtacccgggcgccggcgtggcccacgacgagctgggcccgcacgctcacccgcaccatcaccatcatcaccaagcgtcgccgccgccgtccagcgccgctagcccggcgcaacagctgcccactagccaccccgggcccgggccgcacgcgacggcctcggcgacggcggcgggcggcaacggcagcgtggaggaccgcttctccgacgaccagctcgtgtccatgtccgtgcgcgagctgaaccgccacctgcggggcttcaccaaggacgaggtgatccgcctgaagcagaagcggcggaccctgaagaaccggggctacgcccagtcttgcaggtataaacgcgtccagcagaagcaccacctggagaatgagaagacgcagctcattcagcaggtggagcagcttaagcaggaggtgtcccggctggcccgcgagagagacgcctacaaggtcaagtgcgagaaactcgccaactccggcttcagggaggcgggctccaccagcgacagcccctcctctcccgagttctttctgtgagtcgtggccggtcctggcccccgcccttgccccggcccggactccctgtcccacgtccctagtcccagactaccccggaccctgtccctgccgcggccccagccttgacctgtttgacttgagcgagagggaggaagggcgcgcgggccgcgggcgacgggcgggtgcgcgggcgggcaggggaccttggctaaggcgagagtagcgcacgccagcgccgcctcctagactcgagcagagccggagagagagacgagagggtgggaggtcccggagtaacttctctccaggctgaagggcggcgaggcatagtcccgagaagtcaccaaggccatctggagactcctggctttctgaactttgcgcgttaagccgggacagctgctttgctgcccggagagtagtccgcgccaggaagagagcaacgaggaaaggagagggactctggcgtcccggcaggcgagaggcgaggctgagcgaaagaaggaaggacagacggacctgtctgtcagagttcggagaacactggctctcagccctgagacacaggcctcagttaggacgctcggcgcccaaatctcatcagttttattgcctgctcgattatatagaaaaatacaaaaaatctgcattaaaaatattaatcctgcatgctggacatgtatggtaataatttctattttgtaccattttcttgtttaactttagcatgttgttgatcatggatcatactccccttgtttctttgggtgagaagggatcgcagtttggaaactccggcggctgcgtgcggggtttcagtcccagctgtaggcttgtaaatacccgccccgccaaaccgcatagagaacgtggcagcaagctgagggtctttgtttgggtttattattacggtatttttgtttgtaagttaaaaagaaaaaaaaaaagaaaaagttccgggcattttgcatcagaaaacaactttgtcttggggcacacttggaagttgcatgttttctttccttcccttatccccattcggtcctctttttcctctctcgctttagttttcaaccttgttggtgctgagagagagaaccgagaggtcccagtacaagggcagggcagggcagggaagctgccaagctccgcaccccagaggagtgttctggactacagccttgtcttatggtcaaattgatacccttaataagaaaggaaaggaaaggaaaacagatcctcccctctgctttttattgtaaccagaatcaccctgaggtcccttctgaaccctctgggcctgcgctaattgtaggagccacagcgctcctagggtgagaggcttagccatccctgaccctggcagtgcactggtaagcagacactgcactgaaccaactgctatgctcagaatgtaccagaaacccaaacattggcaagtaattttgcaactttcaagtgcgttctttagaccaatgcattgcgtttctttccctgcttttgagatagtaggaagagttcttggtggtgtccccccccttcaattcttcagttgtatagtagttatagggaagatatgggtgtttttctttattattacttttttttttctgcaggtcagtaaaaggatttaagttgcactgacaaaaataccaaaataaaagtgtatttttaagttcccatttgaaattgctggcgctgctggccggatgcatttttgagtttgtattagttgataaattaacagtaataacaagattgtatgaaccgcatggtgcttgcagttttaaatattgtggatatttgtcctgcatcagaaacgagctttggtttttacagattcaactgtgttgaaatcaaacctgccgcaacagaaattgtttttatttcatgtaaaataagggatcaatttcaaaccctgcttatgatatgaaaatattaaaacctagtctattgtagttttattcagactggtttctgttttttggttattaaaatggtttcctattttgcttattaaaaaaaaaaaaaaaaaaaa

SEQ ID NO: 156301 - DNA, 972 bp, Artificial Sequence
  derived and/or modified sequence
atggccgccgagctgagcatgggccccgagctgcccaccagccccctggccatggagtacgtgaacgacttcgacctgctgaagttcgacgtgaagaaggagcccctgggcagagccgagagacccggcagaccctgcaccagactgcagcccgccggcagcgtgagcagcacccccctgagcaccccctgcagcagcgtgcccagcagccccagcttcagccccaccgagcagaagacccacctggaggacctgtactggatggccagcaactaccagcagatgaaccccgaggccctgaacctgacccccgaggacgccgtggaggccctgatcggcagccaccccgtgccccagcccctgcagagcttcgacagcttcagaggcgcccaccaccaccaccaccaccaccacccccacccccaccacgcctaccccggcgccggcgtggcccacgacgagctgggcccccacgcccacccccaccaccaccaccaccaccaggccagccccccccccagcagcgccgccagccccgcccagcagctgcccaccagccaccccggccccggcccccacgccaccgccagcgccaccgccgccggcggcaacggcagcgtggaggacagattcagcgacgaccagctggtgagcatgagcgtgagagagctgaacagacacctgagaggcttcaccaaggacgaggtgatcagactgaagcagaagagaagaaccctgaagaacagaggctacgcccagagctgcagatacaagagagtgcagcagaagcaccacctggagaacgagaagacccagctgatccagcaggtggagcagctgaagcaggaggtgagcagactggccagagagagagacgcctacaaggtgaagtgcgagaagctggccaacagcggcttcagagaggccggcagcaccagcgacagccccagcagccccgagttcttcctgtag

SEQ ID NO: 156302 - DNA, 972 bp, Artificial Sequence
  derived and/or modified sequence
atggctgccgagttgagcatgggtcctgagctgcccacctcacctcttgctatggagtatgttaatgacttcgacttgctgaaattcgacgtgaaaaaggaacctttgggaagagccgaaagacctgggcgcccatgtactagattgcagccggccgggagtgtttcatcgaccccgctgagcaccccttgcagttcggtgccctctagcccgtccttctctcccacagagcagaaaacccacttggaagacttatactggatggccagcaactaccagcagatgaatccggaggccctaaaccttaccccagaggatgcagtggaagcacttatcggttctcacccggtgccccaacctctgcagagctttgactcctttagaggcgcacatcatcatcatcaccatcaccacccccatccacaccatgcctacccgggtgctggcgtggcccatgacgaactgggcccacatgcacatccacatcaccaccatcaccaccaggcaagtccccctccatcttctgctgctagtccagcccagcagctgccaacaagtcaccccggacccggcccccatgcgaccgcgtcagctactgcagcaggtggcaatgggagtgtggaggaccgcttctctgatgaccaactggtgtctatgagcgtccgggagttaaaccgtcatctcaggggtttcacgaaggacgaagtaattagactgaagcaaaagaggcgcactcttaagaaccgtgggtacgcccagtcctgtaggtacaagagggtccagcaaaagcaccaccttgagaatgagaaaactcagctgatccagcaggtggaacagctcaagcaggaagtgtctagattggccagggaaagggatgcttataaggtgaaatgcgagaaactggccaattctggcttccgggaagcggggtctactagcgatagcccaagttcgcccgagttctttctgtag

SEQ ID NO: 156303 - DNA, 972 bp, Artificial Sequence
  derived and/or modified sequence
atggctgcagaactgtcgatgggacccgagctgccaacgtcaccactggcaatggaatatgtgaatgacttcgatctgctgaaatttgacgtcaaaaaggagcccttagggagagctgagagaccagggcggccttgcaccaggttgcaaccagcagggtcggtgtcatccacccccctgtcaactccctgctctagcgtaccctcttccccttcatttagtcccaccgaacagaaaacgcaccttgaagacctgtactggatggcatctaattatcaacagatgaatcctgaggccctgaacctgacgcccgaggatgccgtcgaggctctcatcggatctcaccccgtgccccagccccttcaaagttttgacagctttcgcggggcacaccatcaccatcatcatcaccaccctcatccccatcacgcgtacccaggggctggagtggcacacgacgagctcggaccacatgcccatccccaccaccatcaccaccatcaggcctcacccccgccatcaagcgcagcctcaccagctcaacaactcccaacttcccatccaggtcctggcccacacgccactgctagcgcaacagctgccgggggaaatgggagcgtggaggatagattttcagatgatcagctcgtctcaatgagcgtgagggagctgaataggcatctccgggggtttaccaaggacgaggtgattcgcctgaaacagaaaaggagaacgctgaagaatcggggatatgcgcagtcttgtcggtataaaagagttcagcagaagcatcatctggaaaacgagaaaacgcagctaatccagcaggtcgagcagttgaagcaggaggtttctcggctcgccagagaacgagacgcatataaggttaaatgcgaaaagttggcgaattctggatttagagaggccggatccacatccgactcaccctcatcacccgagtttttcctgtag

SEQ ID NO: 156304 - DNA, 972 bp, Artificial Sequence
  derived and/or modified sequence
atggctgctgagctgtccatgggccctgagctgcccaccagccccctggccatggagtatgtgaatgactttgacctgctgaagtttgatgtgaagaaggagcccctgggccgggcagagcggcccggccggccctgcacccggctgcagcctgctggctctgtgagcagcacccccctgagcaccccctgcagctctgtgcccagcagccccagcttcagccccacagagcagaagacccacctggaggacctgtactggatggccagcaactaccagcagatgaaccctgaggccctgaacctgaccccagaagatgctgtggaggccctgattggcagccaccctgtgccccagcccctgcagagctttgacagcttccggggggcccaccaccaccaccaccaccaccacccccacccccaccacgcctacccaggggccggcgtggcccatgatgagctgggcccccacgcccacccccaccaccaccaccaccaccaggccagccccccacccagcagcgctgccagccctgcccagcagctgcccaccagccaccctggccctggcccccacgccacagccagcgccacagctgctggaggaaatggatctgtggaggaccgcttcagtgatgaccagctggtgtccatgtctgtgcgggagctgaacagacacctgcggggcttcaccaaggatgaggtgatccggctgaagcagaagaggaggaccctgaagaacagaggctacgcccagagctgccgctacaagagggtgcagcagaagcaccacctggagaatgagaagacccagctgatccagcaggtggagcagctgaagcaggaggtgtcccggctggcccgggagagagatgcctacaaggtgaagtgtgagaagctggccaacagcggcttccgggaggccggcagcaccagtgacagccccagcagccctgagttcttcctgtag

SEQ ID NO: 156305 - DNA, 972 bp, Artificial Sequence
  derived and/or modified sequence
atggccgccgagctgagcatgggccccgagctgcccaccagcccccttgccatggagtatgtgaatgattttgatctgttgaagttcgatgtgaaaaaagagcccctaggaagggcagaaaggcccggacgcccctgtacccgtctgcagcccgccggctccgtttcctccactcccctctccactccgtgcagttccgtgcctagttcaccttcattctcaccgacagagcaaaaaacccatctcgaagacttatactggatggccagtaactatcaacaaatgaaccccgaagcccttaacttaacgccggaagatgctgttgaggctttaatcggtagtcatcctgtgccccaacccttacagtcattcgactccttcagaggcgctcaccaccatcaccatcatcaccacccccatccccaccacgcttatcccggtgccggcgttgcccacgacgaactgggccctcacgcccacccacatcatcatcatcaccatcaggcctcccccccaccctccagcgcagcatcacccgcccaacagctgccaacttcacatcctgggccaggccctcacgcaacagcttcagccactgctgccggaggtaacggttccgtagaagaccgcttttctgacgatcagctagtcagcatgtccgtccgggagttaaatcggcacttgaggggctttactaaggatgaggtgattcgcctaaagcagaagcgaagaacactgaaaaaccgtggctacgcccagtcttgtagatataaaagagtccaacagaagcatcacttggagaatgagaagacccagctgatccaacaggtcgaacagctcaaacaggaggtctcccgcctagccagagaaagggatgcatataaagtcaaatgcgaaaagctggccaattctggatttcgcgaggccggcagtacttctgactcaccttcctcccccgagtttttcctatag

SEQ ID NO: 156306 - DNA, 972 bp, Artificial Sequence
  derived and/or modified sequence
atggccgccgagctgagcatgggccccgagctgcccaccagccccctggctatggagtatgtcaacgatttcgatctccttaagtttgacgtgaagaaggagcccctgggccgcgccgagagacctggccggccatgtactagactgcagccagccggaagcgtgtcaagtacccctctctcaactccctgctccagtgtcccgagtagcccctctttcagccccacagagcagaaaacccatctggaggacctgtattggatggctagtaactatcagcaaatgaaccctgaagccctcaatctgacgccggaggacgcggtggaagcgttaattggttctcaccctgtgcctcaacctttgcagagtttcgattcttttaggggggctcaccatcatcaccaccaccatcatccacacccccatcatgcctacccgggagcaggtgttgcccacgacgaactcggaccgcacgcacatccccaccatcaccaccaccaccaggccagcccacccccatcttccgctgcctccccagctcaacagcttcccacatctcaccctgggccagggcctcacgccacagcgtctgcaactgcagcgggtggaaatgggtctgtggaggatagattttcagatgatcagctggtcagcatgagtgtgcgcgagcttaatagacacctgcggggattcacaaaggatgaggtcattcgcctgaagcaaaagagaaggacactcaaaaatcggggatatgcacagagctgtcgctacaagcgggtgcaacagaagcaccacctggaaaacgagaaaactcaactcatccagcaggtggaacaactcaaacaggaggttagcagattagctagagagcgggacgcatacaaggttaagtgcgaaaagctcgccaattcaggcttccgggaagcagggtcaacatccgacagtccatcgagtcctgaattcttcctatag

SEQ ID NO: 156307 - DNA, 972 bp, Artificial Sequence
  derived and/or modified sequence
atggccgctgagctcagtatgggcccagaactgcctaccagtcctttagccatggagtatgtaaacgacttcgatctcctgaaatttgacgtgaaaaaagaaccgctgggccgagctgagaggcccggaaggccatgcaccagactgcaaccagcagggtccgtgagtagcactcctttatctacgccatgctcgtcagtgccttccagcccatcattctctcccaccgagcagaaaacgcacttggaagacctttactggatggctagcaattaccaacaaatgaacccagaagccctaaatttgacacccgaggacgctgtggaggccttgatcggcagtcatcctgtgccccaacctttgcagagttttgattctttccggggagcccaccaccaccatcaccatcaccatccacatccccatcatgcctatcctggggctggcgtagcccacgatgagctagggccacatgctcacccccatcaccaccaccaccatcaggcttcccctccaccgtccagcgcggcatcgcctgctcagcagttaccgaccagccatccaggtccagggccacacgccactgccagtgccacagctgcaggtggaaacgggtcggtggaggaccgcttcagcgacgaccagttggtctccatgagcgtgcgggaacttaacaggcatctcagaggattcactaaagacgaggtcatcagactcaagcaaaagcggcgaacactgaaaaatcgtggttacgcgcagtcctgccggtacaagcgggtccagcagaaacatcatctggaaaacgagaagacccaactgattcagcaggttgaacagcttaaacaagaagtgtcccggttggcgagagagagggatgcctacaaagtgaagtgtgagaagctggccaattcaggtttcagggaagcaggcagcacatcagactccccctcttcccccgagttttttttgtag

SEQ ID NO: 156308 - DNA, 972 bp, Artificial Sequence
  derived and/or modified sequence
atggcagctgagctctcaatgggtccagaactgccaaccagtcctctcgctatggaatacgtgaacgatttcgacctgctaaagttcgatgtgaagaaggagcccctcggacgcgctgaacggcctggacgcccttgtacacggctgcaacctgccggatcggtgagcagtaccccattgtcaacaccatgttccagtgttccatcctctccgtctttttcccccacagagcagaaaacacatctggaggacctttactggatggcttcgaactaccagcagatgaaccctgaggctctcaatctgaccccggaagacgcagttgaggccctaattggctctcacccagttccccagccacttcagtcgttcgattcatttcgcggagcgcaccatcaccaccaccaccaccatccccatccccaccatgcctatcccggagctggagttgcgcacgacgagctgggtccacatgcccacccacaccaccatcatcatcaccaggccagtccccctccatccagtgcagcttcccccgcacaacaactgcctacatcccatcctggtccgggacctcatgccacggcaagcgccactgccgcaggcggaaatggatctgtcgaagatcgattctctgacgaccaattggtaagcatgtcggtaagggagctgaatagacatctccgcggttttacgaaggatgaggtaatcaggctcaaacagaaaagaaggacattgaaaaatagggggtacgctcagtcctgcagatataaaagagttcagcagaagcaccacctcgaaaacgaaaaaactcaactcattcagcaggtggaacaactgaagcaggaggtaagcagattggcacgggaacgggacgcatataaagttaagtgtgagaagctggccaatagcggatttagagaggctgggtccaccagcgactccccttctagcccagagttcttcctctag

SEQ ID NO: 156309 - DNA, 3393 bp, Artificial Sequence
  derived and/or modified sequence
cagcacagctgcaccgccgagctgcgagcggctgcgagcgagagagcgtaagagcaagagagctagagagcgagcaacgggcactcgccccacgcctcccctcagccccaccgcgcgctccgcttgcctctccaccccgcccgactctacccggcccggtccctgcgcgggcacagcccagagctctggggcggtgcaggcagcctcgggactctccggcgcgccgccgcgtccccagacaaaggcttggccggcggccccggcccgctgcgccctcgctccccgcctccccagctcttctccgctcttcccccccgcgcttggctcggcgcgctccggccggccgcaaagtttcccgggcggcagcggcggctgcgcctcgcttcagcgatggccgcggagctgagcatggggccagagctgcccaccagcccgctggccatggagtatgtcaacgacttcgacctgctcaagttcgacgtgaagaaggagccactggggcgcgcggagcgtccgggcaggccctgcacacgcctgcagccagccggctcggtgtcctccacaccgctcagcactccgtgtagctccgtgccctcgtcgcccagcttcagcccgaccgaacagaagacacacctcgaggatctgtactggatggcgagcaactaccagcagatgaaccccgaggcgctcaacctgacgcccgaggacgcggtggaagcgctcatcggctcgcacccagtgccacagccgctgcaaagcttcgacagctttcgcggcgctcaccaccaccaccatcaccaccaccctcacccgcaccacgcgtacccgggcgccggcgtggcccacgacgagctgggcccgcacgctcacccgcaccatcaccatcatcaccaagcgtcgccgccgccgtccagcgccgctagcccggcgcaacagctgcccactagccaccccgggcccgggccgcacgcgacggcctcggcgacggcggcgggcggcaacggcagcgtggaggaccgcttctccgacgaccagctcgtgtccatgtccgtgcgcgagctgaaccgccacctgcggggcttcaccaaggacgaggtgatccgcctgaagcagaagcggcggaccctgaagaaccggggctacgcccagtcttgcaggtataaacgcgtccagcagaagcaccacctggagaatgagaagacgcagctcattcagcaggtggagcagcttaagcaggaggtgtcccggctggcccgcgagagagacgcctacaaggtcaagtgcgagaaactcgccaactccggcttcagggaggcgggctccaccagcgacagcccctcctctcccgagttctttctgtgagtcgtggccggtcctggcccccgcccttgccccggcccggactccctgtcccacgtccctagtcccagactaccccggaccctgtccctgccgcggccccagccttgacctgtttgacttgagcgagagggaggaagggcgcgcgggccgcgggcgacgggcgggtgcgcgggcgggcaggggaccttggctaaggcgagagtagcgcacgccagcgccgcctcctagactcgagcagagccggagagagagacgagagggtgggaggtcccggagtaacttctctccaggctgaagggcggcgaggcatagtcccgagaagtcaccaaggccatctggagactcctggctttctgaactttgcgcgttaagccgggacagctgctttgctgcccggagagtagtccgcgccaggaagagagcaacgaggaaaggagagggactctggcgtcccggcaggcgagaggcgaggctgagcgaaagaaggaaggacagacggacctgtctgtcagagttcggagaacactggctctcagccctgagacacaggcctcagttaggacgctcggcgcccaaatctcatcagttttattgcctgctcgattatatagaaaaatacaaaaaatctgcattaaaaatattaatcctgcatgctggacatgtatggtaataatttctattttgtaccattttcttgtttaactttagcatgttgttgatcatggatcatactccccttgtttctttgggtgagaagggatcgcagtttggaaactccggcggctgcgtgcggggtttcagtcccagctgtaggcttgtaaatacccgccccgccaaaccgcatagagaacgtggcagcaagctgagggtctttgtttgggtttattattacggtatttttgtttgtaagttaaaaagaaaaaaaaaaagaaaaagttccgggcattttgcatcagaaaacaactttgtcttggggcacacttggaagttgcatgttttctttccttcccttatccccattcggtcctctttttcctctctcgctttagttttcaaccttgttggtgctgagagagagaaccgagaggtcccagtacaagggcagggcagggcagggaagctgccaagctccgcaccccagaggagtgttctggactacagccttgtcttatggtcaaattgatacccttaataagaaaggaaaggaaaggaaaacagatcctcccctctgctttttattgtaaccagaatcaccctgaggtcccttctgaaccctctgggcctgcgctaattgtaggagccacagcgctcctagggtgagaggcttagccatccctgaccctggcagtgcactggtaagcagacactgcactgaaccaactgctatgctcagaatgtaccagaaacccaaacattggcaagtaattttgcaactttcaagtgcgttctttagaccaatgcattgcgtttctttccctgcttttgagatagtaggaagagttcttggtggtgtccccccccttcaattcttcagttgtatagtagttatagggaagatatgggtgtttttctttattattacttttttttttctgcaggtcagtaaaaggatttaagttgcactgacaaaaataccaaaataaaagtgtatttttaagttcccatttgaaattgctggcgctgctggccggatgcatttttgagtttgtattagttgataaattaacagtaataacaagattgtatgaaccgcatggtgcttgcagttttaaatattgtggatatttgtcctgcatcagaaacgagctttggtttttacagattcaactgtgttgaaatcaaacctgccgcaacagaaattgtttttatttcatgtaaaataagggatcaatttcaaaccctgcttatgatatgaaaatattaaaacctagtctattgtagttttattcagactggtttctgttttttggttattaaaatggtttcctattttgcttattaaaaccatggaaatggtgtttatttagagga

SEQ ID NO: 156310 - DNA, 1813 bp, Artificial Sequence
  derived and/or modified sequence
cttcagcgatggccgcggagctgagcatggggccagagctgcccaccagcccgctggccatggagtatgtcaacgacttcgacctgctcaagttcgacgtgaagaaggagccactggggcgcgcggagcgtccgggcaggccctgcacacgcctgcagccagccggctcggtgtcctccacaccgctcagcactccgtgtagctccgtgccctcgtcgcccagcttcagcccgaccgaacagaagacacacctcgaggatctgtactggatggcgagcaactaccagcagatgaaccccgaggcgctcaacctgacgcccgaggacgcggtggaagcgctcatcggctcgcacccagtgccacagccgctgcaaagcttcgacagctttcgcggcgctcaccaccaccaccatcaccaccaccctcacccgcaccacgcgtacccgggcgccggcgtggcccacgacgagctgggcccgcacgctcacccgcaccatcaccatcatcaccaagcgtcgccgccgccgtccagcgccgctagcccggcgcaacagctgcccactagccaccccgggcccgggccgcacgcgacggcctcggcgacggcggcgggcggcaacggcagcgtggaggaccgcttctccgacgaccagctcgtgtccatgtccgtgcgcgagctgaaccgccacctgcggggcttcaccaaggacgaggtgatccgcctgaagcagaagcggcggaccctgaagaaccggggctacgcccagtcttgcaggtataaacgcgtccagcagaagcaccacctggagaatgagaagacgcagctcattcagcaggtggagcagcttaagcaggaggtgtcccggctggcccgcgagagagacgcctacaaggtcaagtgcgagaaactcgccaactccggcttcagggaggcgggctccaccagcgacagcccctcctctcccgagttctttctgtgagtcgtggccggtcctggccccagccttgacctgtttgacttgagcgagagggaggaagggcgcgcgggccgcgggcgacgggcgggtgcgcgggcgggcaggggaccttggctaaggcgagagtagcgcacgccagcgccgcctcctagactcgagcagagccggagagagagacgagagggtgggaggtcccggagtaacttctctccaggctgaagggcggcgaggcatagtcccgagaagtcaccaaggccatctggagactcctggctttctgaactttgcgcgttaagccgggacagctgctttgctgcccggagagtagtccgcgccaggaagagagcaacgaggaaaggagagggactctggcgtcccggcaggcgagaggcgaggctgagcgaaagaaggaaggacagacggacctgtctgtcagagttcggagaacactggctctcagccctgagacacaggcctcagttaggacgctcggcgcccaaatctcatcagttttattgcctgctcgattatatagaaaaatacaaaaaatctgcattaaaaatattaatcctgcatgctggacatgtatggtaataatttctattttgtaccattttcttgtttaactttagcatgttgttgatcatggatcatactccccttgtttctttgggtgagaagggatcgcagtttggaaactccggcggctgcgtgcggggtttcagtcccagctgtaggcttgtaaatacccgccccgccaaaccgcatagagaacgtggcagcaagctgagggtctttgtttgggtttattattacggtatttttgtttgtaagtt

SEQ ID NO: 156311 - protein, 1142 aa, Artificial Sequence
  derived and/or modified sequence
MGDKDMPTAGMPSLLQSSSESPQSCPEGEDSQSPLQIPQSSPESDDTLYPLQSPQSRSEGEDSSDPLQRPPEGKDSQSPLQIPQSSPEGDDTQSPLQNSQSSPEGKDSLSPLEISQSPPEGEDVQSPLQNPASSFFSSALLSIFQSSPESTQSPFEGFPQSVLQIPVSAASSSTLVSIFQSSPESTQSPFEGFPQSPLQIPVSRSFSSTLLSIFQSSPERTQSTFEGFAQSPLQIPVSPSSSSTLLSLFQSFSERTQSTFEGFAQSSLQIPVSPSFSSTLVSLFQSSPERTQSTFEGFPQSPLQIPVSSSSSSTLLSLFQSSPERTHSTFEGFPQSLLQIPMTSSFSSTLLSIFQSSPESAQSTFEGFPQSPLQIPGSPSFSSTLLSLFQSSPERTHSTFEGFPQSPLQIPMTSSFSSTLLSILQSSPESAQSAFEGFPQSPLQIPVSSSFSYTLLSLFQSSPERTHSTFEGFPQSPLQIPVSSSSSSSTLLSLFQSSPECTQSTFEGFPQSPLQIPQSPPEGENTHSPLQIVPSLPEWEDSLSPHYFPQSPPQGEDSLSPHYFPQSPPQGEDSLSPHYFPQSPQGEDSLSPHYFPQSPPQGEDSMSPLYFPQSPLQGEEFQSSLQSPVSICSSSTPSSLPQSFPESSQSPPEGPVQSPLHSPQSPPEGMHSQSPLQSPESAPEGEDSLSPLQIPQSPLEGEDSLSSLHFPQSPPEWEDSLSPLHFPQFPPQGEDFQSSLQSPVSICSSSTSLSLPQSFPESPQSPPEGPAQSPLQRPVSSFFSYTLASLLQSSHESPQSPPEGPAQSPLQSPVSSFPSSTSSSLSQSSPVSSFPSSTSSSLSKSSPESPLQSPVISFSSSTSLSPFSEESSSPVDEYTSSSDTLLESDSLTDSESLIESEPLFTYTLDEKVDELARFLLLKYQVKQPITKAEMLTNVISRYTGYFPVIFRKAREFIEILFGISLREVDPDDSYVFVNTLDLTSEGCLSDEQGMSQNRLLILILSIIFIKGTYASEEVIWDVLSGIGVRAGREHFAFGEPRELLTKVWVQEHYLEYREVPNSSPPRYEFLWGPRAHSEVIKRKVVEFLAMLKNTVPITFPSSYKDALKDVEERAQAIIDTTDDSTATESASSSVMSPSFSSE

SEQ ID NO: 156312 - protein, 117 aa, Artificial Sequence
  derived and/or modified sequence
GDKDMPTAGMPSLLQSSSESPQSCPEGEDSQSPLQIPVSPSSSSTLLSLFQSFSERTQSTFEGFAQSSLQIPVSPSFSSTLVSLFQSSPERTQSTFEGFPQSPLQIPVSSSSSSTLL

SEQ ID NO: 156313 - protein, 118 aa, Artificial Sequence
  derived and/or modified sequence
MGDKDMPTAGMPSLLQSSSESPQSCPEGEDSQSPLQIPVSPSSSSTLLSLFQSFSERTQSTFEGFAQSSLQIPVSPSFSSTLVSLFQSSPERTQSTFEGFPQSPLQIPVSSSSSSTLL

SEQ ID NO: 156314 - protein, 209 aa, Artificial Sequence
  derived and/or modified sequence
MLTNVISRYTGYFPVIFRKAREFIEILFGISLREVDPDDSYVFVNTLDLTSEGCLSDEQGMSQNRLLILILSIIFIKGTYASEEVIWDVLSGIGVRAGREHFAFGEPRELLTKVWVQEHYLEYREVPNSSPPRYEFLWGPRAHSEVIKRKVVEFLAMLKNTVPITFPSSYKDALKDVEERAQAIIDTTDDSTATESASSSVMSPSFSSE

SEQ ID NO: 156315 - DNA, 3429 bp, Artificial Sequence
  derived and/or modified sequence
atgggtgacaaagacatgccaacagcggggatgccttccctgctgcagtcaagttctgagtcccctcaatcttgccccgagggggaagactcacagtcgcctctgcaaatcccccagtccagtccagaaagcgatgacacactatatccattgcagtctccccagagcaggagcgagggcgaagactccagcgatcctctacagcggccaccagagggtaaggatagtcagtcacctttgcagattccccagtcttcgccggagggcgatgacactcaaagtccacttcagaacagccagagttcccctgaagggaaggacagcctctcgcctctcgagatctcccagtcccctcctgaaggcgaagacgtgcagagtcccctgcaaaaccctgcctcctcttttttttcttctgcgcttctgagtatattccagagcagtccggagagtacccagtcgccctttgaggggttccctcagagcgtgctccaaattcctgtgagtgctgcttccagctccaccctcgtttctatttttcagtcttctcccgagagcacccagtcaccctttgagggttttcctcagtcccctttgcagatcccagtatcccgaagttttagcagtacccttttgagcatattccagagttcccccgagagaacccagtctacattcgaagggtttgcacagagtcctcttcagatcccggtatctccatcttcttccagtaccctgctgagcctgttccagtcattttctgagagaacccagagcacgttcgagggcttcgcgcagtcttcccttcaaataccggtttccccaagcttcagctcaaccctggtctcgctgttccagtcatcaccggaacgcacccagtccacctttgaaggattcccccagagccccttacaaattccagtcagctcttctagttcctctacactgctctcactctttcagtcttcacctgaacgcacacacagcacctttgagggattccctcaatcactgctccagatcccaatgacttctagtttcagttctacactgctctctatcttccaatcgtcacccgagtcagcgcaatctactttcgaaggtttccctcagagtcccctccagatcccaggttcaccatcgttcagctccactctgctttccctgtttcagtcaagccccgaacggacgcactccaccttcgagggctttcctcagtcacccttacagataccaatgacatctagcttcagctctactttactgtccattctgcagagttcaccagagagcgctcagtctgcattcgaaggctttccccagagtccactccagatcccagtgtcgagcagcttctcttacactctgctgagcttgttccagtctagccctgaacgaactcacagcactttcgaggggtttccccagtctcctcttcaaattcctgttagtagcagcagctcaagctcaaccctgctctctctgtttcagagctcccctgaatgcactcaatctacttttgaaggattcccccagtctcctctccagattccccagagtcctccggaaggtgagaacacacacagtcctctccagattgtaccctctctccccgaatgggaggattctctctcgccccactacttcccacagagtcctccacagggcgaggatagccttagtccccattattttccccagtctccgcctcaaggcgaggacagcttgtcaccacactatttcccccagtcgccccagggagaggattcactgagcccccattacttcccccaaagccctcctcaaggagaggactctatgagtcctttatacttcccacaatctccactgcagggagaagagtttcagagttcactccaaagcccggtgagcatttgttctagttcgactccctcatccctcccccagtccttcccagagagcagtcagtcacctcctgagggtccagtccagtctccactgcacagtccacaatctccacctgaaggcatgcactcgcagtcccccctgcaatccccagagtccgccccggagggcgaagattcactgagccctctgcaaattccccagagtccattggagggggaggactcgctcagctccttacatttccctcagagtcctcccgaatgggaagattccctgagtcccctccactttccccagttccccccccagggggaggactttcaatcctcactgcagtccccagtctcgatttgctcttctagtacttctctgagcctgccccagtcctttcccgaaagccctcagagccctcccgaggggccagcgcaaagtcccctccagagacctgtgtcatctttcttctcttacactctagcatctctgctgcagagcagccatgagtccccacagtctccgcctgagggtcctgcccagtcacccctgcagagcccagtgtcatcctttccgagtagtaccagtagctccctcagccagtcatctcctgtctcctcgttcccctcttcaacctcttctagtttatcaaaaagctcgccggagtctccactgcagtcccccgtgatatccttctcctccagcacgtctctctctcctttcagtgaagagtccagtagccctgtggacgagtacacctcatcttccgatacactcctggagagcgacagtctgacagattccgagtcactgatcgagagtgaacctctctttacttatacgctcgacgaaaaggtggatgagcttgcccggttcttattactcaaatatcaagtcaagcaaccgatcaccaaagctgaaatgctgacaaatgttatttcaaggtacacaggttactttcccgtgatctttagaaaggcccgtgaatttattgagatattattcggaatatcactgcgcgaagtcgatcctgatgacagttacgtcttcgtgaacacccttgacttgacctccgaaggatgcctgagcgacgagcaggggatgagccaaaatcgactacttattcttatactatctattatatttattaagggcacttatgcctcagaggaggtgatatgggacgtgctgtcaggcatcggagtccgagccggaagagaacatttcgcgttcggggagccacgggagctcttgaccaaagtttgggttcaggaacattacttagagtatcgagaagtgcccaattccagcccccccaggtacgagtttctgtgggggccgcgcgcacactccgaggtgatcaagagaaaagtggtggaattcttagctatgctgaaaaatacggtgcccattaccttcccttcctcctacaaagatgcccttaaagacgtggaggaaagagcacaggcaatcatcgacaccaccgacgactccactgccaccgagagcgcatcttcctcggtaatgtccccctctttcagcagtgaatag

SEQ ID NO: 156316 - DNA, 354 bp, Artificial Sequence
  derived and/or modified sequence
ggtgacaaggacatgccaacggccggtatgccaagcctgctgcagagtagtagcgagagcccacaatcttgtcccgaaggggaggactctcagtctcccctgcagattccagtgagcccatcatccagctctacactcttatccctgttccaatctttctcagaaagaacccaatccactttcgaggggtttgcccagagttccctccagattccagttagtccttccttttcgtcgacgctcgtatcactctttcaatccagcccggaacggacacagtccacattcgaggggttcccacagagtccacttcagattccagtaagttcatccagctctagcacgctcctgtag

SEQ ID NO: 156317 - DNA, 357 bp, Artificial Sequence
  derived and/or modified sequence
atgggagacaaggacatgccaactgccggcatgccctctctgctccagtcgtcttccgaaagcccacaatcttgccccgagggcgaggatagtcaaagccctctgcaaatccctgtgtccccctcttcaagctcaaccctactcagtctatttcagagttttagcgagcggacccaatccacttttgaaggctttgctcagtcctccctccagatccccgtgtcccccagtttcagcagcacgcttgtctccctcttccaatctagcccagaacgcacgcaaagtactttcgaaggctttccgcagtccccattacagattccagtctcatcctctagctcgtccactcttctctag

SEQ ID NO: 156318 - DNA, 630 bp, Artificial Sequence
  derived and/or modified sequence
atgctgaccaacgttatttcccgctacactggctatttccccgtgatattccgtaaggcccgcgagttcatcgagatcctgttcggcatttctctgcgagaagtggatcctgacgacagttacgtgtttgtaaacaccctggatttaacatctgaagggtgcttaagtgacgaacagggaatgtcgcagaacaggttgttgatcctgatactgtctatcatcttcatcaaaggtacttacgcctcagaagaggttatttgggacgtcttgtccggcatcggtgtcagggcgggaagagagcactttgcattcggggaacctagagagctgctgacgaaggtgtgggtgcaagagcactacctggaataccgagaagtgcccaacagcagcccaccaagatacgaattcctgtggggcccccgtgctcacagcgaagtgattaaacgcaaagttgtggagttcctggccatgttgaaaaatactgttcctataacgttcccttcttcatataaagatgcgctgaaggatgtggaagaaagagcccaggctattatcgatacaaccgacgactccacagctacggagagcgcctcttcctcagtgatgagcccatctttctcgagcgagtag

SEQ ID NO: 156319 - DNA, 3429 bp, Artificial Sequence
  derived and/or modified sequence
atgggagacaaggacatgcccacagctggcatgcccagcctgctgcagagcagcagcgagagcccccagagctgcccagaaggagaggacagccagagccccctgcagatcccccagagcagccctgagagtgatgacaccctgtaccccctgcagagcccccagagccgctcagaaggagaggacagcagtgaccccctgcagaggcctcctgagggcaaggacagccagagccccctgcagatcccccagagcagcccagaaggagatgacacccagagccccctgcagaacagccagagcagccctgagggcaaggacagcctgagccccctggagatcagccagagccccccagagggggaggatgtgcagagccccctgcagaacccagccagcagcttcttcagcagcgccctgctgagcatcttccagagcagccctgagagcacccagagcccctttgagggcttcccccagagcgtgctgcagatccctgtgtctgctgccagcagcagcaccctggtgtccatcttccagagcagccctgagagcacccagagcccctttgagggcttcccccagagccccctgcagatccctgtgagccgctccttcagcagcaccctgctgagcatcttccagagcagccctgagaggacccagagcacctttgagggctttgcccagagccccctgcagatccctgtgagccccagcagcagcagcaccctgctgagcctcttccagagcttcagcgagaggacccagagcacctttgagggctttgcccagagcagcctgcagatccctgtgagccccagcttcagcagcaccctggtgtccctcttccagagcagccctgagaggacccagagcacctttgagggcttcccccagagccccctgcagatccctgtgagcagcagcagcagcagcaccctgctgagcctcttccagagcagccctgagaggacccacagcacctttgagggcttcccccagagcctgctgcagatccccatgaccagcagcttcagcagcaccctgctgagcatcttccagagcagccctgagagcgcccagagcacctttgagggcttcccccagagccccctgcagatccctggcagccccagcttcagcagcaccctgctgagcctcttccagagcagccctgagaggacccacagcacctttgagggcttcccccagagccccctgcagatccccatgaccagcagcttcagcagcaccctgctgagcatcctgcagagcagccctgagagcgcccagagcgcctttgagggcttcccccagagccccctgcagatccctgtgagcagcagcttctcctacaccctgctgagcctcttccagagcagccctgagaggacccacagcacctttgagggcttcccccagagccccctgcagatccctgtgagcagcagcagcagcagcagcaccctgctgagcctcttccagagcagccctgagtgcacccagagcacctttgagggcttcccccagagccccctgcagatcccccagagccccccagagggggagaacacccacagccccctgcagatcgtgcccagcctgcctgagtgggaggacagcctgagcccccactacttcccccagagccccccccagggcgaggacagcctgagcccccactacttcccccagagccccccccagggcgaggacagcctgagcccccactacttcccccagagcccccagggcgaggacagcctgagcccccactacttcccccagagccccccccagggagaagattccatgagccccctgtacttcccccagagccccctgcagggcgaggagttccagagcagcctgcagagccctgtgtccatctgcagcagcagcacccccagcagcctgccccagagcttccctgagagcagccagagccccccagagggccctgtgcagagccccctgcacagcccccagagccccccagagggcatgcacagccagagccccctgcagagccctgagagcgcccctgagggggaggacagcctgagccccctgcagatcccccagagccccctggagggggaggacagcctgagcagcctgcacttcccccagagccccccagagtgggaggacagcctgagccccctgcacttcccccagttccccccccagggcgaggacttccagagcagcctgcagagccctgtgtccatctgcagcagcagcaccagcctgagcctgccccagagcttccctgagagcccccagagccccccagagggccctgcccagagccccctgcagaggcctgtgtcctccttcttctcctacaccctggccagcctgctgcagagcagccatgagagcccccagagccccccagagggccctgcccagagccccctgcagagccctgtgagcagcttccccagcagcaccagcagcagcctgagccagagcagccctgtgtcctccttccccagcagcaccagcagcagcctgagcaagagcagccctgagagccccctgcagagccctgtgatctccttcagcagcagcaccagcctgagccccttcagcgaggagagcagcagccctgtggatgagtacaccagcagcagtgacaccctgctggagagtgacagcctgacagacagcgagagcctcatcgagagcgagcccctcttcacctacaccctggatgagaaggtggatgagctggcccgcttcctgctgctgaagtaccaggtgaagcagcccatcaccaaggccgagatgctgaccaacgtcatcagccgctacacaggctacttccctgtgatcttcaggaaggcccgggagttcatcgagatcctgtttggcatcagcctgcgggaggtggaccctgatgacagctatgtgtttgtgaacaccctggacctgaccagcgagggctgcctgagtgatgagcagggcatgagccagaaccggctgctgatcctgatcctgagcatcatcttcatcaagggcacctacgccagcgaggaggtgatctgggatgtgctgagcggcatcggcgtgcgggccggccgggagcactttgcctttggagagccccgggagctgctgaccaaggtgtgggtgcaggagcactacctggagtaccgggaggtgcccaacagcagcccccccaggtatgagttcctgtggggcccccgggcccacagcgaggtgatcaagaggaaggtggtggagttcctggccatgctgaagaacacagtgcccatcaccttccccagcagctacaaggatgccctgaaggatgtggaggagcgggcccaggccatcatcgacaccacagatgacagcacagccacagaaagtgccagcagctctgtgatgagccccagcttcagcagcgagtag

SEQ ID NO: 156320 - DNA, 354 bp, Artificial Sequence
  derived and/or modified sequence
ggggacaaggacatgcccacagctggcatgcccagcctgctgcagagcagcagcgagagcccccagagctgcccagagggggaggacagccagagccccctgcagatccctgtgagccccagcagcagcagcaccctgctgagcctcttccagagcttcagcgagaggacccagagcacctttgagggctttgcccagagcagcctgcagatccctgtgagccccagcttcagcagcaccctggtgtccctcttccagagcagccctgagaggacccagagcacctttgagggcttcccccagagccccctgcagatccctgtgagcagcagcagcagcagcaccctgctgtag

SEQ ID NO: 156321 - DNA, 357 bp, Artificial Sequence
  derived and/or modified sequence
atgggagacaaggacatgcccacagctggcatgcccagcctgctgcagagcagcagcgagagcccccagagctgcccagaaggagaggacagccagagccccctgcagatccctgtgagccccagcagcagcagcaccctgctgagcctcttccagagcttcagcgagaggacccagagcacctttgagggctttgcccagagcagcctgcagatccctgtgagccccagcttcagcagcaccctggtgtccctcttccagagcagccctgagaggacccagagcacctttgagggcttcccccagagccccctgcagatccctgtgagcagcagcagcagcagcaccctgctgtag

SEQ ID NO: 156322 - DNA, 630 bp, Artificial Sequence
  derived and/or modified sequence
atgctgaccaacgtcatcagccgctacacaggctacttccctgtgatcttcaggaaggcccgggagttcatcgagatcctgtttggcatcagcctgcgggaggtggaccctgatgacagctatgtgtttgtgaacaccctggacctgaccagcgagggctgcctgagtgatgagcagggcatgagccagaaccggctgctgatcctgatcctgagcatcatcttcatcaagggcacctacgccagcgaggaggtgatctgggatgtgctgtctggaattggagtgcgggccggccgggagcactttgccttcggggagccccgggagctgctgaccaaggtgtgggtgcaggagcactacctggagtaccgggaggtgcccaacagcagccccccaagatatgagttcctgtggggcccccgggcccacagcgaggtgatcaagaggaaggtggtggagttcctggccatgctgaagaacacagtgcccatcaccttccccagcagctacaaggatgccctgaaggatgtggaggagcgggcccaggccatcatcgacaccacagatgacagcacagccacagagagcgccagcagctctgtgatgagccccagcttcagcagcgagtag

SEQ ID NO: 156323 - DNA, 4270 bp, Artificial Sequence
  derived and/or modified sequence
gtctgaaggacctgaggcattttgtgacgaggatcgtctcaggtcagcggagggaggagacttatagacctatccagtcttcaaggtgctccagaaagcaggagttgaagacctgggtgtgagggacacatacatcctaaaagcaccacagcagaggaggcccaggcagtgccaggagtcaaggttcccagaagacaaaccccctaggaagacaggcgacctgtgaggccctagagcaccaccttaagagaagaagagctgtaagccggcctttgtcagagccatcatgggggacaaggatatgcctactgctgggatgccgagtcttctccagagttcctctgagagtcctcagagttgtcctgagggggaggactcccagtctcctctccagattccccagagttctcctgagagcgacgacaccctgtatcctctccagagtcctcagagtcgttctgagggggaggactcctcggatcctctccagagacctcctgaggggaaggactcccagtctcctctccagattccccagagttctcctgagggcgacgacacccagtctcctctccagaattctcagagttctcctgaggggaaggactccctgtctcctctagagatttctcagagccctcctgagggtgaggatgtccagtctcctctgcagaatcctgcgagttccttcttctcctctgctttattgagtattttccagagttcccctgagagtactcaaagtccttttgagggttttccccagtctgttctccagattcctgtgagcgccgcctcctcctccactttagtgagtattttccagagttcccctgagagtactcaaagtccttttgagggttttccccagtctccactccagattcctgtgagccgctccttctcctccactttattgagtattttccagagttcccctgagagaactcagagtacttttgagggttttgcccagtctcctctccagattcctgtgagcccctcctcctcctccactttactgagtcttttccagagtttctctgagagaactcagagtacttttgagggttttgcccagtcttctctccagattcctgtgagcccctccttctcctccactttagtgagtcttttccagagttcccctgagagaactcagagtacttttgagggttttccccagtctcctctccagattcctgtgagctcctcctcctcctccactttattgagtcttttccagagttcccctgagagaactcacagtacttttgagggttttccccagtctcttctccagattcctatgacctcctccttctcctctactttattgagtattttccagagttctcctgagagtgctcaaagtacttttgagggttttccccagtctcctctccagattcctgggagcccctccttctcctccactttactgagtcttttccagagttcccctgagagaactcacagtacttttgagggttttccccagtctcctctccagattcctatgacctcctccttctcctctactttattgagtattttacagagttctcctgagagtgctcaaagtgcttttgagggttttccccagtctcctctccagattcctgtgagctcctctttctcctacactttattgagtcttttccagagttcccctgagagaactcacagtacttttgagggttttccccagtctcctctccagattcctgtgagctcctcctcctcctcctccactttattgagtcttttccagagttcccctgagtgtactcaaagtacttttgagggttttccccagtctcctctccagattcctcagagtcctcctgaaggggagaatacccattctcctctccagattgttccaagtcttcctgagtgggaggactccctgtctcctcactactttcctcagagccctcctcagggggaggactccctatctcctcactactttcctcagagccctcctcagggggaggactccctgtctcctcactactttcctcagagccctcagggggaggactccctgtctcctcactactttcctcagagccctcctcagggggaggactccatgtctcctctctactttcctcagagtcctcttcagggggaggaattccagtcttctctccagagccctgtgagcatctgctcctcctccactccatccagtcttccccagagtttccctgagagttctcagagtcctcctgaggggcctgtccagtctcctctccatagtcctcagagccctcctgaggggatgcactcccaatctcctctccagagtcctgagagtgctcctgagggggaggattccctgtctcctctccaaattcctcagagtcctcttgagggagaggactccctgtcttctctccattttcctcagagtcctcctgagtgggaggactccctctctcctctccactttcctcagtttcctcctcagggggaggacttccagtcttctctccagagtcctgtgagtatctgctcctcctccacttctttgagtcttccccagagtttccctgagagtcctcagagtcctcctgaggggcctgctcagtctcctctccagagacctgtcagctccttcttctcctacactttagcgagtcttctccaaagttcccatgagagtcctcagagtcctcctgaggggcctgcccagtctcctctccagagtcctgtgagctccttcccctcctccacttcatcgagtctttcccagagttctcctgtgagctccttcccctcctccacttcatcgagtctttccaagagttcccctgagagtcctctccagagtcctgtgatctccttctcctcctccacttcattgagcccattcagtgaagagtccagcagcccagtagatgaatatacaagttcctcagacaccttgctagagagtgattccttgacagacagcgagtccttgatagagagcgagcccttgttcacttatacactggatgaaaaggtggacgagttggcgcggtttcttctcctcaaatatcaagtgaagcagcctatcacaaaggcagagatgctgacgaatgtcatcagcaggtacacgggctactttcctgtgatcttcaggaaagcccgtgagttcatagagatactttttggcatttccctgagagaagtggaccctgatgactcctatgtctttgtaaacacattagacctcacctctgaggggtgtctgagtgatgagcagggcatgtcccagaaccgcctcctgattcttattctgagtatcatcttcataaagggcacctatgcctctgaggaggtcatctgggatgtgctgagtggaataggggtgcgtgctgggagggagcactttgcctttggggagcccagggagctcctcactaaagtttgggtgcaggaacattacctagagtaccgggaggtgcccaactcttctcctcctcgttacgaattcctgtggggtccaagagctcattcagaagtcattaagaggaaagtagtagagtttttggccatgctaaagaataccgtccctattacctttccatcctcttacaaggatgctttgaaagatgtggaagagagagcccaggccataattgacaccacagatgattcgactgccacagaaagtgcaagctccagtgtcatgtcccccagcttctcttctgagtgaagtctagggcagattcttccctctgagtttgaagggggcagtcgagtttctacgtggtggagggcctggttgaggctggagagaacacagtgctatttgcatttctgttccatatgggtagttatggggtttacctgttttacttttgggtatttttcaaatgcttttcctattaataacaggtttaaatagcttcagaatcctagtttatgcacatgagtcgcacatgtattgctgtttttctggtttaagagtaacagtttgatattttgtaaaaacaaaaacacacccaaacacaccacattgggaaaaccttctgcctcattttgtgatgtgtcacaggttaatgtggtgttactgtaggaattttcttgaaactgtgaaggaactctgcagttaaatagtggaataaagtaaaggattgttaatgtttgcatttcctcaggtcctttagtctgttgttcttgaaaactaaagatacatacctggtttgcttggcttacgtaagaaagtagaagaaagtaaactgtaataaataaaagtgtcagtgactca

SEQ ID NO: 156324 - DNA, 351 bp, Artificial Sequence
  derived and/or modified sequence
ggggacaaggatatgcctactgctgggatgccgagtcttctccagagttcctctgagagtcctcagagttgtcctgagggggaggactcccaatctcctctccagattcctgtgagcccctcctcctcctccactttactgagtcttttccagagtttctctgagagaactcagagtacttttgagggttttgcccagtcttctctccagattcctgtgagcccctccttctcctccactttagtgagtcttttccagagttcccctgagagaactcagagtacttttgagggttttccccagtctcctctccagattcctgtgagctcctcctcctcctccactttattg

SEQ ID NO: 156325 - DNA, 613 bp, Artificial Sequence
  derived and/or modified sequence
gaggatcgtctcaggtcagcggagggaggagacttatagacctatccagtcttcaaggtgctccagaaagcaggagttgaagacctgggtgtgagggacacatacatcctaaaagcaccacagcagaggaggcccaggcagtgccaggagtcaaggttcccagaagacaaaccccctaggaagacaggcgacctgtgaggccctagagcaccaccttaagagaagaagagctgtaagccggcctttgtcagagccatcatgggggacaaggatatgcctactgctgggatgccgagtcttctccagagttcctctgagagtcctcagagttgtcctgagggggaggactcccagtctcctctccagattcctgtgagcccctcctcctcctccactttactgagtcttttccagagtttctctgagagaactcagagtacttttgagggttttgcccagtcttctctccagattcctgtgagcccctccttctcctccactttagtgagtcttttccagagttcccctgagagaactcagagtacttttgagggttttccccagtctcctctccagattcctgtgagctcctcctcctcctccactttattga

SEQ ID NO: 156326 - DNA, 1084 bp, Artificial Sequence
  derived and/or modified sequence
gccaggagtcaaggttcccagaagacaaaccccctaggaagacaggcgacctgtgaggccctagagcaccaccttaagagaagaagagctgtaagccggcctttgtcagagccatcatgggggacaaggatatgcctactgctgggatgccgagtcttctccagagttcctctgagagtcctcagagttgtcctgagggggaggactcccagtctcctctccagattccccagagttctcctgagagcgacgacacccttccttgatagagagcgagcccttgttcacttatacactggatgaaaaggtggacgagttggcgcggtttcttctcctcaaatatcaagtgaagcagcctatcacaaaggcagagatgctgacgaatgtcatcagcaggtacacgggctactttcctgtgatcttcaggaaagcccgtgagttcatagagatactttttggcatttccctgagagaagtggaccctgatgactcctatgtctttgtaaacacattagacctcacctctgaggggtgtctgagtgatgagcagggcatgtcccagaaccgcctcctgattcttattctgagtatcatcttcataaagggcacctatgcctctgaggaggtcatctgggatgtgctgagtggaataggggtgcgtgctgggagggagcactttgcctttggggagcccagggagctcctcactaaagtttgggtgcaggaacattacctagagtaccgggaggtgcccaactcttctcctcctcgttacgaattcctgtggggtccaagagctcattcagaagtcattaagaggaaagtagtagagtttttggccatgctaaagaataccgtccctattacctttccatcctcttacaaggatgctttgaaagatgtggaagagagagcccaggccataattgacaccacagatgattcgactgccacagaaagtgcaagctccagtgtcatgtcccccagcttctcttctgagtgaagtctagggcagattcttccctctgagtttgaagggggcagtcgagtttctacgtggtggagggcctggttgaggctggag

SEQ ID NO: 156327 - DNA, 3429 bp, Artificial Sequence
  derived and/or modified sequence
atgggcgacaaggacatgcccaccgccggcatgcccagcctgctgcagagttcgagcgaatcaccccagagctgtccggaaggagaggactcgcagtctcccttgcagatccctcaaagcagccctgagtccgacgacacactttatcctctacagtccccgcagtcacggtccgaaggggaagattcctctgatcccctccagcgtcctccagaaggaaaggatagccagtcgcccctgcagatcccgcagagcagccccgaaggcgacgatacacagtccccacttcagaactcccagtcttcccccgagggaaaagactctctcagccccctggagataagccagtctcctccagaaggtgaagacgtgcagagccctctacagaatccagcctccagcttcttcagttccgccctgttgagcatcttccagagttcacctgaatcaacgcagtctcccttcgagggctttccccagagcgtgcttcaaataccagtttcggccgcctcttctagcaccttagtttctatcttccagagttcgccagagtcaactcagtctccattcgagggtttcccacagagtcccttgcaaattccagttagtcgatccttctcatctaccctcctctctatcttccagtccagcccagaacggacccagagtacgtttgaaggatttgcccagagtccactgcagatccctgtttctccctcaagcagtagtacactgttgtctctgttccagtcattttccgaaagaacccagtctacattcgaaggctttgcgcagtctagcctgcagattccagtgtctccaagctttagttctacattggtatcgctgttccagtcatccccagagcgcactcagtccacctttgaggggttcccccagagtcctctgcagattccagtgagcagcagcagtagttctacccttctgtcattattccaaagttctcctgagcgcacacatagtacctttgaagggttccctcaatctcttttgcagatcccaatgactagctcatttagtagtacactactgtcaatcttccaatcttcacctgaaagcgctcaatctacatttgaggggtttccacagtctccgctacaaatccctggttctccctcatttagctctactttgttgtctctcttccagtcctccccggaaaggacgcactccaccttcgagggttttccgcagtcaccactgcaaattcccatgacatcttccttctctagcactctcctttcgatcctgcagtctagccccgaatctgctcagtctgctttcgaggggtttccgcaatctccattgcagattcccgtctcctcctcattcagctacacccttctcagcctcttccaatcctcacctgagcgcactcatagtacttttgagggattcccccaatctccccttcagatccctgtgtcgtcttcgtcctcaagctcaactctgctgtctctttttcagagtagtccagaatgtacccagagtacatttgaggggttcccccagagtccattgcagatcccccagtctccaccggagggagaaaatacacactcccccttgcagattgtcccaagtctccctgagtgggaggactccctcagcccccactatttcccacaaagccctccccaaggcgaggactccctgagcccacactacttccctcagagccccccacaaggcgaggactctctgagccctcactactttcctcagtctccgcagggcgaagactcactgtccccacactactttccccagtcaccacctcagggggaggattccatgtccccactttatttcccccagagccccctacagggagaagaatttcagtcttcactccagagcccggtgtctatctgcagttcgtccacaccttcctcactcccacagagctttcccgagtcctcacagtctccaccggagggacctgtgcagagtccactgcactctccacagtccccccctgaggggatgcactctcagagccccctacaatcacccgagtctgcacccgaaggggaagactctcttagcccattacagatccctcagtctcccctggaaggagaggatagccttagcagccttcacttcccccagtcccctcccgagtgggaagacagcttgagccctctccatttcccgcagttcccacctcagggagaagattttcagtctagtctccagagccctgtatccatctgtagctccagtacgtcactgtccttaccgcagagcttcccggaatccccacaaagtccaccagaagggcccgcccagagtcccctccagcgcccagtcagtagttttttctcctataccctggcatcgctgctgcaatcctcacatgagagcccgcagtccccccccgaaggtcctgctcagtccccccttcaatctcctgtaagtagttttcccagctcaacatctagctcattgagccagtctagcccagtgtctagtttcccttcctccacatcttcctccctgagcaagagcagcccagaatccccgctgcaatcgccagttataagcttcagctctagcaccagcctcagtccattcagcgaagaatccagttcgcctgtggacgagtacaccagcagctctgatacactgctggaatctgattccctcacagacagtgagtccctcatagagagcgaaccgctctttacctacacactagatgagaaggttgacgagcttgctcggttccttctgctcaaatatcaggtcaagcagcccattacgaaagcagagatgctcaccaatgttatatctagatataccggctatttcccagtaatttttaggaaggccagggaatttattgagatactttttgggatctccttgcgcgaagttgatcccgatgattcgtacgtgttcgtaaatactctggatttaaccagcgaaggatgtctgtcggacgagcagggtatgtctcagaaccggctacttattctgattctgtcaatcatattcatcaaaggcacgtacgcctctgaagaggtgatttgggatgtgctctctggaataggggtcagggctggcagggagcactttgccttcggcgaaccacgggagcttttgaccaaggtgtgggtccaggagcactacctagagtaccgggaagtgcccaactctagtccacctcggtatgagttcctgtggggaccccgcgcccattccgaggtgatcaaaaggaaagtcgtggagttcctcgctatgctgaagaacacagtgccaattacattccccagcagttacaaggatgcccttaaagatgtcgaggagcgcgcccaggcgattattgacacaaccgacgacagcactgcaacagagagcgcatcctcttctgtcatgtctccatcattctcctcagagtag

SEQ ID NO: 156328 - DNA, 354 bp, Artificial Sequence
  derived and/or modified sequence
ggcgacaaggacatgcccaccgccggcatgcccagcctgctgcagtcatcttcagaatctcctcagtcatgtccagagggcgaggatagccagtctccattacagatcccagtctctcccagcagctccagcaccctgctgtctcttttccagagtttttcagagcgcacccaaagcactttcgaaggttttgctcagagctcgctccaaatcccagtgagtccgtccttttcttccactttggtcagcctgttccaatcatcacccgagcggactcagtccaccttcgagggttttccccagagccccctccaaatccccgtgtccagctcttcatccagtacactgctgtag

SEQ ID NO: 156329 - DNA, 357 bp, Artificial Sequence
  derived and/or modified sequence
atgggcgacaaggacatgcccaccgccggcatgcccagcctgctgcagtccagtagcgagtcccctcagtcttgtcccgagggtgaagactcccaatcacccttgcagatcccggtctcgccctcctcctcttcaactctgctgtccctcttccagtcgttttcagaacggacgcagtctacttttgagggctttgcacaatcctccctgcaaatcccagtcagtcccagtttcagcagcaccctggtttcactctttcagtctagtcccgaacggactcagagtacattcgagggtttcccccagagcccgttgcaaatacccgtctcgtcatcatcttcctccactctactgtag

SEQ ID NO: 156330 - DNA, 630 bp, Artificial Sequence
  derived and/or modified sequence
atgctgaccaacgtgatcagccggtacaccggctacttccccgtgatcttccggaaggcgcgagaattcatagagatattgttcggaatcagcctgcgggaggtggaccctgacgactcgtatgtatttgttaacacactggatctaacgtcagagggctgcctgtctgacgaacagggcatgtcccagaaccgtctcttaatcttgatcctgtctatcatcttcatcaaaggcacatatgctagtgaggaggttatttgggatgtattgtcaggcatcggagtaagagctggtcgtgaacacttcgcctttggggagcctagggaactactgaccaaggtgtgggtccaagagcactatttagagtacagggaggtgcccaattcatctcctcctcgatacgaattcctctggggtcctcgggcacactccgaggtgattaagaggaaggtggtcgaattcctagcaatgttaaagaacacagtcccaattacatttcccagtagttacaaggatgcactgaaggatgtggaggaaagggcccaggccatcattgatacaactgacgactcaactgccactgaaagcgcttcttcaagcgtgatgagtccctcattcagctccgagtag

SEQ ID NO: 156331 - DNA, 3429 bp, Artificial Sequence
  derived and/or modified sequence
atgggcgacaaagatatgccaacagcagggatgccctccctgctccagagctcctctgaatctcctcagtcctgtcctgagggagaagactcacagtctcccctgcaaataccccagagttccccagaaagcgacgacacattatatcctctccaatccccacagtcgagatccgagggagaggactccagtgaccctcttcagcgcccaccagaagggaaggactctcagtccccactccaaatccctcagagctctcctgagggagatgatacacagagccccctccagaactcacagtcttcgcccgagggcaaggactccctctcccctctggaaatttcccaaagccctccagagggcgaggacgtgcaatctcctctccagaaccccgcatcctctttcttttcttccgccctgttgagcatttttcagagttcccctgagtccacccagtccccgtttgaggggtttcctcagagcgtcctgcagattccagtttcggccgctagcagttcaactctcgtatccatctttcagtcttctccagaatccacacaatcaccctttgagggcttcccccagagtcccttacagatccccgtttccagatcttttagctccacccttctgagcatcttccagtcttccccggaacgcacccagtctacgtttgaaggattcgcccaatcacccctccagatccccgtgtctccaagtagcagctccactctactgtctctttttcaatccttcagtgagcggacgcaatccacttttgagggatttgcacagtcatccctccagattcctgtgagtccttcgtttagctcaaccctagtgtcattattccagtccagcccagagagaacacaaagtacattcgagggcttcccccagtccccattgcagataccagtcagctcttcaagcagctccactcttcttagcttatttcaatccagtccagagcgtacccacagtaccttcgagggattcccccagtcgttgttgcagattcccatgacgagctctttttctagtaccttactcagcatattccagtcttctccagaaagcgcccagtctacattcgaaggtttccctcagtccccgttgcagatacctgggtcccctagtttctctagtaccctgctgtcgttattccagtcgagcccagaacggacccacagcactttcgagggcttccctcagagccctttgcagatacctatgacttccagtttctccagcaccttacttagcattctccaatcttctcccgagagtgcccagtctgcctttgaaggctttcctcagagtcccctgcagatcccagtgagcagttcattttcctacacattgttgtcgctgttccagtcgagccctgaacgcacacacagcacctttgaaggctttccgcagtctcccctgcagattcccgtctctagcagcagctcttcctcaaccctcctgagcctcttccagtcaagtcccgagtgcacgcagtccacgtttgagggcttcccccaaagtccactgcagatccctcagtctccacctgaaggtgagaacacgcacagtcctctgcagatcgtgccttcgttaccagagtgggaggacagcctgtcaccacactattttccacagtcccctccccagggcgaggattccctcagccctcattactttccccagtccccaccccagggcgaggactcgctgtctccccattatttccctcaaagtcctcaaggcgaggactctctttccccacattacttcccacagtctccaccacagggcgaagattcaatgtctcccttatactttccacaatccccattgcaaggtgaggagttccagagctcactacagtcccctgtgtcaatttgctcctcaagcaccccctcaagcctcccacaaagtttccctgagagctcccagtccccgcctgagggcccagtgcaatcaccacttcatagtccacagagtcctcccgaaggtatgcacagccaaagccccttgcagtctcccgagagcgcacccgagggtgaggactcattaagtcctctccagattccacagtctccccttgaaggcgaagatagcctgagtagcctgcacttccctcagagtcctcctgaatgggaagacagcttatccccacttcattttccccagtttcccccacagggagaggactttcagtccagtctgcagtcccctgtctccatttgctctagttcaactagcctgtcactacctcagagttttcccgagtctcctcagagcccccctgagggccctgctcagagcccgctgcagcggccagtctcctcctttttttcttatacgcttgcctcgcttctccagtcttcacatgagagcccgcagtctccgcctgaagggcctgcacagtcccccttgcagtcccccgtgtctagctttcctagcagtacatcttcgtcgctttcacagtctagccccgtgtcttcattcccgtcatctaccagcagctctctgtcaaaaagctcaccagagagcccacttcagtcacccgtaatctcattcagctccagcacttccctgagtccattttctgaggaaagctcctctccggttgatgagtacacttccagctccgacacgctgctggagagtgactccctcaccgacagtgagtcactcattgaaagcgaacccctctttacctatactcttgacgagaaggtcgatgagctcgcccgatttcttctcctcaagtaccaggtcaagcagcctattacaaaagctgagatgttaacgaacgtgatctcccggtacaccgggtattttccagtgatcttcaggaaagctcgcgaatttattgagattctcttcggcatttccctgcgggaggtggacccagatgattcatacgtgttcgtcaacaccctcgacctgacctccgagggctgcctgagcgacgagcagggcatgtcccagaatcgactgctcattctcattcttagcatcatcttcattaaaggtacttacgcctcagaagaggtcatttgggatgtgttatccggcatcggggtccgagctggaagagagcattttgctttcggggagccacgagagctgcttacaaaagtgtgggtgcaggagcactatcttgaatatagggaagtgcccaactcctcccctcctagatacgagtttctctgggggccacgagcccacagcgaggtgattaaaaggaaagttgtcgaattcctggctatgttgaagaacaccgtgcctataacattcccttcatcctataaggatgctctgaaggatgtcgaagagcgggctcaggccattattgacactacggacgactccacagcaacagagtcagccagttcaagtgtgatgtcccctagttttagcagcgagtag

SEQ ID NO: 156332 - DNA, 354 bp, Artificial Sequence
  derived and/or modified sequence
ggcgacaaagacatgcccacagctgggatgccctctcttctccagtctagcagcgagagtccacaatcgtgtcccgaaggtgaagacagccagtctccccttcaaattccagtaagtccctcaagcagctcgacactgctcagcctttttcaaagcttctccgaacgaacccagtcaacatttgaaggcttcgcacaatcttcgttgcaaattccggtgtctcccagtttctcaagtactcttgtgagtctgttccagtcttcccccgagaggacacagagcaccttcgaggggttcccacagtctcccctgcagattcccgtcagcagtagctcgagctcaacactgctttag

SEQ ID NO: 156333 - DNA, 357 bp, Artificial Sequence
  derived and/or modified sequence
atgggcgataaggacatgcctactgccggtatgccgtcattactgcagagttcttctgaatccccccagtcctgccccgagggggaagattcccagtcacctctgcagatccccgtcagtccttcgagttcatctaccctgctgagcttgtttcagagctttagcgaacgtacccagagtacttttgaaggcttcgcccagtcatcactgcaaatcccagtctccccatcattctccagcactctggtgagcctgttccagagttcccctgaacggacgcagtccactttcgaagggtttccacaatctcccttgcagatccctgtgtccagctcaagttcctctactctgctgtag

SEQ ID NO: 156334 - DNA, 630 bp, Artificial Sequence
  derived and/or modified sequence
atgttaactaacgtgattagtagatataccggttacttccctgttattttccggaaagcacgcgaattcatcgaaatccttttcggaatatccctccgcgaggtcgatcccgacgattcctacgtattcgtgaatacactggacttaaccagcgaaggttgtctctccgacgagcagggaatgtctcaaaacaggctgctaattctaatcctcagcatcatcttcatcaaaggcacctatgcatcagaggaggtcatatgggatgttctgtctggcatcggcgtcagagcgggacgggagcactttgctttcggtgaacccagagaactgctcactaaagtttgggttcaggagcactatcttgagtacagggaagtgcctaactctagtcctcccagatacgaattcctgtggggccctcgagcccactcagaggtgatcaaacgtaaagttgtcgaatttttagccatgctcaagaacacagttccgattaccttcccgtcttcttacaaggacgccctcaaggacgtggaagagcgggcacaggcgatcatagatacaacggacgacagcactgcaaccgaaagtgcctcctcctcggtgatgtcacccagcttctcttctgaatag

SEQ ID NO: 156335 - DNA, 3429 bp, Artificial Sequence
  derived and/or modified sequence
atgggcgacaaggacatgcccaccgccggcatgcccagcctgctgcagagcagcagcgagagcccccagagctgccccgagggcgaggacagccagagccccctgcagatcccccagagcagccccgagagcgacgacaccctgtaccccctgcagagcccccagagcagaagcgagggcgaggacagcagcgaccccctgcagagaccccccgagggcaaggacagccagagccccctgcagatcccccagagcagccccgagggcgacgacacccagagccccctgcagaacagccagagcagccccgagggcaaggacagcctgagccccctggagatcagccagagcccccccgagggcgaggacgtgcagagccccctgcagaaccccgccagcagcttcttcagcagcgccctgctgagcatcttccagagcagccccgagagcacccagagccccttcgagggcttcccccagagcgtgctgcagatccccgtgagcgccgccagcagcagcaccctggtgagcatcttccagagcagccccgagagcacccagagccccttcgagggcttcccccagagccccctgcagatccccgtgagcagaagcttcagcagcaccctgctgagcatcttccagagcagccccgagagaacccagagcaccttcgagggcttcgcccagagccccctgcagatccccgtgagccccagcagcagcagcaccctgctgagcctgttccagagcttcagcgagagaacccagagcaccttcgagggcttcgcccagagcagcctgcagatccccgtgagccccagcttcagcagcaccctggtgagcctgttccagagcagccccgagagaacccagagcaccttcgagggcttcccccagagccccctgcagatccccgtgagcagcagcagcagcagcaccctgctgagcctgttccagagcagccccgagagaacccacagcaccttcgagggcttcccccagagcctgctgcagatccccatgaccagcagcttcagcagcaccctgctgagcatcttccagagcagccccgagagcgcccagagcaccttcgagggcttcccccagagccccctgcagatccccggcagccccagcttcagcagcaccctgctgagcctgttccagagcagccccgagagaacccacagcaccttcgagggcttcccccagagccccctgcagatccccatgaccagcagcttcagcagcaccctgctgagcatcctgcagagcagccccgagagcgcccagagcgccttcgagggcttcccccagagccccctgcagatccccgtgagcagcagcttcagctacaccctgctgagcctgttccagagcagccccgagagaacccacagcaccttcgagggcttcccccagagccccctgcagatccccgtgagcagcagcagcagcagcagcaccctgctgagcctgttccagagcagccccgagtgcacccagagcaccttcgagggcttcccccagagccccctgcagatcccccagagcccccccgagggcgagaacacccacagccccctgcagatcgtgcccagcctgcccgagtgggaggacagcctgagcccccactacttcccccagagccccccccagggcgaggacagcctgagcccccactacttcccccagagccccccccagggcgaggacagcctgagcccccactacttcccccagagcccccagggcgaggacagcctgagcccccactacttcccccagagccccccccagggcgaggacagcatgagccccctgtacttcccccagagccccctgcagggcgaggagttccagagcagcctgcagagccccgtgagcatctgcagcagcagcacccccagcagcctgccccagagcttccccgagagcagccagagcccccccgagggccccgtgcagagccccctgcacagcccccagagcccccccgagggcatgcacagccagagccccctgcagagccccgagagcgcccccgagggcgaggacagcctgagccccctgcagatcccccagagccccctggagggcgaggacagcctgagcagcctgcacttcccccagagcccccccgagtgggaggacagcctgagccccctgcacttcccccagttccccccccagggcgaggacttccagagcagcctgcagagccccgtgagcatctgcagcagcagcaccagcctgagcctgccccagagcttccccgagagcccccagagcccccccgagggccccgcccagagccccctgcagagacccgtgagcagcttcttcagctacaccctggccagcctgctgcagagcagccacgagagcccccagagcccccccgagggccccgcccagagccccctgcagagccccgtgagcagcttccccagcagcaccagcagcagcctgagccagagcagccccgtgagcagcttccccagcagcaccagcagcagcctgagcaagagcagccccgagagccccctgcagagccccgtgatcagcttcagcagcagcaccagcctgagccccttcagcgaggagagcagcagccccgtggacgagtacaccagcagcagcgacaccctgctggagagcgacagcctgaccgacagcgagagcctgatcgagagcgagcccctgttcacctacaccctggacgagaaggtggacgagctggccagattcctgctgctgaagtaccaggtgaagcagcccatcaccaaggccgagatgctgaccaacgtgatcagcagatacaccggctacttccccgtgatcttcagaaaggccagagagttcatcgagatcctgttcggcatcagcctgagagaggtggaccccgacgacagctacgtgttcgtgaacaccctggacctgaccagcgagggctgcctgagcgacgagcagggcatgagccagaacagactgctgatcctgatcctgagcatcatcttcatcaagggcacctacgccagcgaggaggtgatctgggacgtgctgagcggcatcggcgtgagagccggcagagagcacttcgccttcggcgagcccagagagctgctgaccaaggtgtgggtgcaggagcactacctggagtacagagaggtgcccaacagcagcccccccagatacgagttcctgtggggccccagagcccacagcgaggtgatcaagagaaaggtggtggagttcctggccatgctgaagaacaccgtgcccatcaccttccccagcagctacaaggacgccctgaaggacgtggaggagagagcccaggccatcatcgacaccaccgacgacagcaccgccaccgagagcgccagcagcagcgtgatgagccccagcttcagcagcgagtag

SEQ ID NO: 156336 - DNA, 354 bp, Artificial Sequence
  derived and/or modified sequence
ggcgacaaggacatgcccaccgccggcatgcccagcctgctgcagagcagcagcgagagcccccagagctgccccgagggcgaggacagccagagccccctgcagatccccgtgagccccagcagcagcagcaccctgctgagcctgttccagagcttcagcgagagaacccagagcaccttcgagggcttcgcccagagcagcctgcagatccccgtgagccccagcttcagcagcaccctggtgagcctgttccagagcagccccgagagaacccagagcaccttcgagggcttcccccagagccccctgcagatccccgtgagcagcagcagcagcagcaccctgctgtag

SEQ ID NO: 156337 - DNA, 357 bp, Artificial Sequence
  derived and/or modified sequence
atgggcgacaaggacatgcccaccgccggcatgcccagcctgctgcagagcagcagcgagagcccccagagctgccccgagggcgaggacagccagagccccctgcagatccccgtgagccccagcagcagcagcaccctgctgagcctgttccagagcttcagcgagagaacccagagcaccttcgagggcttcgcccagagcagcctgcagatccccgtgagccccagcttcagcagcaccctggtgagcctgttccagagcagccccgagagaacccagagcaccttcgagggcttcccccagagccccctgcagatccccgtgagcagcagcagcagcagcaccctgctgtag

SEQ ID NO: 156338 - DNA, 630 bp, Artificial Sequence
  derived and/or modified sequence
atgctgaccaacgtgatcagcagatacaccggctacttccccgtgatcttcagaaaggccagagagttcatcgagatcctgttcggcatcagcctgagagaggtggaccccgacgacagctacgtgttcgtgaacaccctggacctgaccagcgagggctgcctgagcgacgagcagggcatgagccagaacagactgctgatcctgatcctgagcatcatcttcatcaagggcacctacgccagcgaggaggtgatctgggacgtgctgagcggcatcggcgtgagagccggcagagagcacttcgccttcggcgagcccagagagctgctgaccaaggtgtgggtgcaggagcactacctggagtacagagaggtgcccaacagcagcccccccagatacgagttcctgtggggccccagagcccacagcgaggtgatcaagagaaaggtggtggagttcctggccatgctgaagaacaccgtgcccatcaccttccccagcagctacaaggacgccctgaaggacgtggaggagagagcccaggccatcatcgacaccaccgacgacagcaccgccaccgagagcgccagcagcagcgtgatgagccccagcttcagcagcgagtag

SEQ ID NO: 156339 - protein, 246 aa, Artificial Sequence
  derived and/or modified sequence
MAAVDIRDNLLGISWVDSSWIPILNSGSVLDYFSERSNPFYDRTCNNEVVKMQRLTLEHLNQMVGIEYILLHAQEPILFIIRKQQRQSPAQVIPLADYYIIAGVIYQAPDLGSVINSRVLTAVHGIQSAFDEAMSYCRYHPSKGYWWHFKDHEEQDKVRPKAKRKEEPSSIFQRQRVDALLLDLRQKFPPKFVQLKPGEKPVPVDQTKKEAEPIPETVKPEEKETTKNVQQTVSAKGPPEKRMRLQ

SEQ ID NO: 156340 - protein, 249 aa, Artificial Sequence
  derived and/or modified sequence
MAAVDIRDNLLGISWVDSSWIPILNSGSVLDYFSERSNPFYDRTCNNEVVKMQRLTLEHLNQMVGIEYILLHAQEPILFIIRKQQRQSPAQVIPLADYYIIAGVIYQAPDLGSVINSRVLTAVHGIQSAFDEAMSYCRYHPSKGYWWHFKDHEEQDKVRPKAKRKEEPSSIFQRQRVDALLLDLRQKFPPKFVQLKPGEKPVPVDQTKKEAEPIPETVKPEEKETTKNVQQTVSAKGPPEKRMRLQKAV

SEQ ID NO: 156341 - DNA, 1344 bp, Artificial Sequence
  derived and/or modified sequence
gaaagagaacctgtaaacgctctcggaattatggcggcggtggatatccgagacaatctgctgggaatttcttgggttgacagctcttggatccctattttgaacagtggtagtgtcctggattacttttcagaaagaagtaatcctttttatgacagaacatgtaataatgaagtggtcaaaatgcagaggctaacattagaacacttgaatcagatggttggaatcgagtacatccttttgcatgctcaagagcccattcttttcatcattcggaagcaacagcggcagtcccctgcccaagttatcccactagctgattactatatcattgctggagtgatctatcaggcaccagacttgggatcagttataaactctagagtgcttactgcagtgcatggtattcagtcagcttttgatgaagctatgtcatactgtcgatatcatccttccaaagggtattggtggcacttcaaagatcatgaagagcaagataaagtcagacctaaagccaaaaggaaagaagaaccaagctctatttttcagagacaacgtgtggatgctttacttttagacctcagacaaaaatttccacccaaatttgtgcagctaaagcctggagaaaagcctgttccagtggatcaaacaaagaaagaggcagaacctataccagaaactgtaaaacctgaggagaaggagaccacaaagaatgtacaacagacagtgagtgctaaaggcccccctgaaaaacggatgagacttcagtgagtactggacaaaagagaagcctggaagactcctcatgctagttatcatacctcagtactgtggctcttgagctttgaagtactttattgtaaccttcttatttgtatggaatgcgcttattttttgaaaggatattaggccggatgtggtggctcacgcctgtaatcccagcactttgggaggccatggcgggtggatcacttgaggtcagaagttcaagaccagcctgaccaatatggtgaaaccccgtctctactaaaaatacaaaaattagccgggcgtggtggcgggcgcccatagtcccagctactcgggaggctgagacaggagacttgcttgaacccgggaggtggaggttgccctgagctgattatcatgctgttgcactccagcttgggcgacagagcgagactttgtctcaaaaaagaagaaaagatattattcccatcatgatttcttgtgaatatttgttatatgtcttctgtaacctttcctctcccggacttgagcaacctacacactcacatgtttactggtagatatgtttaaaagcaaaataaaggtatttgtata

SEQ ID NO: 156342 - DNA, 741 bp, Artificial Sequence
  derived and/or modified sequence
atggccgcagtggacattcgcgacaacttactggggatttcgtgggtcgactcttcctggatccctatcctgaactctggctccgtgctcgattatttttccgaaaggtcaaatcctttttatgatcgcacctgcaacaatgaagtcgttaaaatgcagcgccttacattagagcacctgaatcagatggttggaatagagtacatccttctgcacgctcaggagcctattttgtttatcattcgcaagcagcagcggcagtctcctgcacaagtcatccctctcgctgactactacatcatcgcaggcgtgatttaccaggcgcccgacttgggctccgtgattaactcgcgagtgctgacggccgtgcacgggatccaaagtgctttcgacgaggctatgagttactgccgatatcacccctcgaaagggtactggtggcactttaaggaccacgaggaacaagacaaagtacgccccaaggctaagcgaaaggaagaaccttcttctatctttcaacgccagagggtagatgcacttctgctggacctgagacagaagttccctcctaagttcgtacaattaaaacccggagagaagcccgtccctgtggatcagactaagaaagaggctgagcccatacccgagacagtgaagcccgaagagaaagaaacaacaaaaaatgtgcaacagaccgtctccgccaaaggtcctcccgagaaacgcatgaggttgcagtag

SEQ ID NO: 156343 - DNA, 750 bp, Artificial Sequence
  derived and/or modified sequence
atggctgccgtggatattcgcgataatctcttgggaattagctgggttgactcctcctggattcccatccttaatagcggctctgtcttggactattttagcgagcgcagtaatccattctatgatcggacttgtaacaatgaggtagtaaagatgcaaaggctgacgctagagcacctgaaccagatggtgggtatcgagtacatacttctgcacgcacaggagcctatcctttttatcataaggaaacagcaacgtcaaagccccgcacaagtgataccgctcgcagactattatatcatagctggcgtcatttaccaggcccccgacttaggaagcgtgattaattcacgggtgttgacagccgtgcacggcattcagagcgcattcgacgaggctatgtcttattgccgctaccacccctctaagggctactggtggcacttcaaagatcatgaggaacaagacaaagtgcggcctaaggcgaaaaggaaagaagagccatcttccattttccagcggcagagagtggatgcgcttcttctagatctgaggcagaaattccctccaaagtttgtacaacttaaacctggtgaaaagccagtgcccgttgatcagactaaaaaagaagctgaacccatccccgagaccgtcaaaccagaggagaaagaaaccaccaaaaatgttcaacagaccgtcagcgccaagggcccccccgagaagaggatgaggctgcaaaaggctgtttag

SEQ ID NO: 156344 - DNA, 1995 bp, Artificial Sequence
  derived and/or modified sequence
gaaagagaacctgtaaacgctctcggaattatggcggcggtggatatccgagacaatctgctgggaatttcttgggttgacagctcttggatccctattttgaacagtggtagtgtcctggattacttttcagaaagaagtaatcctttttatgacagaacatgtaataatgaagtggtcaaaatgcagaggctaacattagaacacttgaatcagatggttggaatcgagtacatccttttgcatgctcaagagcccattcttttcatcattcggaagcaacagcggcagtcccctgcccaagttatcccactagctgattactatatcattgctggagtgatctatcaggcaccagacttgggatcagttataaactctagagtgcttactgcagtgcatggtattcagtcagcttttgatgaagctatgtcatactgtcgatatcatccttccaaagggtattggtggcacttcaaagatcatgaagagcaagataaagtcagacctaaagccaaaaggaaagaagaaccaagctctatttttcagagacaacgtgtggatgctttacttttagacctcagacaaaaatttccacccaaatttgtgcagctaaagcctggagaaaagcctgttccagtggatcaaacaaagaaagaggcagaacctataccagaaactgtaaaacctgaggagaaggagaccacaaagaatgtacaacagacagtgagtgctaaaggcccccctgaaaaacggatgagacttcagtgagtactggacaaaagagaagcctggaagactcctcatgctagttatcatacctcagtactgtggctcttgagctttgaagtactttattgtaaccttcttatttgtatggaatgcgcttattttttgaaaggatattaggccggatgtggtggctcacgcctgtaatcccagcactttgggaggccatggcgggtggatcacttgaggtcagaagttcaagaccagcctgaccaatatggtgaaaccccgtctctactaaaaatacaaaaattagccgggcgtggtggcgggcgcccatagtcccagctactcgggaggctgagacaggagacttgcttgaacccgggaggtggaggttgccctgagctgattatcatgctgttgcactccagcttgggcgacagagcgagactttgtctcaaaaaagaagaaaagatattattcccatcatgatttcttgtgaatatttgttatatgtcttctgtaacctttcctctcccggacttgagcaacctacacactcacatgtttactggtagatatgtttaaaagcaaaataaaggtatttgtatatattgcttcatcatgacttttttcttcatcataactgatatttttcagatgcactttgaagacataaaggatgttaaagtagtaactaagcatatttctttttgttcagttacataatcctcagtattaaaataaacagttgctgacattttggaagatgaagaaaaggaaaaacctcactcaccaataccattaccctataaatactgtaacagtgttgtgaattttaatcttattctgtgtgtagatacttcttttttcaataaagaaaaggaattttattttttttaaagttatggaggctgagaagtccagcattgattggctccatctggtgagggccttcttgctggtaggaagtctgcaaagtccctaggcagcacagggtatctcatggcaagggggctgagtgtgcttgctgcatgtagatgcttttaaaactgtactttaatcattcctttcgtacaattttactttattatatctgttgtaagcttttccccatgtttatgtagtttttatagactgttttagtgtccgaatttctgtaaatgattgtatctcagttttctttctgtcttatatttgggatttttcccagtttacattattttatataagactgctgtgattatatctttgtataatgcc

SEQ ID NO: 156345 - DNA, 975 bp, Artificial Sequence
  derived and/or modified sequence
ggaattatggcggcggtggatatccgagacaatctgctgggaatttcttgggttgacagctcttggatccctattttgaacagtggtagtgtcctggattacttttcagaaagaagtaatcctttttatgacagaacatgtaataatgaagtggtcaaaatgcagaggctaacattagaacacttgaatcagatggttggaatcgagtacatccttttgcatgctcaagagcccattcttttcatcattcggaagcaacagcggcagtcccctgcccaagttatcccactagctgattactatatcattgctggagtgatctatcaggcaccagacttgggatcagttataaactctagagtgcttactgcagtgcatggtattcagtcagcttttgatgaagctatgtcatactgtcgatatcatccttccaaagggtattggtggcacttcaaagatcatgaagagcaagataaagtcagacctaaagccaaaaggaaagaagaaccaagctctatttttcagagacaacgtgtggatgctttacttttagacctcagacaaaaatttccacccaaatttgtgcagctaaagcctggagaaaagcctgttccagtggatcaaacaaagaaagaggcagaacctataccagaaactgtaaaacctgaggagaaggagaccacaaagaatgtacaacagacagtgagtgctaaaggcccccctgaaaaacggatgagacttcagaaagctgtgtgaagagacaaagggagaatgccatgtgaagatggaggatcggagtgatgcgtctacaagccaaggaatgccaaagatttccggccagtcaccagaagctaagaggcaaagaaggattcccctacaggtttcagagaaagcatagcccatatccctgctgacactttgattttggattttcagcctccagaattttgagacaataaatttattgtttaagtc

SEQ ID NO: 156346 - DNA, 741 bp, Artificial Sequence
  derived and/or modified sequence
atggctgctgtggacatccgggacaacctgctgggcatctcctgggtggacagctcctggatccccatcctgaacagcggctctgtgctggactacttcagcgagaggagcaaccccttctatgacaggacctgcaacaatgaggtggtgaagatgcagaggctgaccctggagcacctgaaccagatggtgggcatcgagtacatcctgctgcacgcccaggagcccatcctcttcatcatcaggaagcagcagaggcagagccctgcccaggtgatccccctggccgactactacatcatcgccggggtcatctaccaggccccagacctgggcagcgtcatcaacagccgggtgctgacagctgtgcacggcatccagagcgcctttgatgaggccatgagctactgccgctaccaccccagcaagggctactggtggcacttcaaggaccacgaggagcaggacaaggtgcggcccaaggccaagaggaaggaggagcccagcagcatcttccagaggcagagggtggatgccctgctgctggacctgcggcagaagtttcctcccaagtttgtgcagctgaagccaggagagaagcctgtgcctgtggaccagaccaagaaggaggccgagcccatccctgagaccgtgaagccagaggagaaggagaccaccaagaatgtgcagcagacagtgtctgccaagggccccccagagaagaggatgaggctgcagtag

SEQ ID NO: 156347 - DNA, 750 bp, Artificial Sequence
  derived and/or modified sequence
atggctgctgtggacatccgggacaacctgctgggcatctcctgggtggacagctcctggatccccatcctgaacagcggctctgtgctggactacttcagcgagaggagcaaccccttctatgacaggacctgcaacaatgaggtggtgaagatgcagaggctgaccctggagcacctgaaccagatggtgggcatcgagtacatcctgctgcacgcccaggagcccatcctcttcatcatcaggaagcagcagaggcagagccctgcccaggtgatccccctggccgactactacatcatcgccggggtcatctaccaggccccagacctgggcagcgtcatcaacagccgggtgctgacagctgtgcacggcatccagagcgcctttgatgaggccatgagctactgccgctaccaccccagcaagggctactggtggcacttcaaggaccacgaggagcaggacaaggtgcggcccaaggccaagaggaaggaggagcccagcagcatcttccagaggcagagggtggatgccctgctgctggacctgcggcagaagtttcctcccaagtttgtgcagctgaagccaggagagaagcctgtgcctgtggaccagaccaagaaggaggccgagcccatccctgagaccgtgaagccagaggagaaggagaccaccaagaatgtgcagcagacagtgtctgccaagggccccccagagaagaggatgaggctgcagaaggctgtgtag

SEQ ID NO: 156348 - DNA, 741 bp, Artificial Sequence
  derived and/or modified sequence
atggccgccgtggacatccgggacaacctgctgggcatcagctgggtggactcctcctggatcccgatacttaacagcgggagcgtgctcgactatttttcagagaggagcaatcccttctatgaccggacatgtaacaatgaggtcgtgaaaatgcaaagactgaccctggagcacctcaaccagatggtgggaatcgagtacattctgttgcatgctcaggaacctattctctttattattaggaaacagcaacggcagagccccgcccaggttattccactggccgactattatatcatagcgggcgtcatctaccaggctccggacttggggagcgtcatcaactctcgcgtcttaactgccgttcacgggatacagtccgctttcgatgaggccatgtcgtattgccggtatcacccctccaagggctactggtggcatttcaaagaccatgaagagcaggacaaggtccggcccaaagccaaacggaaggaagaaccctcctctattttccagaggcagagagtagacgccctgttattggatcttagacagaagtttccccccaagtttgtacagctgaagccaggagagaaaccggttcccgtcgaccagaccaagaaagaggccgagcccatcccagagacagtcaagcccgaggagaaggagacaacaaagaatgtccagcagaccgtgtccgctaagggccccccggaaaaaaggatgaggcttcaatag

SEQ ID NO: 156349 - DNA, 750 bp, Artificial Sequence
  derived and/or modified sequence
atggccgccgtggacatccgggacaacctgctgggcatcagctgggtggactccagttggatccccattctgaacagtggtagcgtactcgattacttctcagagagatcgaatccgttttacgatcggacttgtaacaatgaagtggtaaagatgcagagactcactctggagcatctgaaccagatggttggaatcgaatacatcctgctccacgcgcaggagccaatcctattcatcattcgcaagcagcagcgacaatctcctgcccaagtcatcccgcttgcagattattacatcattgccggtgttatttaccaggcgccagacctggggagtgtgatcaacagccgcgtcctgaccgccgtgcatgggatccaatctgccttcgacgaagccatgagttactgtcggtaccacccgtctaaggggtattggtggcacttcaaagatcacgaggaacaggataaagtcagaccgaaagccaaaagaaaggaagaacctagctccatcttccaaaggcagcgggtagacgcactgctgcttgatctacgacagaagtttccacctaagtttgtacagctgaagcccggggagaagcctgtccctgtggatcagactaaaaaggaggcagaaccgattcctgaaactgtgaaacccgaagagaaggagactactaaaaacgtgcagcaaactgtgagcgcgaagggtccaccagagaagcgaatgcggctgcagaaggcagtgtag

SEQ ID NO: 156350 - DNA, 741 bp, Artificial Sequence
  derived and/or modified sequence
atggccgcagtcgacatacgggacaacttgttaggcatcagttgggtggactcatcatggatacccattttgaactccggctccgtgttggactatttctctgaacgctccaaccctttctacgaccggacctgcaataatgaagtggtgaagatgcagcgcctcacccttgagcatctcaaccagatggtaggaattgagtacatcctcttgcacgcgcaagagccgatactcttcattattcgcaagcaacagcggcagtcccccgctcaggtcatacctctagcagactattatataatcgccggtgtgatttatcaggcacccgacctgggaagtgtgataaactctagagtcctgaccgcagtgcacggtattcagtccgccttcgatgaagctatgtcatactgccgctatcaccctagcaaaggctactggtggcacttcaaggatcacgaggagcaggacaaagtgcgacccaaagccaaacgcaaggaggagccatcatcaattttccagcggcagagggtggacgccttgctcttagacctgcggcaaaaatttcctcctaagttcgtacaactgaaacccggagaaaagcccgttccagtagatcagactaaaaaggaggcagagccaattcctgaaacagtgaaacccgaggagaaggaaaccaccaagaatgtgcagcagacagtgtccgctaaaggacctccagaaaagcgcatgagactccagtag

SEQ ID NO: 156351 - DNA, 750 bp, Artificial Sequence
  derived and/or modified sequence
atggcagcagtagacatacgagacaaccttttggggatatcgtgggttgactctagctggatccctattctgaattcaggatcagtgctagactatttcagcgaacggtccaaccccttttatgaccggacatgtaataatgaggtggtgaaaatgcagcgcctgactctggagcacttgaaccaaatggttggaatcgagtatatcttgctccacgcccaagagcctatactgtttataatccggaagcagcaacggcaatccccggcacaggtcattcctttagcagactactacatcatcgctggagtgatctatcaggcaccagatctgggctctgtcatcaactcccgcgttttgacggctgtacacggcatacagagtgcatttgacgaggctatgtcttactgcagataccacccctccaaggggtattggtggcattttaaggatcacgaagaacaggacaaagtccgcccaaaagctaaacgcaaggaggagcccagttccatttttcaacggcagagagtggatgccttactactggacttgcggcagaaatttcctccaaaattcgtccagcttaagcccggagagaaaccagtgccggtagatcagactaaaaaggaggcagagcccatccccgagacggttaagccagaagaaaaggagaccactaagaatgtccagcagacagtatccgccaaaggaccacccgaaaaacgaatgcggctgcagaaagcagtgtag

SEQ ID NO: 156352 - DNA, 741 bp, Artificial Sequence
  derived and/or modified sequence
atggccgccgtggacatcagagacaacctgctgggcatcagctgggtggacagcagctggatccccatcctgaacagcggcagcgtgctggactacttcagcgagagaagcaaccccttctacgacagaacctgcaacaacgaggtggtgaagatgcagagactgaccctggagcacctgaaccagatggtgggcatcgagtacatcctgctgcacgcccaggagcccatcctgttcatcatcagaaagcagcagagacagagccccgcccaggtgatccccctggccgactactacatcatcgccggcgtgatctaccaggcccccgacctgggcagcgtgatcaacagcagagtgctgaccgccgtgcacggcatccagagcgccttcgacgaggccatgagctactgcagataccaccccagcaagggctactggtggcacttcaaggaccacgaggagcaggacaaggtgagacccaaggccaagagaaaggaggagcccagcagcatcttccagagacagagagtggacgccctgctgctggacctgagacagaagttcccccccaagttcgtgcagctgaagcccggcgagaagcccgtgcccgtggaccagaccaagaaggaggccgagcccatccccgagaccgtgaagcccgaggagaaggagaccaccaagaacgtgcagcagaccgtgagcgccaagggcccccccgagaagagaatgagactgcagtag

SEQ ID NO: 156353 - DNA, 750 bp, Artificial Sequence
  derived and/or modified sequence
atggccgccgtggacatcagagacaacctgctgggcatcagctgggtggacagcagctggatccccatcctgaacagcggcagcgtgctggactacttcagcgagagaagcaaccccttctacgacagaacctgcaacaacgaggtggtgaagatgcagagactgaccctggagcacctgaaccagatggtgggcatcgagtacatcctgctgcacgcccaggagcccatcctgttcatcatcagaaagcagcagagacagagccccgcccaggtgatccccctggccgactactacatcatcgccggcgtgatctaccaggcccccgacctgggcagcgtgatcaacagcagagtgctgaccgccgtgcacggcatccagagcgccttcgacgaggccatgagctactgcagataccaccccagcaagggctactggtggcacttcaaggaccacgaggagcaggacaaggtgagacccaaggccaagagaaaggaggagcccagcagcatcttccagagacagagagtggacgccctgctgctggacctgagacagaagttcccccccaagttcgtgcagctgaagcccggcgagaagcccgtgcccgtggaccagaccaagaaggaggccgagcccatccccgagaccgtgaagcccgaggagaaggagaccaccaagaacgtgcagcagaccgtgagcgccaagggcccccccgagaagagaatgagactgcagaaggccgtgtag

SEQ ID NO: 156354 - protein, 544 aa, Artificial Sequence
  derived and/or modified sequence
MQWTKVLGLGLGAAALLGLGIILGHFAIPKKANSLAPQDLDLEILETVMGQLDAHRIRENLRELSREPHLASSPRDEDLVQLLLQRWKDPESGLDSAEASTYEVLLSFPSQEQPNVVDIVGPTGGIIHSCHRTEENVTGEQGGPDVVQPYAAYAPSGTPQGLLVYANRGAEEDFKELQTQGIKLEGTIALTRYGGVGRGAKAVNAAKHGVAGVLVYTDPADINDGLSSPDETFPNSWYLPPSGVERGSYYEYFGDPLTPYLPAVPSSFRVDLANVSGFPPIPTQPIGFQDARDLLCNLNGTLAPATWQGALGCHYRLGPGFRPDGDFPADSQVNVSVYNRLELRNSSNVLGIIRGAVEPDRYVLYGNHRDSWVHGAVDPSSGTAVLLELSRVLGTLLKKGTWRPRRSIVFASWGAEEFGLIGSTEFTEEFFNKLQERTVAYINVDISVFANATLRVQGTPPVQSVVFSATKEIRSPGPGDLSIYDNWIRYFNRSSPVYGLVPRARLQPGSTPPTTQPLTPLTMWTSFWTRASAAIRLWPGQRGV

SEQ ID NO: 156355 - protein, 740 aa, Artificial Sequence
  derived and/or modified sequence
MQWTKVLGLGLGAAALLGLGIILGHFAIPKKANSLAPQDLDLEILETVMGQLDAHRIRENLRELSREPHLASSPRDEDLVQLLLQRWKDPESGLDSAEASTYEVLLSFPSQEQPNVVDIVGPTGGIIHSCHRTEENVTGEQGGPDVVQPYAAYAPSGTPQGLLVYANRGAEEDFKELQTQGIKLEGTIALTRYGGVGRGAKAVNAAKHGVAGVLVYTDPADINDGLSSPDETFPNSWYLPPSGVERGSYYEYFGDPLTPYLPAVPSSFRVDLANVSGFPPIPTQPIGFQDARDLLCNLNGTLAPATWQGALGCHYRLGPGFRPDGDFPADSQVNVSVYNRLELRNSSNVLGIIRGAVEPDRYVLYGNHRDSWVHGAVDPSSGTAVLLELSRVLGTLLKKGTWRPRRSIVFASWGAEEFGLIGSTEFTEEFFNKLQERTVAYINVDISVFANATLRVQGTPPVQSVVFSATKEIRSPGPGDLSIYDNWIRYFNRSSPVYGLVPSLGSLGAGSDYAPFVHFLGISSMDIAYTYDRSKTSARIYPTYHTAFDTFDYVDKFLDPGFSSHQAVARTAGSVILRLSDSFFLPLKVSDYSETLRSFLQAAQQDLGALLEQHSISLGPLVTAVEKFEAEAAALGQRISTLQKGSPDPLQVRMLNDQLMLLERTFLNPRAFPEERYYSHVLWAPRTGSVVTFPGLSNACSRARDTASGSEAWAEVQRQLSIVVTALEGAAATLRPVADL

SEQ ID NO: 156356 - protein, 739 aa, Artificial Sequence
  derived and/or modified sequence
MQWTKVLGLGLGAAALLGLGIILGHFAIPKKANSLAPQDLDLEILETVMGQLDAHRIRENLRELSREPHLASSPRDEDLVQLLLQRWKDPESGLDSAEASTYEVLLSFPSQEQPNVVDIVGPTGGIIHSCHRTEENVTGEQGGPDVVQPYAAYAPSGTPQGLLVYANRGAEEDFKELQTQGIKLEGTIALTRYGGVGRGAKAVNAAKHGVAGVLVYTDPADINDGLSSPDETFPNSWYLPPSGVERGSYYEYFGDPLTPYLPAVPSSFRVDLANVSGFPPIPTQPIGFQDARDLLCNLNGTLAPATWQGALGCHYRLGPGFRPDGDFPADSQVNVSVYNRLELRNSSNVLGIIRGAVEPDRYVLYGNHRDSWVHGAVDPSSGTAVLLELSRVLGTLLKKGTWRPRRSIVFASWGAEEFGLIGSTEFTEEFFNKLQERTVAYINVDISVFANATLRVQGTPPVQSVVFSATKEIRSPGPGDLSIYDNWIRYFNRSSPVYGLVPSLGSLGAGSDYAPFVHFLGISSMDIAYTYDRSKTSARIYPTYHTAFDTFDYVDKFLDPGFSSHQAVARTAGSVILRLSDSFFLPLKVSDYSETLRSFLQAAQQDLGALLEQHSISLGPLVTAVEKFEAEAAALGQRISTLQKGSPDPLQVRMLNDQLMLLERTFLNPRAFPEERYYSHVLWAPRGLRSHIPGLSNACSRARDTASGSEAWAEVQRQLSIVVTALEGAAATLRPVADL

SEQ ID NO: 156357 - DNA, 2223 bp, Artificial Sequence
  derived and/or modified sequence
atgcaatggactaaggtgctgggtttgggactgggggcagctgccctgctcggcctgggcataatccttggccacttcgccataccgaagaaggccaattctttggctccacaagatctggacctggagatccttgaaacagtgatgggtcagctggatgctcaccgcattcgggagaatctgagggaactgtcaagggagcctcacttagcttctagcccccgcgacgaagacctggtgcagttactgctgcagcggtggaaagacccagagtcgggacttgactccgccgaggcttccacttatgaggttctgttaagtttcccgtcccaggaacagcccaatgtcgttgacattgtagggccgaccgggggtatcatacactcgtgtcatcggaccgaggagaatgtgacaggggagcaaggcggcccggatgtcgtccagccttatgcggcatatgcaccctcaggaaccccccagggtctccttgtgtatgctaatagaggtgccgaggaggactttaaagagctccaaacccagggaattaaactggaaggcaccattgccctgacgcgatatggaggagtgggacggggagctaaagctgtgaacgctgcaaagcatggggtagccggcgtgttagtgtatacagacccagccgatataaatgacgggctctcgagtcccgacgaaaccttccccaactcctggtacctgccgccatccggagtcgagcgagggtcctactacgagtatttcggagatccacttaccccctaccttccagctgtgccttcctctttccgcgtcgacctagccaatgttagtggcttcccgcctatccccacgcagcctattggctttcaggatgcccgtgaccttctgtgtaacctgaatggcactctggcccctgccacatggcagggtgctcttggctgccattaccgcctcggaccgggctttcgtccagacggggacttccccgccgattcccaggttaacgttagtgtgtataatagacttgagctacggaactcaagtaatgtactcgggattatcagaggagcagtggaacctgatcgctacgttctgtatggcaaccatagagatagttgggtccacggcgcagtggacccgagctcgggcacggccgtgctgctcgagctctccagagtgcttggaacgttactgaaaaaagggacgtggagaccacggaggtccattgtcttcgcgtcctggggcgccgaggagtttggccttattgggtcgacagagtttaccgaggagttcttcaataaattgcaggagcggacagttgcttacattaacgtcgacattagcgtgtttgctaacgcaacgctgcgggtgcaaggcacccctcctgtgcagagtgtagtttttagtgctacaaaagaaattagatctcccgggcccggagatctcagtatttacgacaactggattcggtactttaacaggtcaagtccagtctatggtctcgtgccctcccttggttccctcggcgccggatccgactacgctcctttcgttcacttcctggggattagttctatggacatcgcctacacttacgacagatcaaagaccagtgctagaatatatccaacctaccataccgcattcgacacattcgactatgtggacaagttcctagacccaggctttagttctcatcaggctgttgcaaggaccgccggatccgtcatcctgcggctgtctgattccttcttcctgccactaaaagtgtctgattattctgagacattacgatccttcctgcaagcagcacagcaggatctgggcgccttgctggaacaacattccatctctttaggacctcttgtgactgcagtggaaaagttcgaagctgaggccgctgcgttaggacaacgaatctcaactttgcagaagggcagcccagaccccctgcaggtccgaatgctcaacgaccagctgatgctcctcgagaggacctttctcaaccctagagccttcccagaggagcgatactactcacatgtgttgtgggccccccggacgggctcagtcgtgacgttccctggactttcaaatgcctgttccagggctcgtgacactgcgtctggttctgaagcatgggctgaggtccaacggcaactaagtattgtggtgacagctttagaaggcgccgctgcaaccctccggcctgtagccgatttatag

SEQ ID NO: 156358 - DNA, 2220 bp, Artificial Sequence
  derived and/or modified sequence
atgcaatggaccaaagttcttgggctgggactgggggcagccgcgctcttggggctaggcattattttgggccatttcgctatccctaagaaagctaattctttagctcctcaggaccttgaccttgaaatccttgagaccgtgatgggacaattagacgcccaccgcatacgggaaaacctaagagagttatcaagggagccccacctcgcttccagccctagggacgaggacctggtgcagttgttgttgcagaggtggaaggaccctgaaagcgggttggactcagcagaggcttctacctatgaagtcctcctgtcgtttccttcccaggagcaacccaacgtcgtggacatcgtcgggcctaccggagggatcattcacagttgtcaccggacggaagagaatgtgaccggtgagcagggtggacccgacgttgtccaaccgtatgcagcttatgcaccaagcggaacacctcaggggctcctggtttatgccaatcgcggggcggaagaagatttcaaggagctgcagacacaaggtattaagctggaagggaccatagccttgactaggtatgggggagtgggccggggtgccaaggcggtcaacgctgcaaagcatggggtggccggagtgttagtgtatactgaccctgccgatatcaacgacggcctgagctcccccgacgagacttttcccaactcttggtacctgcccccctccggagttgaacggggaagctactatgaatacttcggcgatcctctcacgccttacctccccgccgtgccgagctcctttcgtgtagatctggcaaatgtgagcggctttccacccatcccaacccagcctatcggcttccaggatgcgcgcgatctcctttgcaatttgaatggtacccttgcacccgccacctggcagggagcgctggggtgtcactatcgcctgggccccgggttcaggcccgacggagatttcccagctgattctcaggtaaacgtatccgtgtacaaccgactggagttacgcaactcatccaacgtcctgggcatcatcaggggagcggtcgagcctgacaggtacgtcttgtacggcaatcacagagattcctgggtccatggcgccgtcgacccatcatccggtacggcagtcctcctggagctcagccgtgtgctgggtactctgctgaagaagggaacctggcggcctcgacgctccatcgtgttcgcaagctggggagccgaggaattcggcctgatcggttccaccgaattcacggaagaatttttcaataagctccaggagcgtacggtggcgtacatcaacgttgatatctccgtcttcgccaatgcgacccttagagtacagggaactcccccagtccaaagtgttgtattcagtgccaccaaggaaatccgatctcctggccctggtgacctctcaatctacgataattggatcagatatttcaatagatctagcccagtctacgggctcgttccatccctcggctccctcggggccgggtccgactatgccccattcgtgcatttccttggtattagctctatggatattgcttacacatatgataggtctaagaccagcgcaagaatctaccctacctatcataccgcctttgacacatttgactatgtcgataagttcctggacccaggattctcttcacaccaagccgtagcgaggacagcaggctcagtgatcctgaggctgagcgatagtttcttccttcctctaaaggtgtccgattactccgaaacgctaagatcttttctacaagctgcacagcaggacctgggcgccctgctggagcagcatagtatatctttgggtcccctcgtaactgctgtagaaaagttcgaggccgaggctgctgcactgggacaacgtataagcacactccagaaaggatctcctgacccattgcaggtgcggatgctcaatgaccaattgatgctcctggaaagaacatttttgaatcccagagcattccctgaagagcggtactattcccacgtgctgtgggcacctagggggctccgatcccacattcccgggcttagcaacgcatgtagcagggcaagagacacagcatccggatcagaagcctgggcagaagtgcagcgacagctgtcaatcgtggtgaccgccctagagggagccgctgccacattgagacctgtggccgatctttag

SEQ ID NO: 156359 - DNA, 2223 bp, Artificial Sequence
  derived and/or modified sequence
atgcagtggaccaaggtgctgggcctgggcctgggcgccgccgccctgctgggcctgggcatcatcctgggccactttgccatccccaagaaggccaacagcctggccccccaggacctggacctggagatcctggagaccgtgatgggccagctggatgcccaccgcatccgggagaacctgcgggagctgagccgggagccccacctggccagcagccccagagatgaggacctggtgcagctgctgctgcagcgctggaaggaccctgagagcggcctggacagcgctgaggccagcacctatgaggtgctgctgtccttccccagccaggagcagcccaacgtggtggacatcgtgggccccactggaggcatcatccacagctgccacaggacagaagaaaatgtgactggagagcagggcggcccagatgtggtgcagccctatgctgcctatgcccccagcggcaccccccagggcctgctggtgtatgccaacagaggagctgaggaggacttcaaggagctgcagacccagggcatcaagctggagggcaccatcgccctgaccaggtatggaggagtgggccgcggggccaaggctgtgaatgctgccaagcacggcgtggccggcgtgctggtgtacacagatcctgctgacatcaatgatggcctgagcagcccagatgagaccttccccaacagctggtacctgccccccagcggcgtggagcggggcagctactatgagtactttggagaccccctgaccccctacctgcctgctgtgcccagcagcttccgggtggacctggccaacgtgtctggcttcccccccatccccacccagcccatcggcttccaggatgcccgggacctgctgtgcaacctgaatggcaccctggccccagccacctggcagggcgccctgggctgccactaccgcctgggccctggcttccggccagatggagacttccctgctgacagccaggtgaatgtgtctgtgtacaaccggctggagctgaggaacagcagcaatgtgctgggcatcatcagaggagctgtggagccagaccgctacgtgctgtatggcaaccaccgggacagctgggtgcacggggctgtggaccccagcagcggcacagctgtgctgctggagctgagccgggtgctgggcaccctgctgaagaagggcacctggaggcccaggaggagcatcgtgtttgcctcctggggcgctgaggagtttggcctgattggcagcacagagttcacagaggagttcttcaacaagctgcaggagaggacagtggcctacatcaacgtggacatctctgtgtttgccaatgccaccctgcgggtgcagggcaccccacctgtgcagagcgtggtgttcagcgccaccaaggagatccgcagccctggccctggggacctgagcatctatgacaactggatccgctacttcaacagaagcagccctgtgtatggcctggtgcccagcctgggcagcctgggcgccggcagtgactatgccccctttgtgcacttcctgggcatcagctccatggacatcgcctacacctatgacaggagcaagaccagcgcccgcatctaccccacctaccacacagcctttgacacctttgattatgtggacaagttcctggaccccggcttcagcagccaccaggccgtggccaggacagctggcagcgtcatcctgcggctgagtgacagcttcttcctgcccctgaaggtgtctgactacagcgagaccctgcggagcttcctgcaggccgcccagcaggacctgggcgccctgctggagcagcacagcatcagcctgggccccctggtgacagctgtggagaagtttgaggccgaggccgccgccctgggccagaggatcagcaccctgcagaagggcagcccagaccccctgcaggtgaggatgctgaatgaccagctgatgctgctggagaggaccttcctgaacccccgggccttccctgaggagcgctactacagccacgtgctgtgggcccccaggactggatctgtggtgaccttccctggcctgagcaatgcctgcagccgggcccgggacacagccagcggcagcgaggcctgggccgaggtgcagaggcagctgagcatcgtggtgacagccctggagggcgctgctgccaccctgcggcctgtggccgacctgtag

SEQ ID NO: 156360 - DNA, 2220 bp, Artificial Sequence
  derived and/or modified sequence
atgcagtggaccaaggtgctgggcctgggcctgggcgccgccgccctgctgggcctgggcatcatcctgggccactttgccatccccaagaaggccaacagcctggccccccaggacctggacctggagatcctggagaccgtgatgggccagctggatgcccaccgcatccgggagaacctgcgggagctgagccgggagccccacctggccagcagccccagagatgaggacctggtgcagctgctgctgcagcgctggaaggaccctgagagcggcctggacagcgctgaggccagcacctatgaggtgctgctgtccttccccagccaggagcagcccaacgtggtggacatcgtgggccccactggaggcatcatccacagctgccacaggacagaagaaaatgtgactggagagcagggcggcccagatgtggtgcagccctatgctgcctatgcccccagcggcaccccccagggcctgctggtgtatgccaacagaggagctgaggaggacttcaaggagctgcagacccagggcatcaagctggagggcaccatcgccctgaccaggtatggaggagtgggccgcggggccaaggctgtgaatgctgccaagcacggcgtggccggcgtgctggtgtacacagatcctgctgacatcaatgatggcctgagcagcccagatgagaccttccccaacagctggtacctgccccccagcggcgtggagcggggcagctactatgagtactttggagaccccctgaccccctacctgcctgctgtgcccagcagcttccgggtggacctggccaacgtgtctggcttcccccccatccccacccagcccatcggcttccaggatgcccgggacctgctgtgcaacctgaatggcaccctggccccagccacctggcagggcgccctgggctgccactaccgcctgggccctggcttccggccagatggagacttccctgctgacagccaggtgaatgtgtctgtgtacaaccggctggagctgaggaacagcagcaatgtgctgggcatcatcagaggagctgtggagccagaccgctacgtgctgtatggcaaccaccgggacagctgggtgcacggggctgtggaccccagcagcggcacagctgtgctgctggagctgagccgggtgctgggcaccctgctgaagaagggcacctggaggcccaggaggagcatcgtgtttgcctcctggggcgctgaggagtttggcctgattggcagcacagagttcacagaggagttcttcaacaagctgcaggagaggacagtggcctacatcaacgtggacatctctgtgtttgccaatgccaccctgcgggtgcagggcaccccacctgtgcagagcgtggtgttcagcgccaccaaggagatccgcagccctggccctggggacctgagcatctatgacaactggatccgctacttcaacagaagcagccctgtgtatggcctggtgcccagcctgggcagcctgggcgccggcagtgactatgccccctttgtgcacttcctgggcatcagctccatggacatcgcctacacctatgacaggagcaagaccagcgcccgcatctaccccacctaccacacagcctttgacacctttgattatgtggacaagttcctggaccccggcttcagcagccaccaggccgtggccaggacagctggcagcgtcatcctgcggctgagtgacagcttcttcctgcccctgaaggtgtctgactacagcgagaccctgcggagcttcctgcaggccgcccagcaggacctgggcgccctgctggagcagcacagcatcagcctgggccccctggtgacagctgtggagaagtttgaggccgaggccgccgccctgggccagaggatcagcaccctgcagaagggcagcccagaccccctgcaggtgaggatgctgaatgaccagctgatgctgctggagaggaccttcctgaacccccgggccttccctgaggagcgctactacagccacgtgctgtgggccccccggggcctgcggagccacatccctggcctgagcaatgcctgcagccgggcccgggacacagccagcggcagcgaggcctgggccgaggtgcagaggcagctgagcatcgtggtgacagccctggagggcgccgccgccaccctgcggcctgtggccgacctgtag

SEQ ID NO: 156361 - DNA, 2699 bp, Artificial Sequence
  derived and/or modified sequence
ctaccccagctggccaagagtccgcaggatgcagtggacgaaggtgttggggctggggctgggggctgctgccctcttggggctggggatcatcctcggccactttgccatccccaaaaaagccaactcactggccccccaggacctggacctggagatcctggagaccgtcatggggcagctggatgcccacaggatccgggagaacctcagagaactctccagggagccacacctggcctccagccctcgggatgaggacctggtgcagctgctgctgcagcgctggaaggacccagagtcaggcctggactcggccgaggcctccacgtacgaagtgctgctgtccttccctagccaggagcagcccaacgtcgtggacatcgtgggccccactgggggcatcatccactcctgccaccggactgaggagaacgtgaccggggagcaaggggggccagatgtggtacaaccctatgctgcctatgctccttctggaaccccacagggcctcctcgtctatgccaaccggggcgcggaagaagactttaaggagctacagactcagggcatcaaacttgaaggcaccattgccctgactcgatatgggggtgtagggcgtggggccaaggctgtgaacgctgccaagcacggggtagctggggtgctggtgtacacagaccctgccgacatcaacgatgggctgagctcacccgacgaaacctttcccaactcctggtacctgcccccctcaggagtggagcgaggctcctactacgagtattttggggaccctctgactccctaccttccagccgtcccctcttccttccgcgtggaccttgccaatgtctccggatttcccccaattcctacacagcccattggcttccaggatgcaagagacctgctctgtaacctcaacggaactttggccccagccacctggcagggagcactgggctgccactacaggttgggtcccggcttccggcctgacggagacttcccagcagacagccaggtgaatgtgagcgtctacaaccgcctggagctgaggaactcttccaacgtcctgggcatcatccgtggggctgtggagcctgatcgctacgtgctgtatgggaaccaccgagacagctgggtgcacggggctgtggaccccagcagtggcaccgccgtcctcctggagctctcccgtgtcctggggaccctgctgaagaagggcacctggcgtcctcgcagatcaatcgtgtttgcgagctggggggctgaggagtttgggctcattggctccacggaattcacagaagagttcttcaacaagctgcaggagcgcacggtggcctacatcaacgtggacatctcggtgtttgccaacgctacccttagggtgcaggggacgccccctgtccagagcgtcgtcttctctgcaaccaaagagatccgctcaccaggccctggcgacctgagcatctacgacaactggatccggtacttcaaccgcagcagcccggtgtacggcctggtccccagcttgggttctctgggtgctggcagcgactatgcacccttcgttcacttcctgggcatctcctccatggacattgcctatacctatgaccggagcaagacttcagccaggatctaccccacctaccacacagcctttgacacctttgactatgtggacaagtttttggacccgggcttcagcagccatcaggctgtggcccggacagcggggagtgtgattctccggctcagtgacagcttcttcctgcccctcaaagtcagtgactacagtgagacactccgcagcttcctgcaggcagcccagcaagatcttggggccctgctggagcagcacagcatcagcctggggcctctggtgactgcagtggagaagtttgaggcagaagctgcagccttgggccaacgcatatcaacactgcagaagggcagccctgaccccctgcaggtccggatgctcaatgaccagttgatgctcttggaacggacctttctgaaccctagagccttcccagaggaacgctactacagccatgtgctctgggcacctcgcacgggctccgtagtcacattcccgggcctatccaatgcctgctccagggccagggacacagcttctggatctgaagcttgggctgaggtccagagacagctcagcattgtggtgacagccctggagggtgcggcagccaccctgaggcctgtggctgacctctgaccccagccctctttcttcagccctccctttactccaaccctctcctgcctgctttcctgagatgtcctggtcttccttggtgccagaagagggcactaccacaggaccctctcaagcttctcaggcaacagcttgaggtccctgaggggagtggcaagccctaatgcaactcaccctcatcctggtgcttaggtggcagagggtgggcagcaggggacagggatgggatggcaaaaccaccaactgcccttggtggcaggtgggtggagatgggatgcgtgccaacctcagatgccaactcaggtcatcaaggccaaggaccagtggcgaaagtgagtcttggggtaccttaggccttggctagtctgcgttcctctccctgcatgctgtgtatcctaactccctacaacagcccctcaaataaatcacatctagtgactggtaccaa

SEQ ID NO: 156362 - DNA, 2271 bp, Artificial Sequence
  derived and/or modified sequence
gccaagagtccgcaggatgcagtggacgaaggtgttggggctggggctgggggctgctgccctcttggggctggggatcatcctcggccactttgccatccccaaaaaagccaactcactggccccccaggacctggacctggagatcctggagaccgtcatggggcagctggatgcccacaggatccgggagaacctcagagaactctccagggagccacacctggcctccagccctcgggatgaggacctggtgcagctgctgctgcagcgctggaaggacccagagtcaggcctggactcggccgaggcctccacgtacgaagtgctgctgtccttccctagccaggagcagcccaacgtcgtggacatcgtgggccccactgggggcatcatccactcctgccaccggactgaggagaacgtgaccggggagcaaggggggccagatgtggtacaaccctatgctgcctatgctccttctggaaccccacagggcctcctcgtctatgccaaccggggcgcggaagaagactttaaggagctacagactcagggcatcaaacttgaaggcaccattgccctgactcgatatgggggtgtagggcgtggggccaaggctgtgaacgctgccaagcacggggtagctggggtgctggtgtacacagaccctgccgacatcaacgatgggctgagctcacccgacgaaacctttcccaactcctggtacctgcccccctcaggagtggagcgaggctcctactacgagtattttggggaccctctgactccctaccttccagccgtcccctcttccttccgcgtggaccttgccaatgtctccggatttcccccaattcctacacagcccattggcttccaggatgcaagagacctgctctgtaacctcaacggaactttggccccagccacctggcagggagcactgggctgccactacaggttgggtcccggcttccggcctgacggagacttcccagcagacagccaggtgaatgtgagcgtctacaaccgcctggagctgaggaactcttccaacgtcctgggcatcatccgtggggctgtggagcctgatcgctacgtgctgtatgggaaccaccgagacagctgggtgcacggggctgtggaccccagcagtggcaccgccgtcctcctggagctctcccgtgtcctggggaccctgctgaagaagggcacctggcgtcctcgcagatcaatcgtgtttgcgagctggggggctgaggagtttgggctcattggctccacggaattcacagaagagttcttcaacaagctgcaggagcgcacggtggcctacatcaacgtggacatctcggtgtttgccaacgctacccttagggtgcaggggacgccccctgtccagagcgtcgtcttctctgcaaccaaagagatccgctcaccaggccctggcgacctgagcatctacgacaactggatccggtacttcaaccgcagcagcccggtgtacggcctggtccccagcttgggttctctgggtgctggcagcgactatgcacccttcgttcacttcctgggcatctcctccatggacattgcctatacctatgaccggagcaagacttcagccaggatctaccccacctaccacacagcctttgacacctttgactatgtggacaagtttttggacccgggcttcagcagccatcaggctgtggcccggacagcggggagtgtgattctccggctcagtgacagcttcttcctgcccctcaaagtcagtgactacagtgagacactccgcagcttcctgcaggcagcccagcaagatcttggggccctgctggagcagcacagcatcagcctggggcctctggtgactgcagtggagaagtttgaggcagaagctgcagccttgggccaacgcatatcaacactgcagaagggcagccctgaccccctgcaggtccggatgctcaatgaccagttgatgctcttggaacggacctttctgaaccctagagccttcccagaggaacgctactacagccatgtgctctgggcacctcgcgggctccgtagtcacattccgggcctatccaatgcctgctccagggccagggacacagcttctggatctgaagcttgggctgaggtccagagacagctcagcattgtggtgacagccctggagggtgcggcagccaccctgaggcctgtggctgacctctgaccccagccctctttcttcagccctccctttactcc

SEQ ID NO: 156363 - DNA, 2223 bp, Artificial Sequence
  derived and/or modified sequence
atgcagtggaccaaggtgctgggcctgggcctgggcgccgccgccttgctcggacttggtataattctcggccacttcgcaatccccaaaaaagcaaattctctggcaccacaagacctagacttagaaattttggagacagtgatgggacaactggacgcccatcgcattagggagaaccttagggagctgagtcgtgagccccatctcgctagtagccctcgagacgaggatttggtgcagctgttactgcaacgctggaaggatccagagtccggcctagactccgccgaggcaagcacctatgaggtgctgttaagcttcccctcgcaggaacagcccaacgtggtggatattgtggggccaactggcggtattattcacagctgccaccgcaccgaagaaaatgtcactggcgagcaaggaggcccagatgtggtccaaccctacgcagcttatgctccaagcggaactccccagggactgttggtgtatgctaatagaggggcagaggaggattttaaggagctgcaaactcagggcattaaactggaggggactatcgcccttacccggtatggaggtgtcggacgtggcgcaaaagcagtaaacgcggccaaacacggagtcgctggcgttctcgtctacaccgatcctgccgacattaacgatgggctaagttctccagatgaaaccttcccgaacagttggtacctgcctccaagtggagtcgagaggggcagctactacgagtacttcggcgatccccttaccccttacctacctgcggtcccctctagtttcagggtagaccttgcgaatgtctctgggttcccaccgattcctacgcagccaattggatttcaggatgcaagggatctactgtgtaacttaaatgggaccttggccccagcgacatggcaaggggctctcgggtgtcactacaggctcggcccaggattccgacctgatggcgatttcccggcggacagccaggtgaatgtgagtgtgtataacagattggaattacgaaattcttctaacgttctcggcatcataagaggtgcagtcgagcctgatcgatacgtcctgtatggaaaccaccgagactcttgggttcatggcgcagttgatccatcctctggaactgccgtgctcttggagctgagccgcgtgttaggaaccctattgaaaaagggaacatggcggcctaggaggtccatcgtcttcgcctcttggggcgcagaagagttcggtcttatcggttcaactgagttcactgaagagttcttcaacaagttgcaggagcggaccgtcgcatatatcaacgttgacatcagcgtcttcgctaatgccactctgagagtacaggggacaccacccgtgcaatctgtggtattctccgccaccaaggaaatcagatcgccaggccccggcgacctctctatctatgacaactggattaggtattttaatcgcagttcgccagtctatggattggtcccttctcttggcagtctgggggccggaagtgactacgcccccttcgtgcacttcttaggaatttcaagcatggacatcgcatacacctacgataggagcaaaaccagcgcaagaatttaccctacataccatactgccttcgataccttcgactatgtggacaagtttctggatcccgggttcagcagccaccaggcagtagctaggacggccggatctgtcatcctgaggcttagcgacagctttttcctgccgctgaaggtaagtgactatagtgaaacacttagaagctttctgcaggctgcgcaacaagacctgggagccctgctcgagcaacattcaatttcgctgggaccgctagtcactgccgttgagaagttcgaagctgaagcagccgcattaggacagcggatttctactctacagaaaggatcacctgaccctcttcaggtgagaatgctgaacgatcagttgatgcttctagaacggacatttctaaatcctcgagcatttccggaagaaaggtattattctcatgtactttgggcacctcgtaccgggtcagtggtgacgtttcccggactaagcaatgcgtgttcacgggccagagacactgcctcaggatccgaagcctgggctgaagtccaaaggcagctgtccatagttgtgaccgcattggagggagccgctgccaccctgcgtccggtggcggatctctag

SEQ ID NO: 156364 - DNA, 2220 bp, Artificial Sequence
  derived and/or modified sequence
atgcagtggaccaaggtgctgggcctgggcctgggcgccgccgccctattggggctggggatcattttgggtcacttcgcaatacccaaaaaagctaactcacttgctccccaggacttagacctcgagatcctcgagaccgtcatgggccagctggacgcacaccggattcgcgagaacctgcgcgaactcagccgggagcctcacctcgcttcatcccctagggatgaagatctggtgcagctcctcctccagagatggaaggaccccgagagcggcctggatagtgccgaggcaagcacatacgaggtgcttctgagctttcccagccaggagcagccaaatgtagtcgacatagttggcccaacaggaggtatcatccacagttgccataggaccgaagagaacgtcacaggtgagcaaggtggtcccgatgttgtgcagccatacgctgcgtacgctcccagcgggaccccccagggcttactcgtgtatgcaaataggggtgctgaggaggacttcaaagaactgcagacccagggcatcaagctcgaaggaacaatcgccctcacacgctatggcggcgtcggcaggggcgctaaggccgtcaacgcggccaagcacggagtcgcaggggtgttggtgtacaccgacccagcagatattaatgacggcctgtcctcaccggacgaaactttcccaaacagctggtatctccctccatctggagtagagcgtggctcttactatgagtactttggcgacccgctcaccccgtaccttcccgccgtcccttctagtttccgagtagacctggcaaacgtgtctggctttccccccatccccactcagcctatcggtttccaagatgctagagatctcctgtgcaatctgaatggcacactcgcccccgcgacctggcagggcgctctgggatgtcactataggttaggaccaggatttcggcccgatggggactttccagccgacagccaggtcaatgtctccgtttataaccgccttgagctacgcaacagctccaacgtgctcgggattattaggggcgcggtcgagccagatcgctacgtgctgtatgggaatcatagagattcctgggtgcatggagcagtcgacccctcatctggcactgccgtgctgctcgagttgagtagagtgttaggcactttgctcaaaaagggtacctggcggcccagaaggagcatcgtgtttgcctcctggggcgcagaagagttcggtctgatcgggtccactgaattcacagaggaattcttcaataagttgcaggaacgtaccgtagcctacattaatgtagacattagcgtgttcgccaacgccaccttaagagtccagggcactccgccggtgcagagcgtggtctttagcgctacaaaggagataaggtctcccggtccaggtgatctgtcgatttatgataattggattaggtactttaataggtcatcacccgtgtacggtctggtgccctcactgggcagcctcggggcgggcagtgattacgcaccctttgtccacttccttggaatctccagcatggatattgcttacacttatgatagatctaagacaagcgctagaatttacccaacctatcatactgcctttgatacttttgactacgtggacaagttcttagaccctgggttttcaagccaccaagccgtcgcccggacggccgggagtgtgattctgaggttgagtgactcttttttcttgcctcttaaggtgtccgactattccgagacattgcggagctttctacaagccgcacagcaggacctgggcgctctgctagagcaacacagtatatccctcggcccattggtgaccgcggtggagaaatttgaggcggaggccgccgccctcgggcaacgtatttctaccttgcagaaaggcagccccgatcccctccaggttcgcatgctgaatgaccagctcatgctgctggaaagaacctttctgaatcccagggcctttccagaggagagatattacagtcacgttctttgggcccctcgaggactacggtctcacatcccagggttatctaacgcctgctctagggcaagagatactgcctctggtagcgaggcatgggcggaggtgcagagacaattgtcaattgtggtgacggccctggagggtgcagccgccacactcagaccagtggccgatctttag

SEQ ID NO: 156365 - DNA, 2223 bp, Artificial Sequence
  derived and/or modified sequence
atgcagtggacaaaagtgctgggtttaggactgggggcagctgcgttgctgggcttgggtattatcctgggtcatttcgcaattcctaaaaaggccaactcccttgcccctcaggatctggacctcgagattctcgaaacggtcatgggccaactggacgcccataggatccgcgagaatctccgcgaactgagccgggaaccccacctagcttcatctcctcgagacgaagacctggtacagttgctgctacagcgctggaaggaccccgagtcaggcctagactcagctgaagcctcgacctacgaggttttactgtctttcccaagtcaagagcagccaaatgtcgttgacatcgtcggtccgactggtgggatcattcactcatgccaccgtactgaggagaatgtgacaggagagcagggaggtccagatgtagtccaaccgtacgccgcatacgcgccaagcggcaccccccaaggactcctggtttacgcgaacagaggtgctgaagaggattttaaggagttgcagacacaaggcatcaagttggagggcacgatcgccctgacccgctatgggggagttggacgcggtgccaaggccgtgaatgccgcaaaacacggggtagctggcgtactagtctatactgacccagctgacatcaatgacggcctttccagtcccgatgagacctttcccaattcctggtatctgcctccctccggagtagaacgaggctcttattacgagtattttggcgaccccctgacaccatatctgccagccgttccttcatccttccgagttgatttggctaacgtttcgggcttcccgcctatccccacacaacccattgggtttcaggatgcacgagatctgttatgtaatctgaatggaacactagcacccgctacttggcaaggagccctgggctgtcattatcggcttggaccaggattccgaccggatggcgattttccagctgactctcaagtgaacgtgtccgtgtataacaggttagaattgagaaattcatccaacgtgctggggataatcagaggagccgtggaacccgaccgctacgtgttgtatggcaaccaccgggattcatgggttcacggcgctgttgatccgtcgtccggtaccgccgtgctcctggagctctccagagtcctcgggactctcctcaaaaaggggacgtggagacctaggagaagcatagtcttcgcatcatggggcgctgaagagttcggactgatcggtagcacggagttcacagaggaattcttcaataagctgcaggagaggacggtcgcttatattaacgtggacattagcgtttttgctaatgcgacactgagggtgcagggcacacctccggtgcagtccgtggtgttcagtgccaccaaggaaattcgttctccaggacccggagatttgagtatttacgacaactggatcaggtactttaatcgtagcagccccgtatatggccttgtgcccagtctcggatccttaggtgccggatccgactacgctcctttcgtgcacttcctgggaatctccagcatggatatagcgtatacctatgacagaagcaagaccagcgcacggatctatcccacataccacaccgccttcgatacatttgactacgttgacaaattccttgaccccggattctccagccaccaggctgtggccaggaccgcagggagtgtcatcctgcggctgagcgactccttcttcctgccacttaaggtcagcgactatagtgaaacgctgcgcagctttctgcaggctgcacaacaggacctgggcgcactattagagcagcattcgatatctttagggcctttggtcaccgctgtcgagaagttcgaagcagaagctgcagccctcggccagcggatttctaccctccagaagggctcccctgacccccttcaggtgagaatgctgaatgaccagctcatgctgctggagaggacctttctcaaccctcgggcattcccggaagagaggtactactctcacgtgctgtgggcccctaggaccgggtccgttgttacttttccaggcttatccaatgcatgtagcagagctcgggacactgctagcggttctgaggcctgggcagaagtccagaggcagcttagcatcgtggtcacagcactcgagggggctgctgctactctcaggcctgttgcagacttatag

SEQ ID NO: 156366 - DNA, 2220 bp, Artificial Sequence
  derived and/or modified sequence
atgcagtggacgaaggtgctgggtctggggcttggcgcagcagcactactgggtctgggaatcatacttgggcatttcgcaattccgaaaaaggccaatagcctagccccacaggacctggacctggagatcctcgaaacggttatggggcaattggatgctcaccggattcgagagaatcttagagaacttagcagggaaccgcacttggccagtagtccacgggacgaagaccttgtgcagctgctgttgcaaaggtggaaggacccggaaagcggacttgattccgccgaagccagtacatacgaggtactgctttcctttccgtctcaggaacaacccaacgtggtggatatagtcgggccaacaggcggaatcattcatagctgtcatcgaaccgaggaaaatgtcacgggggagcaggggggacctgacgtggtccagccgtacgctgcatatgcacctagcggcacacctcagggactgctcgtatacgcgaacagaggtgctgaagaggattttaaggagttgcagactcagggcataaagctagagggcactatcgctctcacgcgttatgggggagtcggaaggggtgctaaggcggtcaacgcagctaagcatggtgtggctggggtgttagtttatacagacccagcggacattaacgacggactcagctctccagatgagacattccccaactcctggtatcttccccctagtggcgtagaacggggaagctattatgagtacttcggggatcccttaactccttacctgcctgctgtccctagcagctttagggtggacttagccaatgtgagcggttttcccccaatccccacgcagccaatcgggtttcaggacgctcgtgatctgctgtgtaaccttaacggtaccctggccccagccacgtggcagggagccttagggtgtcattatagactggggccaggattccggccagacggagactttcctgcagacagccaggttaatgtgtctgtgtacaaccgattagaactgcgcaatagcagcaacgtgctgggtattatcaggggggcagtcgaaccagatagatacgtgctgtatggaaaccatagggattcttgggttcatggagccgtggatccatcatccggaaccgctgtgctgctggaattatcccgtgtcctaggcaccctgctgaaaaagggtacatggaggccacgaagatctattgtgtttgcttcctggggagccgaagagttcggactaatcggcagcaccgagtttactgaagaattcttcaacaagctgcaggagagaaccgtggcgtacataaatgttgacatctctgtctttgctaatgccaccctgcgggtccagggcacaccgcctgtccagagcgtggtgtttagtgctactaaggagatcagatccccaggaccaggagacttgagtatttatgataattggatcaggtattttaaccggagctccccagtgtatggattggtcccctcccttgggtccctgggtgccggttccgactacgcccctttcgtgcactttctcggaatttcttcgatggatattgcttatacgtacgatcggagtaagacaagcgcaagaatctacccaacttaccacactgcgttcgacaccttcgactatgtggacaagtttctcgacccaggtttcagctcccaccaagccgtggcccgaaccgccggttcagttatactacggctgtcagatagtttttttctgccactgaaagtgtcagattatagtgagactctgagatcttttctccaagctgctcagcaagatctcggcgcactcctcgagcagcactccatatcattaggaccactcgtgaccgctgtggagaagttcgaagctgaggctgctgcgctgggacagaggattagcaccctgcaaaaagggtccccagatcccttacaggtccgcatgctaaacgaccagctgatgcttctggagcgaacctttctaaacccaagggcttttccagaagaacggtattatagccacgtgctgtgggccccaagaggcctcagaagccatatacccggattgagcaacgcatgtagtagagccagggacacagcatcagggtctgaggcctgggctgaggtgcaaagacagctgtcgatcgtagtgacggcactggaaggcgctgccgcaacactgaggccggttgctgatttatag

SEQ ID NO: 156367 - DNA, 2223 bp, Artificial Sequence
  derived and/or modified sequence
atgcagtggaccaaggtgctgggcctgggcctgggcgccgccgccctgctgggcctgggcatcatcctgggccacttcgccatccccaagaaggccaacagcctggccccccaggacctggacctggagatcctggagaccgtgatgggccagctggacgcccacagaatcagagagaacctgagagagctgagcagagagccccacctggccagcagccccagagacgaggacctggtgcagctgctgctgcagagatggaaggaccccgagagcggcctggacagcgccgaggccagcacctacgaggtgctgctgagcttccccagccaggagcagcccaacgtggtggacatcgtgggccccaccggcggcatcatccacagctgccacagaaccgaggagaacgtgaccggcgagcagggcggccccgacgtggtgcagccctacgccgcctacgcccccagcggcaccccccagggcctgctggtgtacgccaacagaggcgccgaggaggacttcaaggagctgcagacccagggcatcaagctggagggcaccatcgccctgaccagatacggcggcgtgggcagaggcgccaaggccgtgaacgccgccaagcacggcgtggccggcgtgctggtgtacaccgaccccgccgacatcaacgacggcctgagcagccccgacgagaccttccccaacagctggtacctgccccccagcggcgtggagagaggcagctactacgagtacttcggcgaccccctgaccccctacctgcccgccgtgcccagcagcttcagagtggacctggccaacgtgagcggcttcccccccatccccacccagcccatcggcttccaggacgccagagacctgctgtgcaacctgaacggcaccctggcccccgccacctggcagggcgccctgggctgccactacagactgggccccggcttcagacccgacggcgacttccccgccgacagccaggtgaacgtgagcgtgtacaacagactggagctgagaaacagcagcaacgtgctgggcatcatcagaggcgccgtggagcccgacagatacgtgctgtacggcaaccacagagacagctgggtgcacggcgccgtggaccccagcagcggcaccgccgtgctgctggagctgagcagagtgctgggcaccctgctgaagaagggcacctggagacccagaagaagcatcgtgttcgccagctggggcgccgaggagttcggcctgatcggcagcaccgagttcaccgaggagttcttcaacaagctgcaggagagaaccgtggcctacatcaacgtggacatcagcgtgttcgccaacgccaccctgagagtgcagggcaccccccccgtgcagagcgtggtgttcagcgccaccaaggagatcagaagccccggccccggcgacctgagcatctacgacaactggatcagatacttcaacagaagcagccccgtgtacggcctggtgcccagcctgggcagcctgggcgccggcagcgactacgcccccttcgtgcacttcctgggcatcagcagcatggacatcgcctacacctacgacagaagcaagaccagcgccagaatctaccccacctaccacaccgccttcgacaccttcgactacgtggacaagttcctggaccccggcttcagcagccaccaggccgtggccagaaccgccggcagcgtgatcctgagactgagcgacagcttcttcctgcccctgaaggtgagcgactacagcgagaccctgagaagcttcctgcaggccgcccagcaggacctgggcgccctgctggagcagcacagcatcagcctgggccccctggtgaccgccgtggagaagttcgaggccgaggccgccgccctgggccagagaatcagcaccctgcagaagggcagccccgaccccctgcaggtgagaatgctgaacgaccagctgatgctgctggagagaaccttcctgaaccccagagccttccccgaggagagatactacagccacgtgctgtgggcccccagaaccggcagcgtggtgaccttccccggcctgagcaacgcctgcagcagagccagagacaccgccagcggcagcgaggcctgggccgaggtgcagagacagctgagcatcgtggtgaccgccctggagggcgccgccgccaccctgagacccgtggccgacctgtag

SEQ ID NO: 156368 - DNA, 2220 bp, Artificial Sequence
  derived and/or modified sequence
atgcagtggaccaaggtgctgggcctgggcctgggcgccgccgccctgctgggcctgggcatcatcctgggccacttcgccatccccaagaaggccaacagcctggccccccaggacctggacctggagatcctggagaccgtgatgggccagctggacgcccacagaatcagagagaacctgagagagctgagcagagagccccacctggccagcagccccagagacgaggacctggtgcagctgctgctgcagagatggaaggaccccgagagcggcctggacagcgccgaggccagcacctacgaggtgctgctgagcttccccagccaggagcagcccaacgtggtggacatcgtgggccccaccggcggcatcatccacagctgccacagaaccgaggagaacgtgaccggcgagcagggcggccccgacgtggtgcagccctacgccgcctacgcccccagcggcaccccccagggcctgctggtgtacgccaacagaggcgccgaggaggacttcaaggagctgcagacccagggcatcaagctggagggcaccatcgccctgaccagatacggcggcgtgggcagaggcgccaaggccgtgaacgccgccaagcacggcgtggccggcgtgctggtgtacaccgaccccgccgacatcaacgacggcctgagcagccccgacgagaccttccccaacagctggtacctgccccccagcggcgtggagagaggcagctactacgagtacttcggcgaccccctgaccccctacctgcccgccgtgcccagcagcttcagagtggacctggccaacgtgagcggcttcccccccatccccacccagcccatcggcttccaggacgccagagacctgctgtgcaacctgaacggcaccctggcccccgccacctggcagggcgccctgggctgccactacagactgggccccggcttcagacccgacggcgacttccccgccgacagccaggtgaacgtgagcgtgtacaacagactggagctgagaaacagcagcaacgtgctgggcatcatcagaggcgccgtggagcccgacagatacgtgctgtacggcaaccacagagacagctgggtgcacggcgccgtggaccccagcagcggcaccgccgtgctgctggagctgagcagagtgctgggcaccctgctgaagaagggcacctggagacccagaagaagcatcgtgttcgccagctggggcgccgaggagttcggcctgatcggcagcaccgagttcaccgaggagttcttcaacaagctgcaggagagaaccgtggcctacatcaacgtggacatcagcgtgttcgccaacgccaccctgagagtgcagggcaccccccccgtgcagagcgtggtgttcagcgccaccaaggagatcagaagccccggccccggcgacctgagcatctacgacaactggatcagatacttcaacagaagcagccccgtgtacggcctggtgcccagcctgggcagcctgggcgccggcagcgactacgcccccttcgtgcacttcctgggcatcagcagcatggacatcgcctacacctacgacagaagcaagaccagcgccagaatctaccccacctaccacaccgccttcgacaccttcgactacgtggacaagttcctggaccccggcttcagcagccaccaggccgtggccagaaccgccggcagcgtgatcctgagactgagcgacagcttcttcctgcccctgaaggtgagcgactacagcgagaccctgagaagcttcctgcaggccgcccagcaggacctgggcgccctgctggagcagcacagcatcagcctgggccccctggtgaccgccgtggagaagttcgaggccgaggccgccgccctgggccagagaatcagcaccctgcagaagggcagccccgaccccctgcaggtgagaatgctgaacgaccagctgatgctgctggagagaaccttcctgaaccccagagccttccccgaggagagatactacagccacgtgctgtgggcccccagaggcctgagaagccacatccccggcctgagcaacgcctgcagcagagccagagacaccgccagcggcagcgaggcctgggccgaggtgcagagacagctgagcatcgtggtgaccgccctggagggcgccgccgccaccctgagacccgtggccgacctgtag

SEQ ID NO: 156369 - protein, 509 aa, Artificial Sequence
  derived and/or modified sequence
MAELQMLLEEEIPSGKRALIESYQNLTRVADYCENNYIQATDKRKALEETKAYTTQSLASVAYQINALANNVLQLLDIQASQLRRMESSINHISQTVDIHKEKVARREIGILTTNKNTSRTHKIIAPANMERPVRYIRKPIDYTVLDDVGHGVKKWHKIIHGNNQPARTGTLSRTNPPTQKPPSPPMSGRGTLGRNTPYKTLEPVKPPTVPNDYMTSPARLGSQHSPGRTASLNQRPRTHSGSSGGSGSRENSGSSSIGIPIAVPTPSPPTIGPENISVPPPSGAPPAPPLAPLLPVSTVIAAPGSAPGSQYGTMTRQISRHNSTTSSTSSGGYRRTPSVTAQFSAQPHVNGGPLYSQNSISIAPPPPPMPQLTPQIPLTGFVARVQENIADSPTPPPPPPPDDIPMFDDSPPPPPPPPVDYEDEEAAVVQYNDPYADGDPAWAPKNYIEKVVAIYDYTKDKDDELSFMEGAIIYVIKKNDDGWYEGVCNRVTGLFPGNYVESIMHYTD

SEQ ID NO: 156370 - protein, 508 aa, Artificial Sequence
  derived and/or modified sequence
MAELQMLLEEEIPSGKRALIESYQNLTRVADYCENNYIQATDKRKALEETKAYTTQSLASVAYQINALANNVLQLLDIQASQLRRMESSINHISQTVDIHKEKVARREIGILTTNKNTSRTHKIIAPANMERPVRYIRKPIDYTVLDDVGHGVKWLKAKHGNNQPARTGTLSRTNPPTQKPPSPPMSGRGTLGRNTPYKTLEPVKPPTVPNDYMTSPARLGSQHSPGRTASLNQRPRTHSGSSGGSGSRENSGSSSIGIPIAVPTPSPPTIGPENISVPPPSGAPPAPPLAPLLPVSTVIAAPGSAPGSQYGTMTRQISRHNSTTSSTSSGGYRRTPSVTAQFSAQPHVNGGPLYSQNSISIAPPPPPMPQLTPQIPLTGFVARVQENIADSPTPPPPPPPDDIPMFDDSPPPPPPPPVDYEDEEAAVVQYNDPYADGDPAWAPKNYIEKVVAIYDYTKDKDDELSFMEGAIIYVIKKNDDGWYEGVCNRVTGLFPGNYVESIMHYTD

SEQ ID NO: 156371 - DNA, 1530 bp, Artificial Sequence
  derived and/or modified sequence
atggccgaactgcaaatgctcttggaagaggaaatccctagtggcaagcgggccctcatcgagtcgtaccagaacttaacaagagtagccgactactgtgaaaataactacattcaggccacggataagaggaaagctctcgaggagacgaaggcatataccactcaatccctggccagcgtcgcctatcagattaacgctctggccaacaatgtcctgcagctgctggatattcaagcttctcagctccgccgaatggaatcatcaataaaccacatctctcagaccgtagatatccacaaggagaaggtagctcggcgggagatcggaatcctgaccaccaataagaacacatccaggacccataaaatcattgcacctgctaacatggagcgacctgtgcgatacatacggaaacctattgactacaccgtactggatgacgtgggtcacggtgtgaagaaatggcacaagattattcacggaaacaatcagcctgcccgtactgggactctcagtcgtaccaatcctccgacgcagaaacctccaagccctcccatgtccggcaggggtaccctggggcgaaacaccccctacaaaactttagagcctgtgaaacctccaaccgttccaaatgattacatgacctcaccagcccgtctgggaagtcagcacagtccaggcagaaccgcttcgttaaatcagcggccgcgaacccacagtggttcctccggcggtagtggtagccgggagaactccggatcatcttccataggaatcccaattgcagttcccaccccttcacctcctacaattggacccgagaatatatctgtgccaccaccaagcggagccccccccgccccccccttggccccactgctccccgtatcgaccgtgattgcggctcccggaagtgccccggggagtcaatatggcacgatgactcggcagattagcagacataattctactacatcttccacttccagcgggggctaccggcgcaccccttctgtcacggctcagttttccgcccagcctcatgttaacggcggccctctgtattctcaaaactctataagtatagccccacccccaccacccatgccccaactgacaccacaaattcccctgacaggattcgtcgccagggtccaggagaatattgcagacagcccgacaccccccccgccccccccgcccgatgacatccctatgttcgatgactcccctccgcccccacctccgcccccggttgactatgaggatgaggaagcagccgtggtgcagtacaatgatccctacgctgacggcgaccctgcctgggcacccaagaactacattgaaaaagtcgtcgctatctacgactacacaaaagacaaagacgacgagctgtcatttatggaaggggcaatcatttatgtgatcaagaagaatgatgatggttggtatgagggggtttgcaaccgagtgactggactcttcccaggcaattatgtagagagcataatgcattacaccgactag

SEQ ID NO: 156372 - DNA, 1527 bp, Artificial Sequence
  derived and/or modified sequence
atggctgagctgcagatgctcttagaagaagagatccccagtggaaagcgcgcactcatcgagtcataccagaacctcactcgggtggccgactactgcgagaataattacatacaggccactgataaacgcaaagccctggaggaaacgaaagcctataccactcagagcttagcatctgtggcttatcagataaatgctctggcgaataacgttctacagcttcttgacatccaggccagtcagctacgccgcatggagagctcaatcaaccacattagccagactgtggatatacacaaggaaaaggtggctcgtcgggagattggcatcttgactacgaacaaaaatactagcaggactcataagattatcgctcctgctaacatggagaggcctgtaaggtacattcgaaagcccattgattacacagttttagatgacgtcgggcacggtgtgaagtggctaaaggcaaagcacggcaataatcagcctgcccggactggcactttgagcaggaccaacccccccacccagaaacctccgagtccacccatgtctgggcgcggcactctcgggcggaacactccctataaaactctagaaccagtcaagccccccaccgttccaaatgactacatgacatcccccgccaggttaggcagccaacacagcccaggacgcactgcttccctgaaccaacgaccacgcacccattctgggagctcagggggcagtggcagtagagagaatagcggctctagtagcattggaattccaatcgcagtgccaacgcctagcccaccaacgatcggacccgagaacatctctgtgcctcccccctcaggggcccctcctgccccaccgctggcacccctgttacccgttagtacagtgattgcagcccccgggagcgcccctggttcacaatacggcaccatgacaaggcagatctctagacacaactccaccacatcatccactagttccggaggatacagaaggactccaagtgttacagctcaattttcagcacaacctcacgtgaacggcggcccactatattcccaaaatagcatcagtatagcacccccaccgcctcccatgcctcaactgacacctcaaattcccctgactgggttcgtggcccgtgttcaggaaaatatcgcagacagtcctactcccccgcccccccctccgccagatgatataccaatgtttgacgacagcccacctccccccccgccaccacccgtggattacgaggatgaggaggccgccgttgtgcagtacaacgatccatatgccgacggagatccagcatgggctccgaaaaactacatcgagaaggtcgtcgccatctatgattacacgaaggataaagatgatgaactctcattcatggagggcgcaatcatttacgttattaagaagaatgacgacggctggtacgagggagtctgcaatagagttacaggcctgttcccagggaactacgttgagtctataatgcactataccgattag

SEQ ID NO: 156373 - DNA, 1530 bp, Artificial Sequence
  derived and/or modified sequence
atggccgagctgcagatgctgctggaggaggagatccccagcggcaagagggccctgattgagagctaccagaacctgaccagggtggccgactactgtgagaacaactacatccaggccacagacaagaggaaggccctggaggagaccaaggcctacaccacccagagcctggcctctgtggcctaccagatcaatgccctggccaacaacgtgctgcagctgctggacatccaggccagccagctgcggaggatggagagcagcatcaaccacatcagccagacagtggacatccacaaggagaaggtggcccggcgggagatcggcatcctgaccaccaacaagaacaccagcaggacccacaagatcatcgccccagccaacatggagaggcctgtgcgctacatcaggaagcccatcgactacacagtgctggatgatgtgggccatggagtgaagaagtggcacaagatcatccacggcaacaaccagcctgccaggacaggcaccctgagcaggaccaacccccccacccagaagccacccagcccccccatgagcggccggggcaccctgggcaggaacaccccctacaagaccctggagcctgtgaagcccccaacagtgcccaatgactacatgaccagccctgcccggctgggcagccagcacagccctggccgcacagccagcctgaaccagaggcccaggacccacagcggcagcagcggcggcagcggcagcagagaaaattctggcagcagcagcatcggcatccccatcgctgtgcccacccccagcccccccaccatcggccctgagaacatctctgtgcccccaccttctggggcccccccagccccacccctggcccccctgctgcctgtgtccacagtgattgctgcccctggcagcgcccctggcagccagtatggcaccatgacccggcagatcagccgccacaacagcaccaccagcagcaccagcagcggcggctacagaaggaccccatctgtgacagcccagttcagcgcccagccccacgtgaatggaggccccctgtacagccagaacagcatcagcatcgcccctcctcctccacccatgccccagctgaccccccagatccccctgaccggctttgtggcccgggtgcaggagaacattgctgacagccccaccccacctcctcctcctcctccagatgacatccccatgtttgatgacagccccccacctcctcctcctcctcctgtggactatgaagatgaggaggccgctgtggtgcagtacaatgacccctatgcagatggagaccctgcctgggcccccaagaactacatcgagaaggtggtggccatctatgactacaccaaggacaaggatgatgagctgtccttcatggagggcgccatcatctacgtgatcaagaagaatgatgatggctggtatgaaggagtgtgcaacagagtgacaggcctcttccctggcaactacgtggagagcatcatgcactacacagactag

SEQ ID NO: 156374 - DNA, 1527 bp, Artificial Sequence
  derived and/or modified sequence
atggccgagctgcagatgctgctggaggaggagatccccagcggcaagagggccctgattgagagctaccagaacctgaccagggtggccgactactgtgagaacaactacatccaggccacagacaagaggaaggccctggaggagaccaaggcctacaccacccagagcctggcctctgtggcctaccagatcaatgccctggccaacaacgtgctgcagctgctggacatccaggccagccagctgcggaggatggagagcagcatcaaccacatcagccagacagtggacatccacaaggagaaggtggcccggcgggagatcggcatcctgaccaccaacaagaacaccagcaggacccacaagatcatcgccccagccaacatggagaggcctgtgcgctacatcaggaagcccatcgactacacagtgctggatgatgtgggccatggagtgaagtggctgaaggccaagcacggcaacaaccagcctgccaggacaggcaccctgagcaggaccaacccccccacccagaagccacccagcccccccatgagcggccggggcaccctgggcaggaacaccccctacaagaccctggagcctgtgaagccacccaccgtgcccaatgactacatgaccagccctgcccggctgggcagccagcacagccctggccgcacagccagcctgaaccagaggcccaggacccacagcggcagcagcggcggcagcggcagccgggagaacagcggcagcagcagcatcggcatccccatcgctgtgcccacccccagcccccccaccatcggccctgagaacatctctgtgcccccacccagcggggcccccccagccccacccctggcccccctgctgcctgtgtccacagtgattgctgcccctggcagcgcccctggcagccagtatggcaccatgacccggcagatcagccgccacaacagcaccaccagcagcaccagcagcggcggctacagaaggacccccagcgtgacagcccagttcagcgcccagccccacgtgaatggaggccccctgtacagccagaacagcatcagcatcgcccctcctcctccacccatgccccagctgaccccccagatccccctgactggatttgtggcccgggtgcaggagaacattgctgacagccccaccccacctcctcctcctcctccagatgacatccccatgtttgatgacagccccccacctcctcctcctcctcctgtggactatgaagatgaggaggccgctgtggtgcagtacaatgacccctatgcagatggagaccctgcctgggcccccaagaactacatcgagaaggtggtggccatctatgactacaccaaggacaaggatgatgagctgtccttcatggagggcgccatcatctacgtgatcaagaagaatgatgatggctggtatgagggcgtgtgcaacagagtgacaggcctcttccctggcaactacgtggagagcatcatgcactacacagactag

SEQ ID NO: 156375 - DNA, 1530 bp, Artificial Sequence
  derived and/or modified sequence
atggccgagctgcagatgctgctggaggaggagatccccagcggcaagcgggccttaatcgagtcttaccagaacctgactcgggtggccgactactgcgaaaataactacattcaggccacagacaaacgtaaggcattagaagagacaaaagcttacacaacacagtcattagcgtcagtcgcttaccagattaatgccttggctaacaacgttctgcagctgcttgatattcaggccagccagcttcgaagaatggaatctagcatcaatcacatatcacagacggtggatattcataaagagaaagttgcaaggcgtgaaattggcatcctgacaaccaacaaaaacacgagtcgcacccacaaaataatcgcccccgccaacatggagaggcccgtgagatatatacgtaaacccatcgactacaccgtcctggacgacgtggggcatggcgttaagaagtggcataagattatccacggcaacaatcagcctgcccggacgggtaccctgtctcgaactaatcctcccacacagaaacccccaagccctcctatgtctgggcgaggtactctggggcggaacaccccctacaagacactggagcctgtgaagcccccgaccgtgcccaacgattacatgaccagcccggccagacttggatctcagcatagtcccggacgcaccgccagtctcaatcagcggcccaggacccactcgggctccagcggaggttcaggcagtcgggagaattcggggtcatcctcaattgggattcctattgcagtcccaactccttctccgcctactatcggacctgaaaatatatccgtaccgccccccagcggggcccctcctgccccacctctggctcccctccttccagtgtctacagtgatcgccgcgccagggtctgcaccgggaagccagtacggcaccatgaccagacagatttcccgacacaacagcacgactagttcaaccagttcaggaggctatcgcagaaccccctcagtgactgcccagttctcagcccagccccatgtcaacggcggacctctgtactcccagaattccattagcatagctcctcccccacctcctatgccccagctaacacctcaaattcctttgaccggtttcgttgcaagagttcaggaaaacatcgctgactcacccacacctccccccccacctccgcctgacgatattcccatgtttgacgattcaccaccgccccccccccccccacccgtagactatgaggacgaagaagctgcagtcgtgcagtataacgatccttatgccgatggtgatcctgcctgggcaccaaaaaattacattgagaaggtagtggctatctatgactatactaaggataaagatgacgaactgtccttcatggaaggggccattatttacgtgataaagaagaacgatgacggctggtatgaaggagtgtgtaacagagtaacgggactgttcccaggcaactacgtcgagtcaattatgcattacactgattag

SEQ ID NO: 156376 - DNA, 1527 bp, Artificial Sequence
  derived and/or modified sequence
atggccgagctgcagatgctgctggaggaggagatccccagcggcaagagggctcttattgaaagttaccaaaatcttacccgcgtggcggattattgcgaaaacaactacattcaggctacagacaaacggaaagctttggaggaaaccaaagcgtatactactcagtccctggcaagcgtggcctaccaaataaatgccctggccaataacgtgctccagttgctggatatccaggcctctcagcttcgcaggatggagtcctcaattaatcacatctcacagaccgtggacattcataaggaaaaggtcgctcggcgagaaatcggcattttgacaaccaataagaacacatcgaggactcataagatcattgcacccgcaaatatggaaaggcccgtgcggtatatcagaaagcccattgactacaccgtgctggatgacgtaggccacggcgtgaaatggctgaaagcgaagcacgggaacaatcagcctgctcgtactggtaccttgtctcggacaaacccacctacgcagaagcctccaagcccacccatgagtgggcgaggaaccttaggtcgcaatactccctataaaacactggagccggttaagccgcccactgtgccaaatgactacatgacgtcaccagcgcgtttgggctcccagcattcgcccggccgcactgcctcactgaaccagagaccaaggacccacagcggcagttcagggggatctggatctcgggagaactctggaagctcttctatcggaataccaatcgcagttccgactccgagtccaccaacaattggtccagagaatattagcgtgccacctccaagtggggcccctcctgctccgccactggctcccctgctacccgtcagtactgtcattgccgcacctggttctgcgccgggaagccagtatggcacaatgacacgtcagattagccgccataactccaccacctctagtacatcatctggaggctacagaaggaccccctccgtcaccgcccagttctctgcacagcctcacgtgaatggaggccctctgtattcgcaaaacagtatttccatcgcaccgcccccacccccgatgccccagctcacccctcaaatcccactcactggcttcgttgccagggtgcaagagaatatagccgattccccgacgcctcctccgccccccccaccagacgacatcccaatgtttgacgatagccccccacctccccctcccccacccgtcgattatgaagatgaggaagcagctgtggtgcaatacaacgacccatatgccgatggagaccccgcctgggcccctaaaaactacattgagaaggtggtggctatatatgactatacaaaggataaggatgacgagctgagctttatggaaggcgccatcatatatgtgattaaaaagaacgacgatgggtggtacgagggtgtgtgtaatcgggtgacaggactgtttccgggcaactatgtagagtcaatcatgcactacacagactag

SEQ ID NO: 156377 - DNA, 1530 bp, Artificial Sequence
  derived and/or modified sequence
atggcagagctgcagatgttgctggaagaggaaatccccagcggcaaaagagcgctcattgaaagctaccagaatttgacccgcgtggcagactactgcgaaaacaactatattcaagccacagacaaacggaaagctctagaggagacaaaagcttacactacacaatcccttgcctcagttgcttaccagatcaacgcactcgcaaataacgtgctccagctcttggacatccaggcgagccagctacggagaatggagagcagcatcaatcacataagccaaactgtagatatccacaaagaaaaagtggctcgtcgggagattggcatactgacaacgaacaagaatacctcccgaacacataaaatcatcgctcctgcgaacatggagaggccagtgcggtacatccgcaagcctattgactacaccgtgctagatgatgtagggcacggagtgaaaaaatggcataagatcatccacggaaataaccagcctgcgaggactgggaccctcagccgaactaacccacccacccagaagcctccctcgccacctatgtccggacgagggactctggggcgaaacacaccttacaagacactagagccggtaaagccccctactgtcccaaatgactatatgacttcgcctgctaggctgggaagccagcactccccgggaagaacagctagtctgaaccagcgcccacggacacacagcggatcaagtggaggatccggcagcagagaaaactctgggtccagctctatcggcatcccgatcgctgtacccaccccttcgccaccgactattgggcctgaaaacatttcagttccccctcctagcggtgcgccaccagcccctccactcgcaccactgctcccagttagtactgtcatagcagcccctggcagtgccccaggatctcaatatgggacaatgacgcgccagatcagtagacacaactcgacaacttcttccaccagctctggtggatataggagaacaccttccgtaaccgctcagttctccgcgcaaccgcacgttaatggtggaccgctctattcacagaactccatctcgattgccccaccgcctccaccgatgccccaactgacacctcagatccctctgactggtttcgttgcccgtgtacaggaaaatattgcggactctcccactccaccccctcccccaccccctgacgacataccgatgttcgacgacagtccccctcccccacccccacccccagtggactatgaagacgaggaagccgctgttgtgcagtacaacgacccatatgctgatggcgaccctgcatgggctcctaagaactacatcgagaaggttgttgctatttacgactatacaaaggataaggacgacgagttatctttcatggaaggcgcaattatctatgtcatcaagaaaaatgatgacggctggtatgagggcgtgtgcaatcgagttacagggctctttcctggcaactacgttgaatcaatcatgcactacaccgactag

SEQ ID NO: 156378 - DNA, 1527 bp, Artificial Sequence
  derived and/or modified sequence
atggctgaactccagatgctactcgaggaggagatcccctccgggaaaagagcactgatcgagtcctaccagaacctcactcgcgttgcagactattgcgagaacaactacatccaggccacggacaagagaaaggcccttgaggagacaaaggcctataccacacaatcactagcgtcagtggcataccagataaacgccctggctaataacgtactgcagcttctagacatccaggccagccagctgcgcagaatggaaagcagcattaaccacatcagccagactgtcgacatacacaaagaaaaagtcgcccgaagggagatcgggattctgacaactaataagaatacttcgcgcacacataagataattgctccggctaatatggaacgacctgtgaggtatatcagaaaacctatcgattatacagttctcgacgatgtaggacacggggttaagtggttgaaagctaagcacggcaacaatcagcccgcacggacaggaacactatcgcgcaccaaccctccaacccaaaagccaccttcgcccccaatgtcaggacgcggaacgctgggtcgcaatactccctacaagacattggagcccgttaagccgccaaccgttccgaacgattatatgacatcgcccgcacgactaggctcacagcacagccccggaaggactgcttctctgaatcagcgccctcggacccactcagggagctcagggggtagcggcagcagggaaaattccgggtcttcaagcatagggatcccaatagctgtgcccaccccttcaccacccactatcggacccgaaaacatatcggtccctcccccatccggcgctcccccagcgcctccccttgcccctctcctcccagtttctactgtgatcgctgccccaggctcagcgcctgggagccaatatggaacaatgactcggcagattagccggcataatagcaccacctcctcaacctccagcggaggttatcgtcgaactccctctgtcaccgcccagttcagcgcacagcctcacgttaacggcggaccactttattcccagaatagcatctctattgcaccaccacctcctcccatgccacagctgacccctcagatcccactgaccggattcgttgctagggtccaggagaacattgccgattctccaacacctcccccaccgccacctcccgacgatatccctatgtttgacgactcccccccacctcctccgccaccacctgtggattacgaagatgaggaagctgctgttgtgcagtataatgatccgtatgccgatggcgatcctgcatgggccccaaaaaattacatcgaaaaggtggtcgcgatttacgattatacgaaggacaaggatgacgaactttccttcatggaaggcgctatcatttacgtcattaagaagaatgacgacggttggtatgagggcgtgtgtaaccgagtgacggggctgtttccgggaaactacgttgagtcaattatgcactatacagattag

SEQ ID NO: 156379 - DNA, 3728 bp, Artificial Sequence
  derived and/or modified sequence
gagaaataaacgctcgcgagagaacgaggttcaggcggctgcacgaagggggtggaggggggctggagagagtgaggaggaaggggaggaggtgccgtcccacaataccaggcgggagggcgggtaggcggtttgtatccgggctgtgaggtgctcggagcctcggcggaccttgctgcctctgtctctttaacgcgagaggaagcgatgcagaggggtggaaaatggcagagctgcagatgttactagaggaggagatcccgtctggcaagagggcgctgatcgagagttaccagaacctgactcgggtggcagactactgtgaaaacaactacatacaggctacagacaagagaaaagctttagaggagaccaaagcctatacaacccaatctctagctagtgttgcttatcaaataaatgcattggccaacaatgtactccagttgctggatatccaagcctctcagcttcggagaatggagtcttccatcaatcatatctcacagactgtggatattcataaggagaaagtggcacgaagagagattggtattttgacaacaaataagaatacatcaagaactcacaaaataatagcacctgcgaatatggagcgccctgtaaggtatattcggaaacctatcgattacacagttctggatgatgtgggccatggtgtcaagaaatggcataaaataatacatggaaataaccagcctgcaagaactggcacactgtcgagaacaaatcctcctactcagaaaccgccaagtcctcccatgtcaggccggggaacactgggacggaatactccttataaaaccctggaacctgttaaacccccaacagttcctaatgactatatgaccagtcctgctaggcttggaagtcagcatagtccaggcaggacagcatctttaaatcagagaccaaggacacacagtggaagtagtggaggaagtggaagtcgagaaaacagtggtagcagtagtattggcattcccattgctgtgcctacaccttcgccacccactattggaccagaaaacatttctgtccctcctccttctggagctccaccagcaccacctctggcaccacttctcccagtgagcactgtgatagcagccccgggctcagctcctggttcccagtatggcacaatgaccaggcagatatctcgacacaactctactacttcttcgacatcttctggtggatacagacgaactccctctgtgactgctcaattttctgctcagcctcatgttaatggaggtccactttattctcaaaattcaatttctattgctccaccccctccccctatgcctcagttgactccacagatacctctcacaggcttcgtggccagggtgcaggaaaacattgctgatagtccaactccaccgccaccacctccaccagatgacattcccatgtttgatgactctccacctcccccaccaccaccaccagtggattatgaagatgaggaggctgcagtagttcagtataatgatccatatgcagatggggatcctgcttgggcccccaagaattatattgagaaagttgttgcaatatatgattatacaaaagacaaggatgatgagctgtcatttatggagggtgcaatcatttatgttataaagaagaatgatgatggctggtatgaaggagtctgcaatcgagtgactggtctgttccctgggaactatgttgaatcaatcatgcactatactgattaatttttttttttcttttgaagtagattcttattactcagtcatactgtgggactattatggttaacagaactgtcttaatatgttttaaaatgtgcccatattttcagaacatgctgttttattggtaaattgaatgtctacctgtaagcataaatctttgaggcagtttatgtattgctgaatagcaatttatacaagaagctgtccataactgattatgcttatgtacttacttacacatttttaactttatgaccagcctaaatattctgggggaagtggggtataatatttaacgaatcatgattcagattgtaccattacatgtttcagtgcagcatggttactaacgctatgtcagactaatattaaaatcagaaaatttaaatgctggtgctggtcagactttttttgttagattctctcatttaaaaaaaatactgtttgtttaaagcatgcataaaaatttatgtattgaaatatacttaaaaattcaagatgcttcccatttgtgtaatatttacctggaggactcgtacttaggtgtcttaacgtgaattgagtctccaaggtctccatgtgaaacaagcaaaaagagaattatctgtaatgttgtaatttgtacctaagttttttaatgagtgaaatttgcattataaactttttccattcataaatacataagtgaaccaaaggtttttgtcctttccttcactgatttgctttaaaaaaaataaaagataatgatttattgcagaattatgattctattttctcaatatgttaacttggaaaaaaattttagccttatcttaatctgtcccaacagcaatgtgacggatttttgcagattcaaaatctgcaatggttatttacaagtcaatctactgaattccttttttaaataatcttttgaaactaagaaaatgtgtcaaattgtgtgcattcattctgtaggtaaaattcttaaggattgccatgtcagtccttcagttgtacagtgaactgttgtacactggttcaatgaaaggaagttaaaagtaccttttacatattgtaaaagtggatacagttgatttgtgagtaggcactctttaatccattacctggcactagcaacattagaattttaaaataaaataattgggaaagaaggtgggtcatgtattaatcagtgaacagagatttacctaaccaacagacttggattgtcttttgacataatcaaaatgcaacacatgcactttgtgtgtctcctcttaattgaagggagggctgagggatgttttctcttcttgtcttgtgtataattctctattgcttaggatattaaagtagagcactcaagtgtgggtttctgtgttattgaggatttgtttggaattcaaattacagttatgtactggatgctacagacttataacagcatagtgaatggtaagactagtgcaaaacagttatttctgaaaattaaagaccattattgctaccaaatcaatgtgactatttcatatgcattttgcctttgttaattttaaacaaacaaagtatcattagtgatcagctagctaccttctactttccatttttcaagtggattgttctcttaatttgtatataacctgttgtctaaattttatgtacagtcttttataataaaccattctcctatatgaaattttggatactgttaaaatataactcatgtggacttcaatgcagacttcacatttttctgacctttactcctacggtaaatcaagacaaaccatttgaattttaacattggttatttatttgtgtaatggccttacatgtggatattaacagtgtaaacaataccacatataaccatcaagataccttgattataatttataggactagaatgacagattcaggtggtttattaattacatttaaaaagttttctgaaaaaacttttgcaataaaaaaaaataaattgcccatcaa

SEQ ID NO: 156380 - DNA, 3576 bp, Artificial Sequence
  derived and/or modified sequence
gctcggagcctcggcggaccttgctgcctctgtctctttaacgcgagaggaagcgatgcagaggggtggaaaatggcagagctgcagatgttactagaggaggagatcccgtctggcaagagggcgctgatcgagagttaccagaacctgactcgggtggcagactactgtgaaaacaactacatacaggctacagacaagagaaaagctttagaggagaccaaagcctatacaacccaatctctagctagtgttgcttatcaaataaatgcattggccaacaatgtactccagttgctggatatccaagcctctcagcttcggagaatggagtcttccatcaatcatatctcacagactgtggatattcataaggagaaagtggcacgaagagagattggtattttgacaacaaataagaatacatcaagaactcacaaaataatagcacctgcgaatatggagcgccctgtaaggtatattcggaaacctatcgattacacagttctggatgatgtgggccatggtgtcaagtggctaaaagccaagcatggaaataaccagcctgcaagaactggcacactgtcgagaacaaatcctcctactcagaaaccgccaagtcctcccatgtcaggccggggaacactgggacggaatactccttataaaaccctggaacctgttaaacccccaacagttcctaatgactatatgaccagtcctgctaggcttggaagtcagcatagtccaggcaggacagcatctttaaatcagagaccaaggacacacagtggaagtagtggaggaagtggaagtcgagaaaacagtggtagcagtagtattggcattcccattgctgtgcctacaccttcgccacccactattggaccagaaaacatttctgtccctcctccttctggagctccaccagcaccacctctggcaccacttctcccagtgagcactgtgatagcagccccgggctcagctcctggttcccagtatggcacaatgaccaggcagatatctcgacacaactctactacttcttcgacatcttctggtggatacagacgaactccctctgtgactgctcaattttctgctcagcctcatgttaatggaggtccactttattctcaaaattcaatttctattgctccaccccctccccctatgcctcagttgactccacagatacctctcacaggcttcgtggccagggtgcaggaaaacattgctgatagtccaactccaccgccaccacctccaccagatgacattcccatgtttgatgactctccacctcccccaccaccaccaccagtggattatgaagatgaggaggctgcagtagttcagtataatgatccatatgcagatggggatcctgcttgggcccccaagaattatattgagaaagttgttgcaatatatgattatacaaaagacaaggatgatgagctgtcatttatggagggtgcaatcatttatgttataaagaagaatgatgatggctggtatgaaggagtctgcaatcgagtgactggtctgttccctgggaactatgttgaatcaatcatgcactatactgattaatttttttttttcttttgaagtagattcttattactcagtcatactgtgggactattatggttaacagaactgtcttaatatgttttaaaatgtgcccatattttcagaacatgctgttttattggtaaattgaatgtctacctgtaagcataaatctttgaggcagtttatgtattgctgaatagcaatttatacaagaagctgtccataactgattatgcttatgtacttacttacacatttttaactttatgaccagcctaaatattctgggggaagtggggtataatatttaacgaatcatgattcagattgtaccattacatgtttcagtgcagcatggttactaacgctatgtcagactaatattaaaatcagaaaatttaaatgctggtgctggtcagactttttttgttagattctctcatttaaaaaaaatactgtttgtttaaagcatgcataaaaatttatgtattgaaatatacttaaaaattcaagatgcttcccatttgtgtaatatttacctggaggactcgtacttaggtgtcttaacgtgaattgagtctccaaggtctccatgtgaaacaagcaaaaagagaattatctgtaatgttgtaatttgtacctaagttttttaatgagtgaaatttgcattataaactttttccattcataaatacataagtgaaccaaaggtttttgtcctttccttcactgatttgctttaaaaaaaataaaagataatgatttattgcagaattatgattctattttctcaatatgttaacttggaaaaaaattttagccttatcttaatctgtcccaacagcaatgtgacggatttttgcagattcaaaatctgcaatggttatttacaagtcaatctactgaattccttttttaaataatcttttgaaactaagaaaatgtgtcaaattgtgtgcattcattctgtaggtaaaattcttaaggattgccatgtcagtccttcagttgtacagtgaactgttgtacactggttcaatgaaaggaagttaaaagtaccttttacatattgtaaaagtggatacagttgatttgtgagtaggcactctttaatccattacctggcactagcaacattagaattttaaaataaaataattgggaaagaaggtgggtcatgtattaatcagtgaacagagatttacctaaccaacagacttggattgtcttttgacataatcaaaatgcaacacatgcactttgtgtgtctcctcttaattgaagggagggctgagggatgttttctcttcttgtcttgtgtataattctctattgcttaggatattaaagtagagcactcaagtgtgggtttctgtgttattgaggatttgtttggaattcaaattacagttatgtactggatgctacagacttataacagcatagtgaatggtaagactagtgcaaaacagttatttctgaaaattaaagaccattattgctaccaaatcaatgtgactatttcatatgcattttgcctttgttaattttaaacaaacaaagtatcattagtgatcagctagctaccttctactttccatttttcaagtggattgttctcttaatttgtatataacctgttgtctaaattttatgtacagtcttttataataaaccattctcctatatgaaattttggatactgttaaaatataactcatgtggacttcaatgcagacttcacatttttctgacctttactcctacggtaaatcaagacaaaccatttgaattttaacattggttatttatttgtgtaatggccttacatgtggatattaacagtgtaaacaataccacatataaccatcaagataccttgattataatttataggactagaatgacagattcaggtggtttattaattacatttaaaaagttttctgaaaaaacttttgcaataaaaaaaaataaattgcccatcaataa

SEQ ID NO: 156381 - DNA, 1530 bp, Artificial Sequence
  derived and/or modified sequence
atggccgagctgcagatgctgctggaggaggagatccccagcggcaagagagccctgatcgagagctaccagaacctgaccagagtggccgactactgcgagaacaactacatccaggccaccgacaagagaaaggccctggaggagaccaaggcctacaccacccagagcctggccagcgtggcctaccagatcaacgccctggccaacaacgtgctgcagctgctggacatccaggccagccagctgagaagaatggagagcagcatcaaccacatcagccagaccgtggacatccacaaggagaaggtggccagaagagagatcggcatcctgaccaccaacaagaacaccagcagaacccacaagatcatcgcccccgccaacatggagagacccgtgagatacatcagaaagcccatcgactacaccgtgctggacgacgtgggccacggcgtgaagaagtggcacaagatcatccacggcaacaaccagcccgccagaaccggcaccctgagcagaaccaacccccccacccagaagccccccagcccccccatgagcggcagaggcaccctgggcagaaacaccccctacaagaccctggagcccgtgaagccccccaccgtgcccaacgactacatgaccagccccgccagactgggcagccagcacagccccggcagaaccgccagcctgaaccagagacccagaacccacagcggcagcagcggcggcagcggcagcagagagaacagcggcagcagcagcatcggcatccccatcgccgtgcccacccccagcccccccaccatcggccccgagaacatcagcgtgcccccccccagcggcgccccccccgccccccccctggcccccctgctgcccgtgagcaccgtgatcgccgcccccggcagcgcccccggcagccagtacggcaccatgaccagacagatcagcagacacaacagcaccaccagcagcaccagcagcggcggctacagaagaacccccagcgtgaccgcccagttcagcgcccagccccacgtgaacggcggccccctgtacagccagaacagcatcagcatcgcccccccccccccccccatgccccagctgaccccccagatccccctgaccggcttcgtggccagagtgcaggagaacatcgccgacagccccacccccccccccccccccccccccgacgacatccccatgttcgacgacagcccccccccccccccccccccccccgtggactacgaggacgaggaggccgccgtggtgcagtacaacgacccctacgccgacggcgaccccgcctgggcccccaagaactacatcgagaaggtggtggccatctacgactacaccaaggacaaggacgacgagctgagcttcatggagggcgccatcatctacgtgatcaagaagaacgacgacggctggtacgagggcgtgtgcaacagagtgaccggcctgttccccggcaactacgtggagagcatcatgcactacaccgactag

SEQ ID NO: 156382 - DNA, 1527 bp, Artificial Sequence
  derived and/or modified sequence
atggccgagctgcagatgctgctggaggaggagatccccagcggcaagagagccctgatcgagagctaccagaacctgaccagagtggccgactactgcgagaacaactacatccaggccaccgacaagagaaaggccctggaggagaccaaggcctacaccacccagagcctggccagcgtggcctaccagatcaacgccctggccaacaacgtgctgcagctgctggacatccaggccagccagctgagaagaatggagagcagcatcaaccacatcagccagaccgtggacatccacaaggagaaggtggccagaagagagatcggcatcctgaccaccaacaagaacaccagcagaacccacaagatcatcgcccccgccaacatggagagacccgtgagatacatcagaaagcccatcgactacaccgtgctggacgacgtgggccacggcgtgaagtggctgaaggccaagcacggcaacaaccagcccgccagaaccggcaccctgagcagaaccaacccccccacccagaagccccccagcccccccatgagcggcagaggcaccctgggcagaaacaccccctacaagaccctggagcccgtgaagccccccaccgtgcccaacgactacatgaccagccccgccagactgggcagccagcacagccccggcagaaccgccagcctgaaccagagacccagaacccacagcggcagcagcggcggcagcggcagcagagagaacagcggcagcagcagcatcggcatccccatcgccgtgcccacccccagcccccccaccatcggccccgagaacatcagcgtgcccccccccagcggcgccccccccgccccccccctggcccccctgctgcccgtgagcaccgtgatcgccgcccccggcagcgcccccggcagccagtacggcaccatgaccagacagatcagcagacacaacagcaccaccagcagcaccagcagcggcggctacagaagaacccccagcgtgaccgcccagttcagcgcccagccccacgtgaacggcggccccctgtacagccagaacagcatcagcatcgcccccccccccccccccatgccccagctgaccccccagatccccctgaccggcttcgtggccagagtgcaggagaacatcgccgacagccccacccccccccccccccccccccccgacgacatccccatgttcgacgacagcccccccccccccccccccccccccgtggactacgaggacgaggaggccgccgtggtgcagtacaacgacccctacgccgacggcgaccccgcctgggcccccaagaactacatcgagaaggtggtggccatctacgactacaccaaggacaaggacgacgagctgagcttcatggagggcgccatcatctacgtgatcaagaagaacgacgacggctggtacgagggcgtgtgcaacagagtgaccggcctgttccccggcaactacgtggagagcatcatgcactacaccgactag

SEQ ID NO: 156383 - protein, 50 aa, Artificial Sequence
  derived and/or modified sequence
METTNGTETWYESLHAVLKALNATLHSNLLCRPGPGLGPDNQTEERRASL

SEQ ID NO: 156384 - protein, 53 aa, Artificial Sequence
  derived and/or modified sequence
METTNGTETWYESLHAVLKALNATLHSNLLCRPGPGLGPDNQTEERRASLPGR

SEQ ID NO: 156385 - DNA, 312 bp, Artificial Sequence
  derived and/or modified sequence
atggagacaactaatggcactgagacatggtatgagtctcttcacgcagtgctgaaggcgctcaacgccactttgcatagtaacctcttgtgccggcccgggccaggactaggccctgataatcaaacagaagaaagaagggccagtcttccaggccgtgatgacaacagctacatgtacattctcttcgtaatgttcttgtttgccgtgactgtgggttctctaatcctggggtataccagatcacgcaaggtggataagcgaagcgacccctaccatgtatacatcaagaacagagttagtatgatctag

SEQ ID NO: 156386 - DNA, 312 bp, Artificial Sequence
  derived and/or modified sequence
atggaaaccacaaacggaactgagacttggtacgaatccctacacgctgtgctgaaggctctcaacgccactctccattctaatttactatgccggcccggccctggactcggacctgacaaccaaactgaggagagaagggcctccctgccaggccgagatgacaactcatatatgtatatcctctttgtgatgtttcttttcgccgtgacagttggatcgctgatccttgggtacacaagatctcgaaaggtggacaagcgctcagatccgtaccacgtgtacataaaaaacagggtgagcatgatctag

SEQ ID NO: 156387 - DNA, 39 bp, Artificial Sequence
  derived and/or modified sequence
atggaaacaacaaacgggactgagacttggtacgaatag

SEQ ID NO: 156388 - DNA, 153 bp, Artificial Sequence
  derived and/or modified sequence
atggaaaccaccaatggcacggaaacctggtacgaaagcttacatgcagtgctcaaagcactgaacgctacactccatagtaatctcctctgcagaccggggcccggactcggacctgataatcagacggaagaaaggcgggcatccctgtag

SEQ ID NO: 156389 - DNA, 162 bp, Artificial Sequence
  derived and/or modified sequence
atggagaccaccaatggaactgaaacctggtatgagtcccttcatgccgtgcttaaagccctcaatgccacactacactctaacttgctctgccgtcccggcccaggtttgggacctgacaatcaaacagaggagagacgtgccagcctccctgggcgatag

SEQ ID NO: 156390 - DNA, 300 bp, Artificial Sequence
  derived and/or modified sequence
atggagactactaatggcacagaaacgtggtacgagtccctgcacgccgtgctgaaggccctaaacgcgacactgcactctaacctgctgtgtcgacccggacctggtctggggccagataaccaaacggaagaacgacgcgcaagcctgcctggccgggacgacaacagctacatgtatatcctgttcgtgatgttccttttcgccgtcacagtggggtctctgattctggggtataccaggagccgaaaggtggacaagcggtctgacccgtatcatgtctatattaagaatagatag

SEQ ID NO: 156391 - DNA, 312 bp, Artificial Sequence
  derived and/or modified sequence
atggagaccaccaatggaacagagacctggtatgagagcctgcatgctgtgctgaaggccctgaatgccaccctgcacagcaacctgctgtgcaggcctggccctggcctgggccctgacaaccagacagaggagcggcgggccagcctgcccggcagagatgacaacagctacatgtacatcctgtttgtgatgttcctgtttgctgtgacagtgggcagcctcatcctgggctacaccaggagcaggaaggtggacaagagaagtgacccctaccacgtgtacatcaagaacagagtgtccatgatctag

SEQ ID NO: 156392 - DNA, 39 bp, Artificial Sequence
  derived and/or modified sequence
atggagaccaccaatggaacagagacctggtatgaatag

SEQ ID NO: 156393 - DNA, 153 bp, Artificial Sequence
  derived and/or modified sequence
atggagaccaccaatggaacagagacctggtatgagagcctgcatgctgtgctgaaggccctgaatgccaccctgcacagcaacctgctgtgcaggcctggccctggcctgggccctgacaaccagacagaggagcggcgggccagcctgtag

SEQ ID NO: 156394 - DNA, 162 bp, Artificial Sequence
  derived and/or modified sequence
atggagaccaccaatggaacagagacctggtatgagagcctgcatgctgtgctgaaggccctgaatgccaccctgcacagcaacctgctgtgcaggcctggccctggcctgggccctgacaaccagacagaggagcggcgggccagcctgcctggaagatag

SEQ ID NO: 156395 - DNA, 300 bp, Artificial Sequence
  derived and/or modified sequence
atggagaccaccaatggaacagagacctggtatgagagcctgcatgctgtgctgaaggccctgaatgccaccctgcacagcaacctgctgtgcaggcctggccctggcctgggccctgacaaccagacagaggagcggcgggccagcctgcccggcagagatgacaacagctacatgtacatcctgtttgtgatgttcctgtttgctgtgacagtgggcagcctcatcctgggctacaccaggagcaggaaggtggacaagagaagtgacccctaccacgtgtacatcaagaacagatag

SEQ ID NO: 156396 - DNA, 312 bp, Artificial Sequence
  derived and/or modified sequence
atggagaccaccaacggcaccgagacctggtacgagagcctgcacgcagttctgaaggctcttaacgctactctgcattctaatctgctgtgcaggcccggaccaggcctgggcccagacaaccagaccgaagagcggcgagccagcctacccggaagagacgacaatagctatatgtacatcttgtttgtcatgttcctcttcgcagtcacagtaggatcattaattctcggctacacccgctcacggaaggtggataaacggtccgatccttatcacgtgtatatcaagaacagagttagcatgatatag

SEQ ID NO: 156397 - DNA, 312 bp, Artificial Sequence
  derived and/or modified sequence
atggagaccaccaacggcaccgagacctggtacgagagcctgcacgccgtgctgaaggctctcaacgccacgctccattcaaacctgctctgccggcccggcccaggcctgggacctgataatcaaacagaggaacgacgggcatcgctgcctggtagggatgataattcctatatgtatatcctgtttgtcatgttcctgtttgcggtcaccgtggggagcctgattttgggatatacccgtagccggaaagtggataagcgctctgatccttaccacgtatatataaaaaacagagtgagcatgatttag

SEQ ID NO: 156398 - DNA, 153 bp, Artificial Sequence
  derived and/or modified sequence
atggagaccaccaacggcaccgagacctggtacgagagcctgcacgcggtcctgaaagcgctgaatgccactctccacagcaacctgctttgtcgccccgggcccggcctcgggcctgataatcagacggaagagcgcagggccagtctgtag

SEQ ID NO: 156399 - DNA, 162 bp, Artificial Sequence
  derived and/or modified sequence
atggagaccaccaacggcaccgagacctggtacgagagcctgcacgccgtgttgaaggccctcaatgccacactgcactcaaacctcctctgtaggccaggaccagggctgggacctgataaccagactgaggaaaggcgagccagtttacccgggagatag

SEQ ID NO: 156400 - DNA, 300 bp, Artificial Sequence
  derived and/or modified sequence
atggagaccaccaacggcaccgagacctggtacgagagcctgcacgcggtcctgaaggcgctcaatgcaaccctccacagcaatttattatgccggcccggccccggccttggccccgacaaccagacggaggaaagacgcgcaagcctgcctggcagagacgacaacagctatatgtatattcttttcgtcatgttcctcttcgcagtgaccgtgggtagtttgatcttagggtatactaggagcaggaaagttgataagaggagcgatccttaccacgtgtacattaagaatagatag

SEQ ID NO: 156401 - DNA, 312 bp, Artificial Sequence
  derived and/or modified sequence
atggagacaacgaacggcacagaaacctggtatgagagccttcacgccgtactaaaagctttgaacgccacattgcatagtaatcttctctgtcggccaggcccagggctggggcctgacaaccaaacagaagaacgccgtgcaagcctccctggcagggacgacaactcatacatgtacatactgttcgttatgttcctctttgccgtgacggttgggtccctgatcctaggctatacgagatcacgcaaggtggataaacggtcagatccctaccatgtgtacatcaaaaatcgtgtcagtatgatctag

SEQ ID NO: 156402 - DNA, 312 bp, Artificial Sequence
  derived and/or modified sequence
atggaaacgactaatggtacagagacttggtatgagtccctccacgcagtgctgaaggccctgaacgctacgttacattctaacctgctatgccgacctggtcctggcctggggcctgacaatcagaccgaagaaagacgggcatcgctgcctggacgggacgataactcatatatgtatattctgttcgttatgtttctcttcgccgtcactgtgggcagtctgatcctgggctacacaagatcccggaaagtcgataaacggagcgacccttaccatgtgtacatcaaaaacagggtcagtatgatctag

SEQ ID NO: 156403 - DNA, 39 bp, Artificial Sequence
  derived and/or modified sequence
atggagaccaccaacgggaccgaaacatggtatgagtag

SEQ ID NO: 156404 - DNA, 153 bp, Artificial Sequence
  derived and/or modified sequence
atggaaaccacaaacggcacagaaacttggtatgagagcctgcatgccgttttgaaggcgctgaacgccactctgcatagtaaccttctgtgcagaccaggacccggactaggaccagataaccagactgaggagagacgagctagtctctag

SEQ ID NO: 156405 - DNA, 162 bp, Artificial Sequence
  derived and/or modified sequence
atggaaactaccaatgggacagagacctggtacgagagtctgcacgcggtcctcaaagccctgaacgctactcttcacagcaacctactgtgtcgtcctgggcctgggctcgggcctgacaatcaaaccgaagagcgacgcgctagtctacctgggagatag

SEQ ID NO: 156406 - DNA, 300 bp, Artificial Sequence
  derived and/or modified sequence
atggagaccaccaacggcaccgaaacgtggtatgagagtcttcacgccgtacttaaagccctgaacgcaactctgcattccaatctactttgtagaccagggcctgggttaggcccagataatcagacagaggagagacgggcatctctgcccggacgagatgacaacagctatatgtacatcctgttcgtgatgtttctctttgccgttaccgtgggctctctcatactcggttacacccgaagccggaaagtcgacaagaggagtgacccataccatgtctacatcaaaaatcgctag

SEQ ID NO: 156407 - DNA, 312 bp, Artificial Sequence
  derived and/or modified sequence
atggagaccaccaacggcaccgagacctggtacgagagcctgcacgccgtgctgaaggccctgaacgccaccctgcacagcaacctgctgtgcagacccggccccggcctgggccccgacaaccagaccgaggagagaagagccagcctgcccggcagagacgacaacagctacatgtacatcctgttcgtgatgttcctgttcgccgtgaccgtgggcagcctgatcctgggctacaccagaagcagaaaggtggacaagagaagcgacccctaccacgtgtacatcaagaacagagtgagcatgatctag

SEQ ID NO: 156408 - DNA, 39 bp, Artificial Sequence
  derived and/or modified sequence
atggagaccaccaacggcaccgagacctggtacgagtag

SEQ ID NO: 156409 - DNA, 153 bp, Artificial Sequence
  derived and/or modified sequence
atggagaccaccaacggcaccgagacctggtacgagagcctgcacgccgtgctgaaggccctgaacgccaccctgcacagcaacctgctgtgcagacccggccccggcctgggccccgacaaccagaccgaggagagaagagccagcctgtag

SEQ ID NO: 156410 - DNA, 162 bp, Artificial Sequence
  derived and/or modified sequence
atggagaccaccaacggcaccgagacctggtacgagagcctgcacgccgtgctgaaggccctgaacgccaccctgcacagcaacctgctgtgcagacccggccccggcctgggccccgacaaccagaccgaggagagaagagccagcctgcccggcagatag

SEQ ID NO: 156411 - DNA, 300 bp, Artificial Sequence
  derived and/or modified sequence
atggagaccaccaacggcaccgagacctggtacgagagcctgcacgccgtgctgaaggccctgaacgccaccctgcacagcaacctgctgtgcagacccggccccggcctgggccccgacaaccagaccgaggagagaagagccagcctgcccggcagagacgacaacagctacatgtacatcctgttcgtgatgttcctgttcgccgtgaccgtgggcagcctgatcctgggctacaccagaagcagaaaggtggacaagagaagcgacccctaccacgtgtacatcaagaacagatag

SEQ ID NO: 156412 - protein, 575 aa, Artificial Sequence
  derived and/or modified sequence
MNGPALQPSSPSSAPSASPAAAPRGWSEFCELHAVAAARELARQYWLFAREHPQHAPLRAELVSLQFTDLFQRYFCREVRDGRAPGRDYRDTGRGPPAKAEASPEPGPGPAAPGLPKARSSEELAPPRPPGPCSFQHFRRSLRHIFRRRSAGELPAAHTAAAPGTPGEAAETPARPGLAKKFLPWSLAREPPPEALKEAVLRYSLADEASMDSGARWQRGRLALRRAPGPDGPDRVLELFDPPKSSRPKLQAACSSIQEVRWCTRLEMPDNLYTFVLKVKDRTDIIFEVGDEQQLNSWMAELSECTGRGLESTEAEMHIPSALEPSTSSSPRGSTDSLNQGASPGGLLDPACQKTDHFLSCYPWFHGPISRVKAAQLVQLQGPDAHGVFLVRQSETRRGEYVLTFNFQGIAKHLRLSLTERGQCRVQHLHFPSVVDMLHHFQRSPIPLECGAACDVRLSSYVVVVSQPPGSCNTVLFPFSLPHWDSESLPHWGSELGLPHLSSSGCPRGLSPEGLPGRSSPPEQIFHLVPSPEELANSLQHLEHEPVNRARDSDYEMDSSSRSHLRAIDNQYTPL

SEQ ID NO: 156413 - DNA, 1728 bp, Artificial Sequence
  derived and/or modified sequence
atgaacgggccagctctgcagccgagctccccctcctccgccccaagcgccagtcctgctgccgcccccaggggatggagtgagttctgtgagctgcacgcagtcgccgctgcccgcgagcttgcccgacagtattggttgttcgccagggaacatccccagcatgcccccctgcgtgcagagttggtgtctttgcagttcacagacctatttcagcggtacttctgcagggaggtgagagatgggcgtgcaccaggccgcgactacagggacacaggaaggggccctccagctaaagccgaagcgagtccagaaccaggaccagggccggccgcccctgggttaccaaaggcacgcagcagcgaggaactggccccgccccgcccccccggcccgtgcagctttcagcacttccgacgatctcttagacacatctttagacggcgctctgcaggagaactccccgctgcacacacagccgctgccccgggaactccgggtgaggccgcggaaacaccagcacgcccggggttggccaaaaagtttctgccgtggtccctcgcccgggagcccccacccgaggccctgaaagaggctgtcttgcggtatagcctcgctgacgaagctagtatggattcaggggctcgttggcagcgcggccgactcgccctccgcagagcacccgggccggacggtcctgaccgagtcctggaactattcgacccccctaagtcatcgagacctaagctgcaggcggcctgtagctccattcaggaggtgcggtggtgcacgcggttggaaatgcccgataacctctatacattcgtgctgaaggttaaagacagaacggacatcatatttgaggtgggcgatgaacaacaattgaacagctggatggccgagttgagcgaatgtacagggaggggcctcgaaagcaccgaggctgagatgcatatcccatcagccctggaacccagtacatccagctcccccagaggcagtaccgactctctgaatcaaggagcaagtccaggtggacttctcgatcccgcatgccagaagaccgaccacttcctgtcctgctatccttggtttcatgggccaatttcacgtgtcaaggctgcccagctggttcagctgcaaggcccagatgcccacggagtgttcctggtccgacagtcagaaactagacgtggtgaatacgtgctcactttcaattttcagggtattgctaagcatctcaggttgagccttactgaacgtggtcagtgcagggtgcagcacctacactttccaagtgtcgtcgatatgctgcaccacttccagcgctcacccatacccttggaatgtggggcagcctgtgacgtgcggctatcgtcttatgtggtagtcgtgtctcaaccacccggctcctgcaatacagtgctgtttccgttctctctcccccattgggatagtgagtctttgccccattgggggtcagaattgggcctcccgcacttgtccagtagcggttgcccccggggactgtcacccgaggggctgccagggcggtcttcaccacccgagcagatcttccatctagtcccgtcacccgaagaactggccaacagtctacagcacctggaacatgagcctgtcaatcgggctagagactccgattacgagatggattcttcttctaggtcacatcttcgggccattgataatcagtatactcctctttag

SEQ ID NO: 156414 - DNA, 1728 bp, Artificial Sequence
  derived and/or modified sequence
atgaatggacctgccctgcagcccagcagccccagcagcgcccccagcgccagccctgctgctgccccccggggctggagcgagttctgtgagctgcatgctgtggccgccgcccgggagctggcccggcagtactggctgtttgcccgggagcacccccagcacgcccccctgcgggcagagctggtgtccctgcagttcacagacctcttccagcgctacttctgccgggaggtgagagatggccgggcccctggccgggactacagagacaccggccggggccccccagccaaggccgaggccagccctgagcccggccctggccctgctgcccctggcctgcccaaggcccggagcagcgaggagctggccccacccaggcctcctggcccctgcagcttccagcacttcagaagaagcctgcggcacatcttcagaagaagatctgctggggagctgcctgctgcccacacagctgctgcccctggcaccccaggagaggccgctgagaccccagcccggcccggcctggccaagaagttcctgccctggagcctggcccgggagcccccacctgaggccctgaaggaggccgtgctgcgctacagcctggctgatgaggcctccatggattctggggcccgctggcagaggggccgcctggccctgcggcgggcccctggcccagatggccctgacagagtgctggagctgtttgacccccccaagagcagccggcccaagctgcaggccgcctgcagcagcatccaggaggtgcgctggtgcacccggctggagatgccagacaacctgtacacctttgtgctgaaggtgaaggacagaacagacatcatctttgaggtgggagatgagcagcagctgaacagctggatggccgagctgtctgagtgcaccggccggggcctggagagcacagaagctgagatgcacatccccagcgccctggagcccagcaccagcagcagcccccggggcagcacagacagcctgaaccagggcgccagccctgggggcctgctggaccctgcctgccagaagacagaccacttcctgagctgctacccctggttccacggccccatcagccgggtgaaggccgcccagctggtgcagctgcagggcccagatgcccacggcgtcttcctggtgcggcagagcgagaccaggagaggagaatatgtgctgaccttcaacttccagggcatcgccaagcacctgcggctgagcctgacagagcggggccagtgccgggtgcagcacctgcacttccccagcgtggtggacatgctgcaccacttccagaggagccccatccccctggagtgtggggccgcctgtgatgtgcggctgagcagctatgtggtggtggtgtcccagcccccaggcagctgcaacacagtgctcttccccttcagcctgccccactgggacagcgagagcctgccccactggggcagcgagctgggcctgccccacctgagcagcagcggctgcccccggggcctgagccctgagggcctgcccggccgcagcagccccccagagcagatcttccacctggtgcccagccctgaggagctggccaacagcctgcagcacctggagcacgagcctgtgaacagagcccgggacagcgactatgagatggacagcagcagccgcagccacctgcgggccatcgacaaccagtacacccccctgtag

SEQ ID NO: 156415 - DNA, 1728 bp, Artificial Sequence
  derived and/or modified sequence
atgaacggccccgccctgcagcccagcagccccagcagcgcccccagtgcatcacccgctgccgcacctagagggtggagtgagttttgtgagctgcatgccgtggcagcagcgagggaacttgcacgccagtactggctgttcgctcgcgaacatcctcagcacgcccccctcagggctgaactcgtgagtttgcaattcaccgatttgttccagaggtacttttgtcgggaggtacgtgacgggagagctccaggaagggactaccgagacaccggcagggggccaccggccaaagccgaagcatctcctgaacccggaccaggccccgctgcgccgggactgcccaaagcgcgttcctcggaagaactggctccaccaagacccccgggtccctgctcttttcagcacttccggcggtccctgagacacatcttccggaggcgctcagctggcgaactgcctgccgcccacaccgccgcggccccagggactccaggcgaggcagccgagaccccagcaagaccaggtttggcgaaaaagtttctgccgtggtcgctggccagggagccaccgcctgaggcattgaaggaggcggttctgcggtactcgcttgctgatgaagcctcgatggactctggcgcccgatggcagcgtggtcgcctcgctctgcgtcgcgcccccggccctgacggtccagaccgggtgcttgagttgtttgatccccctaagtcttctcgccccaagctccaggctgcctgttcatctatccaggaggtgagatggtgtacaaggcttgagatgccagacaacttatacactttcgtgctcaaagtaaaagataggacagacatcatttttgaggttggagatgaacagcagctcaactcttggatggcggaactttccgagtgtactggtaggggtctcgagtccactgaagccgaaatgcatattcccagtgcccttgagccgagcacttcatcgtctccacgtggcagcacggatagtctgaatcagggagccagtccaggcggcctgctggatcccgcatgtcaaaaaacagatcattttctgtcttgctacccatggtttcacggccccatttccagagtgaaggctgctcagttagttcagttgcaaggccccgacgcccacggcgtgttcctggtcagacaaagcgaaactcggcggggcgaatatgtgctgacttttaactttcagggcatcgcgaaacacttgcgcctatctctcacggagcggggccaatgcagagtgcagcacctgcacttcccaagcgtggtggatatgctccatcacttccaacggagtccaattcctctggaatgcggcgcggcctgcgatgtccggctctcatcctacgtggtcgtggtgtctcaacctccaggatcatgtaataccgtgctctttccattttccctgccgcactgggactccgaatccctaccacattggggctctgagcttggcttaccgcacctctcatcttccggatgcccccggggcctcagtcccgaaggtcttccgggccggtcctctcctccagagcaaatctttcacctggtgccctccccggaggaattggcaaatagccttcagcacttggaacatgagcccgtgaatcgagccagagacagtgactatgagatggactcgtcaagtcggagccatttacgcgcaatcgataaccagtataccccactttag

SEQ ID NO: 156416 - DNA, 1728 bp, Artificial Sequence
  derived and/or modified sequence
atgaacggcccagcactccagcctagctccccttccagtgccccaagcgccagcccagctgccgctccacgcggttggtcagagttctgtgaactccatgccgtagcagctgcaagagagctcgccagacagtactggctcttcgcaagagaacatcctcagcatgctccgttgagagccgaactggtgagcctgcaatttacggacttattccagcgctatttttgccgggaggtgcgcgacggccgagctcccggacgtgactacagggatacaggtagaggaccaccagccaaggctgaggccagcccagaacctggtcctggcccagccgctcctggcctgcccaaagcgaggtcaagcgaggaactggcccctccaaggcctccaggcccatgctcctttcagcatttcaggaggtctctgcgtcatatctttcgtcgcagatcagccggagagctacccgcagctcacaccgccgctgccccaggcacccctggtgaagccgctgagactcccgcacggcctgggcttgctaagaagttcctgccctggtccctcgcgcgagaacctccacctgaagccttgaaggaagcagtcctaagatactctctcgccgacgaagcctctatggatagtggtgcaagatggcagagaggcaggttagctttgaggcgagccccaggtcccgacggtcctgaccgtgttctcgagctcttcgacccccctaagtcctctcggccaaagctacaggcggcttgttccagcattcaggaagttcggtggtgtacccggctcgagatgcctgacaacttatatacttttgtccttaaagtgaaagacagaactgatatcatctttgaggttggcgacgagcagcagctaaactcgtggatggctgagctgtccgagtgcactgggagaggactggagtctactgaagcggagatgcacatcccatcagcactcgagcctagtacgtcctcatcacccagaggctccaccgatagcctcaaccagggagcgtcacctggcggactgctggatccagcctgtcagaagactgaccacttcctctcttgttacccatggttccacggcccaataagtagggtcaaggccgctcaactagtccaactgcaggggcctgacgctcacggtgtgtttctggtgagacaaagcgagactagacggggagaatatgttctgacgtttaactttcagggcattgcaaaacacctgaggttgtcactcaccgagcgcggacagtgtagagtgcagcaccttcatttcccatcagtggtcgacatgcttcaccatttccaaaggtcccctatccccttggagtgcggtgcagcctgtgatgttaggctttcctcatacgtggtggtcgtgtctcaaccccctggctcctgtaatacagttttgtttcccttttctctgccacattgggattctgaaagtctgccccactggggaagcgaactcgggcttccccacctttcaagttcggggtgtccacgcggactctcgcctgaaggcctacccggtaggtcatcacccccagagcagatatttcacctggtgcccagtcccgaagaacttgctaacagcctccagcacctggagcatgaaccagtgaacagagcacgcgattccgattacgagatggattcatcttcacggtcgcacctgagagccattgataaccagtataccccactctag

SEQ ID NO: 156417 - DNA, 5406 bp, Artificial Sequence
  derived and/or modified sequence
cccgggccaccgcctccgcccggctgcccgcccggactgtcgcggcccgcggtggcgacggcggccgctgcaaagtttccccggcggcggcggcccgggggcgcatcctcccgcaactgtcaagcgctggcggcggaaatgatgaggcgctggccattttccgagcccgggtttcctgcctgagccccgctcgagcgagccgcgagcgaggagccggcgggcgggagaggacgcgcccagggcgggggcccgcccgccccctcgggatttcgagggcccgggggcgcgcgacgccatgggccggccgggcccagagctcctgtctctcagcccggccgcaccacctgggtctccgccatgaacgggcctgccctgcagccctcctcgccctcttccgcgccctcagcctccccggcggcggccccgcggggctggagcgagttctgtgagttgcacgccgtagcggcggcccgggagctggcccgccagtactggctgttcgcccgggagcatccgcagcacgcgccgctgcgcgccgagctggtgtcgctgcagttcaccgacctcttccagcgctacttctgccgcgaggtgcgcgacggacgggcgccgggccgcgactaccgggacacaggccgtgggcccccagccaaggccgaggcgtccccggagccaggccccggccccgccgcccctggcctgcccaaggcccgcagctctgaggagctggccccgccgcggccgcccgggccctgctccttccagcactttcgccgcagcctccgccacatcttccgccgccgctcggccggggagctgccagcggcccacaccgctgccgcccccgggacccccggagaggctgctgagacccccgcccggcctggcctggccaagaagttcctgccctggagcctggcccgggagccgccacccgaggcgctgaaggaggcggtgctgcgctacagcctggccgacgaggcctccatggacagcggggcacgctggcagcgcgggaggctggcgctgcgccgggccccgggccccgatggccccgaccgcgtgctggagctcttcgacccacccaagagttcaaggcccaagctacaagcagcttgctccagcatccaggaggtccggtggtgcacacggcttgagatgcctgacaacctttacacctttgtgctgaaggtgaaggaccggacagacatcatctttgaggtgggagacgagcagcagctgaattcatggatggctgagctctcggagtgcacaggccgagggctggagagcacagaagcagagatgcatattccctcagccctagagcctagcacgtccagctccccaaggggcagcacagattcccttaaccaaggtgcttctcctggggggctgctggacccggcctgccagaagacggaccatttcctgtcctgctacccctggttccacggccccatctccagagtgaaagcagctcagctggttcagctgcagggccctgatgctcatggagtgttcctggtgcggcagagcgagacgcggcgtggggaatacgtgctcactttcaactttcaggggatagccaagcacctgcgcctgtcgctgacagagcggggccagtgccgtgtgcagcacctccactttccctcggtcgtggacatgctccaccacttccagcgctcgcccatcccactcgagtgcggcgccgcctgtgatgtccggctctccagctacgtggtagtcgtctcccaaccaccaggttcctgcaacacggtcctcttccctttctcccttcctcactgggattcagagtcccttcctcactggggttcagagttgggccttccccaccttagttcttctggctgtccccgggggctcagcccagagggtctcccagggcgatcctcaccccccgagcagatcttccacctggtgccttcgcccgaagaactggccaacagcctgcagcacctggagcatgagcctgtgaatcgagcccgggactcggactacgaaatggactcatcctcccggagccacctgcgggccatagacaatcagtacacacctctctgaccagtgaggaattccaggcctcaacagctgcccttgaggagcacaggcagaagtgtgaacttgtgaatgtaattgatctttccttccttccagagaaagatttaagggacactgttaactgctcgtgccagtttggaagtgacccttctattaggcctgttgaagggccctcctgtaggtttcatctatccacctggctttctccttattgtttacagatgtagttcttgttagaggatgccgctagctcctgcccggggtccctatgcccagtccccgttactcttagagaaaggagttggggtgagggccagagctggcagtggaaacttgttctctttttcactgacactgtcacagcggatgacagactttctacggggaggagggggggatcatcaggaagcccagaacactaacaagcggttctcccatctaccgtcagtccacatggcaggtctgctgtgtccacaccacagatgaccacatctaatcctgcttctactctcagctttaggacaaaagctctgtcagaggcacaagctgaaggtcaaaaatgatttaaaacattttacctcagactaatttctttaaaggattcaggttcaaaacttaaccactgcttatttcagtgcactgtttcaactaacacccatgctatttttgtagtcagaaacagctatgcaaaccctacctaatttacagtctgagccagcatgctggcttgtctactgcatcctcgggacagtcacctgccactgagtggccactgtccttcctaaatgtcaagaagtgaagtatgtcaccctttcagggaaattcaggcaattactgaaataggagggtggcaagaacagttctatcctggtgccttacgaataaaaaactggattctggtttacagcagctttacagtgatagttaaattaactggggctaggggaagagcaagcaaaaagggaagaaggactcctaggccctttctagtaaatccttcagcaacaaggctggcttggtgccctccaagcatctaatggcttattaaattatcccacaagtgggttttaggctccttttttgagccaaaatggaagctgggaatctggtgccataactaatgagaaactcctttaatagcccacaatcagtgttctgttctagctggctactgcttcactggattgagaatctatctatctccttgcacacatgggcacacacaatctccaccatccagggaggtcctgaagtcaaatctctatctatacaagtgatacaattcatagggggctggctcctcccagaacctgtctggaggctcagaaacgggggcagtgacagtggagtcagctgctcttgggtgccagcagagccattcagtacaacccccaggctcacagcagtggcttctaggaaactgggagtttagatcagctttacagatacatcgatcagaggctaaaatgaaacctcagcctaaaactcataggactgactgcctgggaggagggttaggtctgcttcttccacttatacttagtctctgtgctccaagaggtcaaatttttgcttctagaatttccttggggtctttcagagggtgggggaacaaacccctatgcacttttcttttttttttttttgagatggagtttctcttgtcaaccgggctggagtgcagtggtgcaatcttggctcactgcaacctccaccttcctggttcaagcgattctgcctcgacctctcaagtagctgggattacaagcaccagccaccatgcctggctaattttgtatttttagtagagacagggtttcaccatgttggccaggctggtctcgaatgtctgacctcaggtgatccacccgccttggcctcccaaagtgctgggattacaggcgcgagccaccgcgcccagcctacaccacttttagtaccaacactcttgggtgatttcatggaccctaaagcagacctgacactgatccagatttgcagtccatttttaaggacacctgtctttatttcctcaaagtcaagcagctttctctggaaaatgaatgctaattagtgtgaaccaaaagagtaagtaagagtctgaagtttttttaaaggagaaagcttattatggaaagtcactggtcctcccctccgcacaggaaaggtacccagtagataatgaaccaaattaagttccctccctccagccagaagttaaacatctgggatatgacgtcttcatgccaggggcactcatttcttagcagcctctctacatacatctctcaggtggtgccaagaggcacaccaggtagagcaaacttagcagctctgactaacaggctgcaaagtgcaagttcagattctgtggcagagatttggaaggcacccacctccagactgcttcccgtccaagttaccaggacagctcaaaaacatgctgacagaaaactcccatggctctaggaagaagtgacactaagccaacacctttctttatgtgggagcagaatcagctgatgaaggggtgggcagcagtgtggggcaggcaccccactggctgcagctagcccaccataggcacagcacatcccaccactctccttccagtcctgaccaggccccagccggcaacttctaccgagagccatggctcaacaccaaactggacagtagacatcatgatccctccagttagctctaattacagaccccaccagtacagcttgacagctcccggcaccatcccttccttcatctgacttattgaacttttacaaactaacagtcaccagcaccaaagaattaagtcaactaacctgccttgaattttagaccagcaatccatatggctttatctggtataaatcttctgcctttgatcatttctggaccgtaggaaaaaggaatagcaatcattaaaatcttgggccagagaacactatttttacataacagtttcttaacctaaagtcaaggccttggactcttccctgagggttgcctgagattccttcatgctttctattcaggactaagtcccttactgcaaatgtgttagctctaacatctcccacaagctagaggaacttgcgagtatattaacaaggacacatctgacatcctgtgtttggttagaatatacagcacattgtgataacataaagtggattcatcttgtatcattataggcagaaggtatttggcaaatttttatgtattgttttatgtactgtacaagtaacttattcttgaataatgcaaattttgctataatgtacaaattgctatatgtgaattaaaaagttttcagaatcttga

SEQ ID NO: 156418 - DNA, 1728 bp, Artificial Sequence
  derived and/or modified sequence
atgaacggccccgccctgcagcccagcagccccagcagcgcccccagcgccagccccgccgccgcccccagaggctggagcgagttctgcgagctgcacgccgtggccgccgccagagagctggccagacagtactggctgttcgccagagagcacccccagcacgcccccctgagagccgagctggtgagcctgcagttcaccgacctgttccagagatacttctgcagagaggtgagagacggcagagcccccggcagagactacagagacaccggcagaggcccccccgccaaggccgaggccagccccgagcccggccccggccccgccgcccccggcctgcccaaggccagaagcagcgaggagctggccccccccagaccccccggcccctgcagcttccagcacttcagaagaagcctgagacacatcttcagaagaagaagcgccggcgagctgcccgccgcccacaccgccgccgcccccggcacccccggcgaggccgccgagacccccgccagacccggcctggccaagaagttcctgccctggagcctggccagagagcccccccccgaggccctgaaggaggccgtgctgagatacagcctggccgacgaggccagcatggacagcggcgccagatggcagagaggcagactggccctgagaagagcccccggccccgacggccccgacagagtgctggagctgttcgacccccccaagagcagcagacccaagctgcaggccgcctgcagcagcatccaggaggtgagatggtgcaccagactggagatgcccgacaacctgtacaccttcgtgctgaaggtgaaggacagaaccgacatcatcttcgaggtgggcgacgagcagcagctgaacagctggatggccgagctgagcgagtgcaccggcagaggcctggagagcaccgaggccgagatgcacatccccagcgccctggagcccagcaccagcagcagccccagaggcagcaccgacagcctgaaccagggcgccagccccggcggcctgctggaccccgcctgccagaagaccgaccacttcctgagctgctacccctggttccacggccccatcagcagagtgaaggccgcccagctggtgcagctgcagggccccgacgcccacggcgtgttcctggtgagacagagcgagaccagaagaggcgagtacgtgctgaccttcaacttccagggcatcgccaagcacctgagactgagcctgaccgagagaggccagtgcagagtgcagcacctgcacttccccagcgtggtggacatgctgcaccacttccagagaagccccatccccctggagtgcggcgccgcctgcgacgtgagactgagcagctacgtggtggtggtgagccagccccccggcagctgcaacaccgtgctgttccccttcagcctgccccactgggacagcgagagcctgccccactggggcagcgagctgggcctgccccacctgagcagcagcggctgccccagaggcctgagccccgagggcctgcccggcagaagcagcccccccgagcagatcttccacctggtgcccagccccgaggagctggccaacagcctgcagcacctggagcacgagcccgtgaacagagccagagacagcgactacgagatggacagcagcagcagaagccacctgagagccatcgacaaccagtacacccccctgtag

SEQ ID NO: 156419 - DNA, 2169 bp, Artificial Sequence
  derived and/or modified sequence
atggagaaaaatgggaacaatcggaagctgagagtgtgtgtggctacatgcaaccgagctgattactcaaaactggcccccataatgttcggcatcaagaccgagcccgagttcttcgaactggacgtcgttgtactgggctcacatctgatcgatgactacgggaatacttaccgcatgattgaacaggacgattttgacattaacacgaggctgcataccattgtgaggggcgaggatgaagcagcaatggtggaaagcgttggccttgctctcgtgaagctgcctgacgttcttaaccgtctgaaacctgatataatgatcgtgcatggcgaccgttttgacgccttggctctcgccacaagtgcagcgctgatgaatatcagaatcctgcacattgagggaggtgaagtgagtgggaccattgatgatagcatacggcacgccattacaaagctggctcactaccacgtgtgttgtacacgcagcgctgaacagcatctgatcagtatgtgcgaagaccatgaccgcatcctgcttgcaggatgtccatcctatgataagttgctgagtgcaaagaacaaggactacatgtccatcatcagaatgtggctaggcgatgacgtgaagtccaaggattatattgtcgctctgcaacaccctgtgaccacagatatcaaacacagcattaaaatgttcgagcttaccctggatgctctgatctcttttaacaagcgtacgctagtcctgtttcccaacattgacgcaggatcaaaagaaatggtgagagtgatgagaaaaaaagggatcgagcatcacccgaatttccgagcagtgaaacatgtgccattcgaccagttcatccagctcgtcgcacatgctggttgtatgattgggaattcgagttgtggcgtgagggaagtgggtgcatttggaaccccggtgatcaatctgggaaccagacaaatcggcagggaaaccggagaaaatgtgctgcacgtgcgggatgccgacacacaggacaagatcctacaggctctgcacctgcagttcggaaaacagtacccttgcagcaagatctatggggacgggaacgccgtaccacgaattctcaagttcctgaaatcaatcgatctgcaggaaccactgcagaaaaaattctgtttcccacctgtcaaggagaacatcagccaggatatcgaccacatcctggagactttaagtgccctggcagtagatttgggcggaaccaacctgcgggtggccatcgtgtctatgaaaggggaaatcgtcaagaagtacacacagttcaatcccaaaacctatgaggaaaggattaacctgatcctacagatgtgcgtggaagcggccgccgaggcagtcaaactcaattgcaggatcctgggtgtgggaatctcaacagggggtcgcgtcaatccaagagaaggtatagtgctgcattcgactaagctgatccaggagtggaattccgtcgatctacgcaccccactcagcgacaccctacacctgcccgtgtgggtggacaatgatgggaactgtgctgctctcgccgaaagaaaattcggtcagggaaagggtttggaaaactttgtcacactgatcaccggtaccgggattggaggcgggattatccatcagcacgagctgattcacggcagctctttctgtgcagcggagctgggacacctcgtggtctctctcgacgggcctgattgcagctgtggaagtcacgggtgcatagaagcttatgccagtggaatggcattgcagcgggaggcaaaaaaacttcatgatgaggacctcctgctggtggagggaatgagtgttccgaaagacgaggctgtgggtgccctacacctgatccaggctgctaagcttgggaacgcaaaagcgcagagtatcctcagaactgctgggacagcgctggggctgggtgtggtcaatatcttgcatactatgaatccaagtctggttatcctatccggggttctcgcatcacattatatccatatagtaaaagatgtcatccgccagcaagctctgagttcggttcaggatgtggacgttgtggttagcgacctggtggaccctgctttactgggagctgcttccatggtgttggattacacaacacggaggatctactag

SEQ ID NO: 156420 - DNA, 2169 bp, Artificial Sequence
  derived and/or modified sequence
atggaaaaaaatggcaacaatcgtaaactgagagtctgtgtagcaacttgtaatagagccgactactctaaactggcaccaatcatgtttggcataaagaccgagccagagttctttgaactggacgtggtcgtgctgggaagccatctgatagacgattatggcaacacgtatcgcatgatcgagcaagacgactttgatattaacaccagactccacacaatcgtcaggggggaggacgaagcagcgatggtcgagtccgtcggactcgcactggtgaaactgcctgatgttctcaacagactgaaacccgatatcatgatagtgcatggagatcgattcgacgctctggcgctggcaacttccgcagccttgatgaatattagaatcttgcatattgagggaggcgaggtatccgggaccatcgatgattccattcgccacgccattacgaagctggctcactaccacgtgtgctgcaccaggtccgctgagcaacacctgatttctatgtgcgaggatcacgacaggatccttttggcgggatgcccgtcttacgataaattgctaagcgctaaaaacaaggactacatgagcattatacggatgtggctgggggacgacgtcaagtccaaggactacattgtggccctgcaacacccagttacaactgatatcaaacacagcataaagatgtttgaattgacactggacgcattaatatccttcaataagaggaccctggtcttgttcccgaatatcgatgcaggatccaaggaaatggtaagggttatgcgcaagaaaggaatcgagcatcatccaaattttcgggccgtgaaacatgttccctttgaccagttcatccaactggtagcgcatgccggatgcatgatcggaaatagtagctgcggtgtgagggaagtgggcgcttttggaaccccagtgataaatttgggaactcggcaaatcgggagagagacaggggagaatgtgctccatgtgcgcgacgccgacacacaggacaagattctacaggcgttgcatctacagttcgggaaacagtatccctgctctaaaatctacggcgatgggaatgccgtgccccggatattgaaattcctcaagtctatcgatctacaggagccactccagaagaaattctgtttcccgccggtcaaggagaatatttcacaggatatcgaccatattctggagaccctcagcgctctagccgtggatttaggcggcacaaacctgagagtagccatcgtatctatgaagggtgagattgtgaagaaatatacacaatttaatcctaagacttacgaggagagaattaatctcattttgcaaatgtgcgttgaagcggccgccgaggccgtgaagctcaactgtcgtatattgggtgttggaatttccaccggggggcgagttaaccctcgggagggcatagtgctccatagtacgaagctgatccaggaatggaattccgtggatttgcggacaccactgtccgatacactccacctgccggtatgggtcgacaatgatggcaattgtgcagccctggcagaaaggaaatttggccagggaaaagggttggagaacttcgtcaccctcataactggtaccgggatcggcgggggcatcattcaccagcatgagctgattcatggctccagcttctgcgcagccgagttgggacaccttgtggtttcgcttgatggccctgattgcagctgcggctcccatggatgcattgaagcctacgcgtctggcatggccctacagagggaagcaaagaagcttcacgatgaagatctcttgctcgtcgaagggatgagcgtgcctaaagacgaggcagtgggtgcgctgcatctgatccaggctgcgaagctcggcaacgctaaggctcaaagtattctgaggacagctgggactgctctgggtctgggagtagtcaatatcctgcacacaatgaaccccagtctggttattctctctggggttctcgcatctcattacatccacatcgtgaaagatgttattcgccaacaagctctcagctcagtccaagatgtagacgtcgtcgtgtctgaccttgttgaccccgcactactgggcgccgctagtatggtcctggattatactacaaggcgcatctattag

SEQ ID NO: 156421 - DNA, 2169 bp, Artificial Sequence
  derived and/or modified sequence
atggagaagaatggaaacaacaggaagctgcgggtgtgtgtggccacctgcaacagagctgactacagcaagctggcccccatcatgtttggcatcaagacagagcctgagttctttgagctggatgtggtggtgctgggcagccacctgattgatgattatggcaacacctacaggatgattgagcaggatgactttgacatcaacacccggctgcacaccatcgtgagaggagaagatgaggccgccatggtggagagcgtgggcctggccctggtgaagctgcctgatgtgctgaaccggctgaagccagacatcatgattgtgcacggggacagatttgatgccctggccctggccaccagcgctgccctgatgaacatccgcatcctgcacattgaaggaggagaggtgtctggcaccattgatgacagcatcagacatgccatcaccaagctggcccactaccacgtgtgctgcaccaggtctgctgagcagcacctgatctccatgtgtgaagatcatgaccgcatcctgctggccggctgccccagctatgacaagctgctgagcgccaagaacaaggactacatgagcatcatccgcatgtggctgggagatgatgtgaagagcaaggactacatcgtggccctgcagcaccctgtgaccacagacatcaagcacagcatcaagatgtttgagctgaccctggatgccctgatctccttcaacaagaggaccctggtgctcttccccaacattgatgctggcagcaaggagatggtgcgggtgatgaggaagaagggcatcgagcaccaccccaacttccgggctgtgaagcacgtgccctttgaccagttcatccagctggtggcccacgccggctgcatgattggcaacagcagctgtggggtgcgggaggtgggcgccttcggcacccctgtgatcaacctgggcacccggcagatcggccgggagactggagaaaatgtgctgcacgtgagagatgctgacacccaggacaagatcctgcaggccctgcacctgcagtttgggaagcagtacccctgcagcaagatctatggagatggaaatgctgtgccccgcatcctgaagttcctgaagagcattgacctgcaggagcccctgcagaagaagttctgcttcccccctgtgaaggagaacatcagccaggacatcgaccacatcctggagaccctgagcgccctggccgtggacctgggcggcaccaacctgcgggtggccatcgtgtccatgaagggggagatcgtgaagaagtacacccagttcaaccccaagacctatgaggagcgcatcaacctgatcctgcagatgtgtgtggaggccgctgctgaggccgtgaagctgaactgccgcatcctgggcgtgggcatcagcactggaggccgggtgaacccccgggagggcatcgtgctgcacagcaccaagctgatccaggagtggaacagcgtggacctgcggacccccctgagtgacaccctgcacctgcctgtgtgggtggacaatgatggcaactgtgccgccctggccgagaggaagtttggccagggcaagggcctggagaactttgtgaccctcatcaccggcaccggcatcggcggcggcatcatccaccagcacgagctgatccacggcagcagcttctgtgccgctgagctgggccacctggtggtgtccctggatggccctgactgcagctgtggcagccacggctgcatcgaggcctatgccagcggcatggccctgcagcgggaggccaagaagctgcatgatgaggacctgctgctggtggagggcatgtctgtgcccaaggatgaagctgtgggcgccctgcacctgatccaggccgccaagctgggcaatgccaaggcccagagcatcctgaggacagctggaacagccctgggcctgggcgtggtgaacatcctgcacaccatgaaccccagcctggtgatcctgagcggcgtgctggccagccactacatccacatcgtgaaggatgtgatccggcagcaggccctgagctctgtgcaggatgtggatgtggtggtgtctgacctggtggaccctgccctgctgggcgccgcctccatggtgctggactacaccacccggcgcatctactag

SEQ ID NO: 156422 - DNA, 2169 bp, Artificial Sequence
  derived and/or modified sequence
atggagaagaacggcaacaaccggaagctgcgggtgtgcgtggccacctgtaatcgcgcagattactccaagctggctccaatcatgttcggaatcaagaccgagcctgagttctttgaactcgatgtcgtggtcctgggatctcatctgattgatgattacggaaacacctaccggatgattgaacaggacgactttgacattaatacacggctgcataccatcgtgcggggggaagatgaggccgccatggtggagagtgtgggactcgcccttgtaaagctgcctgacgttctgaaccggctgaagccagacataatgatcgtccatggcgatcggtttgacgccctggctctagctacgtcggcagccctgatgaatattcgcattttacacattgagggaggagaagtttctggtactattgacgatagtattcggcacgccatcactaaactcgcccactatcacgtgtgctgtactcgatccgccgaacagcacctgatttctatgtgcgaagaccatgaccgcatccttctcgccggttgtccctcctatgacaagctccttagcgctaagaacaaagactacatgtcgatcatccgcatgtggttaggtgatgacgtaaagtcaaaggattacatcgtggccttgcagcatccggtgaccacagatattaagcattctataaaaatgtttgagctgaccctggatgccttaatctccttcaataaaagaaccttggtcctattcccaaacatcgatgcaggcagtaaggagatggtacgcgttatgagaaaaaagggcatcgagcaccacccgaactttcgggccgtgaagcacgtgccattcgatcaattcatacagctggtagcccacgctggttgtatgatcgggaattcgagttgcggcgtgagggaagttggcgccttcggtacccccgttatcaaccttggaaccagacagatcggccgggaaacgggcgagaatgtgctgcacgttcgggatgcagacacccaagataagattctccaggctttgcacctgcagttcggtaagcaatatccatgttcgaagatatatggagacggtaatgcggtccctaggatcttgaagttcttaaaaagcatcgacctgcaagagcctctccaaaagaaattctgctttccgcccgtgaaagagaacatcagccaagacatcgaccacatcctggaaactttgtcagctctggccgtggatctcggagggacgaatctgcgtgtcgccattgtgagtatgaaaggcgaaatcgtgaaaaagtacacacagtttaacccaaagacctacgaggaaagaatcaatctgatcttgcagatgtgtgtcgaagccgccgcagaggccgtgaagttgaactgtcggattctgggtgtgggcatttccacagggggtagggtaaacccccgggaggggatcgtattgcactccaccaaactaatccaagagtggaatagtgtcgacctgcgcacccccttgtctgacacgctccatctcccggtgtgggttgataacgacggaaactgtgccgctctggcagaaaggaagtttggacagggtaaaggactagagaatttcgtgacactaatcaccggaacgggtatcggtgggggcattatacatcaacacgagctgatccatggatctagcttttgtgctgcagagctgggccatctggttgtctccctggatggccccgactgctcatgcggtagtcacggctgtatcgaggcttacgccagcggtatggcactccaacgggaggccaaaaaactgcatgacgaagatttacttcttgttgaaggcatgtccgtgcccaaggatgaggccgttggggcattgcacctgatccaggctgctaagctcggtaatgctaaagcacagtctattcttcggaccgccggaactgccctgggccttggagttgtgaatatcttgcacaccatgaacccctccctggttattttatctggcgtattggcaagccactacatccacattgtcaaagacgttattagacagcaggctttatcaagtgttcaggacgtggatgtggtagtttccgatctggtggacccagctcttttaggcgccgcgagcatggttcttgactacacaacccgccggatctattag

SEQ ID NO: 156423 - DNA, 2169 bp, Artificial Sequence
  derived and/or modified sequence
atggagaagaacggcaacaaccggaagctgcgggtgtgcgtggccacctgtaaccgcgccgattactccaagctggcaccaatcatgttcggcattaagactgagccggaattctttgagctcgatgtggtcgtgttgggcagccatctgatcgacgattacggaaacacgtaccgcatgattgagcaggacgacttcgacataaatacccgacttcatacaatcgtgcggggggaggatgaggccgcgatggtcgagagtgtcgggttggcactggtgaagctcccagatgtgctcaatcgtctaaagcccgacatcatgatagtacacggggatcgctttgacgccctggccttagctaccagcgccgccctaatgaatatcaggatccttcacatagaggggggagaggtgtccgggaccattgatgactccatccggcacgcgattaccaagttggcgcactaccacgtctgttgtacccgctccgccgagcagcatctcatcagcatgtgcgaggaccacgatagaattctgctggcaggttgccccagctacgataagctgttgagcgccaaaaataaggactacatgagcataatcaggatgtggctgggggatgacgttaagtctaaggactacattgttgccctgcagcaccccgtgacaactgacattaagcattccattaaaatgttcgaactgacactggacgctctgatatcctttaataagcgcactttggtgctctttcctaatatcgacgccggttccaaggaaatggtgcgcgtcatgaggaaaaaagggatcgaacaccaccccaacttccgcgccgtcaaacatgtgcccttcgatcagtttattcagctagtagcccacgccggctgcatgatagggaactccagctgtggggtgcgggaagttggcgccttcgggaccccagtcattaacctgggcacgcgtcaaattggccgagagaccggagaaaacgtcttacatgttcgggatgcagatacccaagacaaaattctgcaggcactccatctgcaatttggaaagcagtacccgtgctcaaagatctacggagatggaaatgcagtgccgcggattttaaaattcctaaagagtattgaccttcaagagcctttacagaagaaattttgctttcctcccgttaaagaaaacatctcacaagacatcgatcacatcctggagacactctccgccctggccgttgatttgggaggcaccaatcttcgagtagcgattgtgtccatgaagggagaaattgttaagaaatacacccagttcaacccaaaaacttatgaagaaaggattaatctgatcttgcagatgtgcgtggaggctgcagcggaggctgtgaaactcaattgccgcatcctcggcgtgggtatatcaacaggggggcgggtgaatccccgagagggaatagtccttcattcaaccaaactgatccaagagtggaactcagtggatttacgcacgcctttaagcgatactcttcacctacccgtatgggttgacaatgacggaaactgtgcagcccttgccgagcgaaagttcggccagggcaagggcctcgagaactttgtcacccttatcaccggaacaggtataggcggaggcattatccaccagcatgagctgatccacggatcctcgttctgcgctgctgaactggggcacctcgttgtgtccctcgatggcccggactgcagctgcggttcccacggctgtatcgaggcatacgcatcaggcatggcgctgcagcgagaggcaaagaaattacatgacgaagatcttttgctagtggaaggcatgtctgtgcctaaagacgaggccgtcggggccttgcacctgatccaagccgcaaagctgggcaatgctaaggcccagtctattctgaggaccgccggtactgcattaggtctcggcgtggttaacatactgcacaccatgaaccctagcctagttattctgtccggcgtcttagcttcacattacattcacatcgtgaaagatgtgattcgacagcaagcgctgtcctccgtgcaagacgtggacgtcgtcgtctccgacttggttgatcctgccttactgggcgctgcctctatggtgctggactataccacacggaggatttattag

SEQ ID NO: 156424 - DNA, 2169 bp, Artificial Sequence
  derived and/or modified sequence
atggagaagaatgggaataataggaagctgcgtgtttgtgtggcaacatgcaatagggcggattactccaagctggccccaattatgttcggaatcaagactgagcccgaattcttcgaattggacgtcgtggtccttggcagccacctgatcgatgattacgggaacacttatcgtatgatcgaacaggatgattttgacatcaacactagactgcacacgatcgttaggggggaggacgaagcagctatggtggagtctgtcggtttagccttagtcaaacttcccgatgtcctgaaccgcctgaaacccgatattatgatcgtgcacggtgaccgatttgacgcacttgcgttggctacatccgcagctctgatgaatatcaggattctgcatatcgaaggcggagaagtctccggaaccatcgatgactccatacggcatgccatcaccaagctcgctcattatcacgtatgttgcacccgcagtgccgaacagcatctgatttccatgtgtgaagatcacgaccggatcttgctcgcaggctgtccttcttatgataaattgctttcagccaagaacaaggactatatgtccatcatacgtatgtggctcggagacgatgtcaagtccaaagattacatagttgcgctgcagcaccctgtgaccactgacattaagcactccattaagatgtttgagctgaccttagacgccctcatatcatttaataagagaaccctcgtgttattccctaatatcgacgcagggtctaaggaaatggttagagttatgagaaaaaaggggatcgaacaccatccaaattttagagctgtgaaacacgtcccatttgaccagtttattcagcttgtggctcatgccggttgtatgatcggtaactcctcctgtggggtcagggaggtgggagcattcgggaccccggtgattaacttggggacgcggcaaattggacgtgaaactggggaaaacgtgctgcacgtgcgggatgctgacacccaggacaagatccttcaggctctccacctacagttcggtaaacagtatccctgcagtaagatttatggcgacggaaacgcagttccacggattttgaagtttttaaagtctattgaccttcaggagcccctccagaagaaattctgcttcccgccagttaaggagaacatctcacaggatatcgatcacattttagaaacactctccgccctggcagttgacctgggaggaacaaacctgagagtggctattgtgagcatgaagggtgaaattgtgaagaagtatactcagttcaacccaaaaacatacgaggagagaatcaacctaatactacagatgtgcgtggaagcggctgccgaagcagtgaaactgaattgcaggatcctgggggtgggaatcagcacgggaggcagagtgaatccacgagagggcatcgtgctgcatagtacaaaactgatccaggagtggaattctgtcgatcttagaaccccactctccgacactttacacctcccagtctgggtggataacgatggcaactgcgccgcactagccgaaaggaagttcggccagggtaaaggtctggagaattttgttactcttatcactgggacaggcatcggcggagggattattcatcagcacgagctgatccatggctcgagcttctgtgctgctgaattaggccacttggtggtttcactggatggacctgactgttcttgcggctcacatggctgtattgaagcttacgcctctgggatggctctccaacgcgaggctaagaaactgcacgatgaggaccttctcctggttgagggaatgtccgtccctaaggacgaggcagtaggcgctctgcatctgattcaggccgcaaaactgggaaatgcaaaagcccaatccatactccggacagccggaacagccctgggacttggcgtggtgaatattctgcacaccatgaatccatcactcgttatactttcaggagtgttggcctcacactacatccacattgtgaaggacgttatcaggcaacaagccctatcgtcggttcaggacgtagacgtcgtggtgtctgatctggtggatcctgccctgctgggcgcagcatctatggtgcttgattacactacccgccgaatctactag

SEQ ID NO: 156425 - DNA, 2169 bp, Artificial Sequence
  derived and/or modified sequence
atggaaaagaatgggaataatcggaagctacgtgtttgtgttgccacctgcaaccgtgcagactacagcaaactggcccctatcatgtttggcatcaagactgagcctgaattttttgagctggacgtcgtcgtgctcggctcccacctcattgatgattacgggaacacataccgaatgattgaacaggatgactttgacatcaacacacgcttgcacactattgtccggggagaagatgaggctgcaatggtggaatctgtggggctcgcactggtgaagcttccagacgtgcttaacaggctgaagccagatatcatgatcgtgcacggcgacaggttcgatgcactcgctctggctacatcagcagctttgatgaacattagaatactccatatcgaaggcggtgaagtgagcggtaccattgacgatagtattagacatgccataacaaaactggcacactatcatgtgtgctgtactcggtcagccgaacaacacctcatttcaatgtgtgaagaccatgatagaatacttttggccggatgcccaagttatgacaagctgctgagcgcaaagaataaggattacatgtccatcattcgtatgtggctgggcgacgatgtgaagtctaaggactacatcgtcgccctgcagcaccccgtgaccactgacatcaagcacagtataaaaatgttcgaactcacgctcgacgccctgatctcatttaataagcgcactttggtccttttccctaacatcgacgccggttcaaaggagatggtgagagtgatgcggaaaaagggaatcgagcatcaccccaacttccgagcggtgaaacacgtgccattcgatcagttcatccagctagtagcccatgccggatgtatgatcggcaactcttcttgtggggtgcgggaagtgggagctttcgggacgccggtgattaatctgggaactcggcaaattggtagggaaacaggagagaatgtcctccacgtccgtgatgccgacacacaggacaaaatattgcaagcgctacatctgcagtttggaaaacaatacccgtgtagtaagatctatggagacggaaacgcagttccacggatacttaagttccttaagtctatagatctccaggaacctctgcagaagaagttctgcttcccccctgtaaaggagaacatctcacaagatatagaccacattttggagacactgtcagcactcgccgtcgacttgggcggaacaaatcttcgtgtcgccattgttagtatgaaaggggaaatcgtgaagaagtatacccagttcaaccctaaaacgtatgaggagcgaattaaccttatcctgcagatgtgcgtggaagccgcagctgaggctgtcaagctgaattgcagaattctaggcgtcgggatatcaactggcggacgggtaaacccccgtgagggtattgtactgcattcaacaaagttgattcaggaatggaattctgtcgacctgcgcactcctctgtccgacacattgcacctcccagtctgggtggacaatgacggcaactgtgccgcactggccgagaggaaattcgggcaaggaaagggcctggaaaactttgtgaccctcattacaggcacaggtataggcggaggtattattcatcagcatgaactcatacatggatcatccttttgtgccgcagagctgggccacttagtcgtcagcttggacggaccagattgcagctgtggatcgcacggatgcattgaagcttacgcctctgggatggcactacagcgggaagcaaagaagctgcacgatgaggacctccttttagtggagggtatgtcagtccctaaagatgaagcagtgggcgctctgcacctcatccaggcagccaaactcggtaacgccaaggcacaaagcatcctgaggacagccggaaccgccttgggcctcggggtagtcaacatattgcacacgatgaacccttcattagtgatcctctctggggtgttggcgtcccattacatccacattgtaaaagacgtgatccgacaacaagctctttcctctgtgcaagacgtcgacgtcgtcgtcagcgacctggtcgatcctgccctgctcggagcagcctctatggtgctggattatactacacgcagaatctattag

SEQ ID NO: 156426 - DNA, 2169 bp, Artificial Sequence
  derived and/or modified sequence
atggagaagaacggcaacaacagaaagctgagagtgtgcgtggccacctgcaacagagccgactacagcaagctggcccccatcatgttcggcatcaagaccgagcccgagttcttcgagctggacgtggtggtgctgggcagccacctgatcgacgactacggcaacacctacagaatgatcgagcaggacgacttcgacatcaacaccagactgcacaccatcgtgagaggcgaggacgaggccgccatggtggagagcgtgggcctggccctggtgaagctgcccgacgtgctgaacagactgaagcccgacatcatgatcgtgcacggcgacagattcgacgccctggccctggccaccagcgccgccctgatgaacatcagaatcctgcacatcgagggcggcgaggtgagcggcaccatcgacgacagcatcagacacgccatcaccaagctggcccactaccacgtgtgctgcaccagaagcgccgagcagcacctgatcagcatgtgcgaggaccacgacagaatcctgctggccggctgccccagctacgacaagctgctgagcgccaagaacaaggactacatgagcatcatcagaatgtggctgggcgacgacgtgaagagcaaggactacatcgtggccctgcagcaccccgtgaccaccgacatcaagcacagcatcaagatgttcgagctgaccctggacgccctgatcagcttcaacaagagaaccctggtgctgttccccaacatcgacgccggcagcaaggagatggtgagagtgatgagaaagaagggcatcgagcaccaccccaacttcagagccgtgaagcacgtgcccttcgaccagttcatccagctggtggcccacgccggctgcatgatcggcaacagcagctgcggcgtgagagaggtgggcgccttcggcacccccgtgatcaacctgggcaccagacagatcggcagagagaccggcgagaacgtgctgcacgtgagagacgccgacacccaggacaagatcctgcaggccctgcacctgcagttcggcaagcagtacccctgcagcaagatctacggcgacggcaacgccgtgcccagaatcctgaagttcctgaagagcatcgacctgcaggagcccctgcagaagaagttctgcttcccccccgtgaaggagaacatcagccaggacatcgaccacatcctggagaccctgagcgccctggccgtggacctgggcggcaccaacctgagagtggccatcgtgagcatgaagggcgagatcgtgaagaagtacacccagttcaaccccaagacctacgaggagagaatcaacctgatcctgcagatgtgcgtggaggccgccgccgaggccgtgaagctgaactgcagaatcctgggcgtgggcatcagcaccggcggcagagtgaaccccagagagggcatcgtgctgcacagcaccaagctgatccaggagtggaacagcgtggacctgagaacccccctgagcgacaccctgcacctgcccgtgtgggtggacaacgacggcaactgcgccgccctggccgagagaaagttcggccagggcaagggcctggagaacttcgtgaccctgatcaccggcaccggcatcggcggcggcatcatccaccagcacgagctgatccacggcagcagcttctgcgccgccgagctgggccacctggtggtgagcctggacggccccgactgcagctgcggcagccacggctgcatcgaggcctacgccagcggcatggccctgcagagagaggccaagaagctgcacgacgaggacctgctgctggtggagggcatgagcgtgcccaaggacgaggccgtgggcgccctgcacctgatccaggccgccaagctgggcaacgccaaggcccagagcatcctgagaaccgccggcaccgccctgggcctgggcgtggtgaacatcctgcacaccatgaaccccagcctggtgatcctgagcggcgtgctggccagccactacatccacatcgtgaaggacgtgatcagacagcaggccctgagcagcgtgcaggacgtggacgtggtggtgagcgacctggtggaccccgccctgctgggcgccgccagcatggtgctggactacaccaccagaagaatctactag

SEQ ID NO: 156427 - protein, 1203 aa, Artificial Sequence
  derived and/or modified sequence
MDKLPPSMRKRLYSLPQQVGAKAWIMDEEEDAEEEGAGGRQDPSRRSIRLRPLPSPSPSAAAGGTESRSSALGAADSEGPARGAGKSSTNGDCRRFRGSLASLGSRGGGSGGTGSGSSHGHLHDSAEERRLIAEGDASPGEDRTPPGLAAEPERPGASAQPAASPPPPQQPPQPASASCEQPSVDTAIKVEGGAAAGDQILPEAEVRLGQAGFMQRQFGAMLQPGVNKFSLRMFGSQKAVEREQERVKSAGFWIIHPYSDFRFYWDLTMLLLMVGNLIIIPVGITFFKDENTTPWIVFNVVSDTFFLIDLVLNFRTGIVVEDNTEIILDPQRIKMKYLKSWFMVDFISSIPVDYIFLIVETRIDSEVYKTARALRIVRFTKILSLLRLLRLSRLIRYIHQWEEIFHMTYDLASAVVRIVNLIGMMLLLCHWDGCLQFLVPMLQDFPDDCWVSINNMVNNSWGKQYSYALFKAMSHMLCIGYGRQAPVGMSDVWLTMLSMIVGATCYAMFIGHATALIQSLDSSRRQYQEKYKQVEQYMSFHKLPPDTRQRIHDYYEHRYQGKMFDEESILGELSEPLREEIINFNCRKLVASMPLFANADPNFVTSMLTKLRFEVFQPGDYIIREGTIGKKMYFIQHGVVSVLTKGNKETKLADGSYFGEICLLTRGRRTASVRADTYCRLYSLSVDNFNEVLEEYPMMRRAFETVALDRLDRIGKKNSILLHKVQHDLNSGVFNYQENEIIQQIVQHDREMAHCAHRVQAAASATPTPTPVIWTPLIQAPLQAAAATTSVAIALTHHPRLPAAIFRPPPGSGLGNLGAGQTPRHLKRLQSLIPSALGSASPASSPSQVDTPSSSSFHIQQLAGFSAPAGLSPLLPSSSSSPPPGACGSPSAPTPSAGVAATTIAGFGHFHKALGGSLSSSDSPLLTPLQPGARSPQAAQPSPAPPGARGGLGLPEHFLPPPPSSRSPSSSPGQLGQPPGELSLGLATGPLSTPETPPRQPEPPSLVAGASGGASPVGFTPRGGLSPPGHSPGPPRTFPSAPPRASGSHGSLLLPPASSPPPPQVPQRRGTPPLTPGRLTQDLKLISASQPALPQDGAQTLRRASPHSSGESMAAFPLFPRAGGGSGGSGSSGGLGPPGRPYGAIPGQHVTLPRKTSSGSLPPPLSLFGARATSSGGPPLTAGPQREPGARPEPVRSKLPSNL

SEQ ID NO: 156428 - DNA, 3612 bp, Artificial Sequence
  derived and/or modified sequence
atggataagctgcccccctcaatgaggaaacgactctacagccttccccagcaagtaggagcgaaggcctggatcatggacgaagaagaggacgccgaagaagagggcgcaggcggtaggcaggatccttccaggcggtccattcgccttcgacctctgccgagtccctctccaagcgcagctgccggagggacagaaagcaggtcttcagcccttggagctgcagactcggaaggtccagctcggggggccgggaaatctagcacgaacggggattgtaggaggttcagaggcagcctggcatccctcggctcccgcggaggcggttcaggcgggacgggcagtggaagctcccatggtcacctgcacgattcagccgaggaacgtcgcctgatagccgagggcgacgcctctccgggagaggatcgaacccctcctggtctcgctgctgagccagagaggcccggagcatccgctcagccggctgcctcacccccaccaccccagcagcctccccagccagccagtgccagttgtgagcagccgtcagtcgacacagccatcaaggtcgaagggggggcagcagctggtgatcaaatcctgcctgaagctgaagtccgactgggacaagcgggcttcatgcagagacaattcggggccatgctacaacctggagtcaacaagttcagcctccgcatgtttgggagccaaaaagccgtggagcgggagcaggaaagggtcaagtctgcagggttctggatcattcatccatactctgactttcggttctattgggatctgacaatgctgctgttaatggttggtaaccttattatcatacccgtgggcatcacgttcttcaaagacgaaaatacaaccccctggatcgtatttaacgtagttagcgatacgttcttcctgatcgatttagttctgaatttcagaacaggaatcgtggtggaggacaataccgagattattctggatccacagagaatcaagatgaagtatctgaaatcttggttcatggtcgatttcatcagctccatacctgtggattacatcttccttatagtcgagacacgcattgattcggaagtctacaaaactgcaagggctctgcgaatcgtgcgattcactaagattctttcgcttctccggctgctccgtttgtcacgcttgatccggtatattcatcagtgggaagaaatatttcacatgacatacgatttggcctctgctgtggtgaggatagtgaatttgatcggcatgatgctgctactgtgtcattgggatgggtgcttacagttcctcgttccaatgctccaggatttccccgacgattgctgggtctccataaataacatggtgaacaatagctggggtaaacagtattcctacgctctcttcaaggccatgagccatatgctatgcatcggctatggccggcaggccccagtgggaatgagcgacgtgtggctgactatgctgtctatgattgtgggagcaacatgctacgctatgtttattggtcacgcaacagccttgatacagagtttggactcttcccgcagacagtatcaggagaagtacaagcaagtagaacagtacatgagcttccacaaactcccacccgatacacgccaacgaatccatgactactatgaacacagataccagggaaagatgtttgacgaagagtctatcctcggagaactatcggagcctcttcgggaggagatcattaattttaattgcagaaagctcgtcgcctcaatgcccctctttgctaacgccgatcccaactttgtcacaagcatgttaactaaactccgattcgaagtcttccagccaggtgactacattatccgggagggcaccattggaaagaagatgtatttcatccagcacggcgtcgtctctgtcctaacgaagggtaacaaggagactaaattggcagacggctcctactttggtgagatatgtctattgacgcggggacgacggacagcgtccgtgcgtgctgacacatactgtcgcttgtacagcctgtcagtggacaacttcaacgaggtgctcgaggagtacccgatgatgaggagagcgttcgagacagttgctctggaccgactggatcgcattggaaaaaagaactccatcctgttacataaagtgcaacatgatctgaactccggcgtttttaattatcaggagaacgagatcatacagcagattgtgcagcacgatcgagaaatggcccactgcgcacaccgcgttcaggctgcagcctcggctactccaacaccaacaccagttatttggaccccactgatccaagccccactgcaggcagcggctgccacaacatctgtagcaattgctttaacccaccacccgaggcttcccgccgccatatttcggcccccccccggatcgggcctgggcaacttgggggccggccagaccccccggcatctgaaaagactccagagtctgattccgtctgctttggggagtgcatctccagcgtcctctccctcccaggttgacacccctagctcttcctcattccatatccagcagctcgccggctttagtgcccctgccggtctctccccactgcttccctccagtagcagctcacctccccccggtgcctgtggtagcccatctgcccctacgcctagcgccggcgtcgcggctacaactatagctggatttgggcactttcataaagctctgggtggcagcttgtctagcagcgactcccccctcctgacccctctccagcccggggcccgaagccctcaggcagcgcagccaagccctgccccccccggtgccaggggcggattaggcctaccagagcactttctgcctccacctccaagtagcaggagcccctcgtcatcaccgggtcaactgggtcagcctcccggggagctgtcactgggccttgccaccggtcccttgagcacgccggagaccccccctcgccagcctgaaccgccgtctctggtggcaggtgcgagcgggggtgcatcccctgtggggtttacaccgagaggtggtttaagcccccccggccacagcccaggcccacccagaacatttcccagtgcgccacccagagccagcggaagccacggtagtctcttgctgccaccggcatcatccccgcctcccccgcaggtgccacagagacgtggcacgccaccactaactcctggacgccttacccaggatttgaaactaatcagcgccagccagccagcattgccacaggatggggctcagactctgagaagagcctccccccacagctcaggggagtcgatggcggccttccccctgttccctagggcagggggagggagcggcgggtccggatcttctggcggtctggggcctcctggaaggccttatggcgccattccaggccagcacgtgacactgcctaggaagacttccagcggctccctccctccccccttgtctctgttcggcgcccgggcaacatcaagcggcgggccgccgttaacagcaggcccccagcgggaaccaggggcaaggcccgagccggtgaggagtaagctgccgagtaatctgtag

SEQ ID NO: 156429 - DNA, 7228 bp, Artificial Sequence
  derived and/or modified sequence
caaaaatgccagggaaaggcgagcccagagcttggtgatggagaaattgggaagccaccccccacccttcaatcttaggatggggaattcgcaactgaagccggagcttcagacttggggcgcactcccagcttagcccaggaaagagatttaagggcgcagcagtgtggatacctctcaccccggccccgaaggtctagcgagggtctaacctgggccccttgccaggcccgccccccgcccctttccagcccccggcccgtgcgccgctgcccctttaagaagcccaggtaggcaggcccggctgctggagccgctcctatggcaacccgcgagctgcggcggcttcatgaatattccggggcgcgggagcccgagcgctgccggagggcgcttcgggggaggcggccgctgatgtaagcccggcgggtcgctgggctccgctcggttgcggcgggagccccgggacgggccggacgggccggggcagaggaggcgaggcgagctcgcgggtggccagccacaaagcccgggcggcgagacagacggacagccagccctcccgcgggacgcacgcccgggacccgcgcgggccgtgcgctctgcactccggagcggttccctgagcgccgcggccgcagagcctctccggccggcgcccattgttccccgcgggggcggggcgcctggagccgggcggcgcgccgcgcccctgaacgccagagggagggagggaggcaagaagggagcgcggggtccccgcgcccagccgggcccgggaggaggtgtagcgcggcgagcccggggactcggagcgggactaggatcctccccgcggcgcgcagcctgcccaagcatgggcgcctgaggctgcccccacgccggcggcaaaggacgcgtccccacgggcggactgaccggcgggcggacctggagcccgtccgcggcgccgcgctcctgcccccggcccggtccgaccccggcccctggcgccatggacaagctgccgccgtccatgcgcaagcggctctacagcctcccgcagcaggtgggggccaaggcgtggatcatggacgaggaagaggacgccgaggaggagggggccgggggccgccaagaccccagccgcaggagcatccggctgcggccactgccctcgccctccccctcggcggccgcgggtggcacggagtcccggagctcggccctcggggcagcggacagcgaagggccggcccgcggcgcgggcaagtccagcacgaacggcgactgcaggcgcttccgcgggagcctggcctcgctgggcagccggggcggcggcagcggcggcacggggagcggcagcagtcacggacacctgcatgactccgcggaggagcggcggctcatcgccgagggcgacgcgtcccccggcgaggacaggacgcccccaggcctggcggccgagcccgagcgccccggcgcctcggcgcagcccgcagcctcgccgccgccgccccagcagccaccgcagccggcctccgcctcctgcgagcagccctcggtggacaccgctatcaaagtggagggaggcgcggctgccggcgaccagatcctcccggaggccgaggtgcgcctgggccaggccggcttcatgcagcgccagttcggggccatgctccaacccggggtcaacaaattctccctaaggatgttcggcagccagaaagccgtggagcgcgaacaggagagggtcaagtcggccggattttggattatccacccctacagtgacttcagattttactgggacctgaccatgctgctgctgatggtgggaaacctgattatcattcctgtgggcatcaccttcttcaaggatgagaacaccacaccctggattgtcttcaatgtggtgtcagacacattcttcctcatcgacttggtcctcaacttccgcacagggatcgtggtggaggacaacacagagatcatcctggacccgcagcggattaaaatgaagtacctgaaaagctggttcatggtagatttcatttcctccatccccgtggactacatcttcctcattgtggagacacgcatcgactcggaggtctacaagactgcccgggccctgcgcattgtccgcttcacgaagatcctcagcctcttacgcctgttacgcctctcccgcctcattcgatatattcaccagtgggaagagatcttccacatgacctacgacctggccagcgccgtggtgcgcatcgtgaacctcatcggcatgatgctcctgctctgccactgggacggctgcctgcagttcctggtacccatgctacaggacttccctgacgactgctgggtgtccatcaacaacatggtgaacaactcctgggggaagcagtactcctacgcgctcttcaaggccatgagccacatgctgtgcatcggctacgggcggcaggcgcccgtgggcatgtccgacgtctggctcaccatgctcagcatgatcgtgggtgccacctgctacgccatgttcattggccacgccactgccctcatccagtccctggactcctcccggcgccagtaccaggaaaagtacaagcaggtggagcagtacatgtcctttcacaagctcccgcccgacacccggcagcgcatccacgactactacgagcaccgctaccagggcaagatgttcgacgaggagagcatcctgggcgagctaagcgagcccctgcgggaggagatcatcaactttaactgtcggaagctggtggcctccatgccactgtttgccaatgcggaccccaacttcgtgacgtccatgctgaccaagctgcgtttcgaggtcttccagcctggggactacatcatccgggaaggcaccattggcaagaagatgtacttcatccagcatggcgtggtcagcgtgctcaccaagggcaacaaggagaccaagctggccgacggctcctactttggagagatctgcctgctgacccggggccggcgcacagccagcgtgagggccgacacctactgccgcctctactcgctgagcgtggacaacttcaatgaggtgctggaggagtaccccatgatgcgaagggccttcgagaccgtggcgctggaccgcctggaccgcattggcaagaagaactccatcctcctccacaaagtccagcacgacctcaactccggcgtcttcaactaccaggagaatgagatcatccagcagattgtgcagcatgaccgggagatggcccactgcgcgcaccgcgtccaggctgctgcctctgccaccccaacccccacgcccgtcatctggaccccgctgatccaggcaccactgcaggctgccgctgccaccacttctgtggccatagccctcacccaccaccctcgcctgcctgctgccatcttccgccctcccccaggatctgggctgggcaacctcggtgccgggcagacgccaaggcacctgaaacggctgcagtccctgatcccttctgcgctgggctccgcctcgcccgccagcagcccgtcccaggtggacacaccgtcttcatcctccttccacatccaacagctggctggattctctgcccccgctggactgagcccactcctgccctcatccagctcctccccaccccccggggcctgtggctccccctcggctcccacaccatcagctggcgtagccgccaccaccatagccgggtttggccacttccacaaggcgctgggtggctccctgtcctcctccgactctcccctgctcaccccgctgcagccaggcgcccgctccccgcaggctgcccagccatctcccgcgccacccggggcccggggaggcctgggactcccggagcacttcctgccacccccaccctcatccagatccccgtcatctagccccgggcagctgggccagcctcccggggagttgtccctaggtctggccactggcccactgagcacgccagagacacccccacggcagcctgagccgccgtcccttgtggcaggggcctctgggggggcttcccctgtaggctttactccccgaggaggtctcagcccccctggccacagcccaggccccccaagaaccttcccgagtgccccgccccgggcctctggctcccacggatccttgctcctgccacctgcatccagccccccaccaccccaggtcccccagcgccggggcacacccccgctcacccccggccgcctcacccaggacctcaagctcatctccgcgtctcagccagccctgcctcaggacggggcgcagactctccgcagagcctccccgcactcctcaggggagtccatggctgccttcccgctcttccccagggctgggggtggcagcgggggcagtgggagcagcgggggcctcggtccccctgggaggccctatggtgccatccccggccagcacgtcactctgcctcggaagacatcctcaggttctttgccaccccctctgtctttgtttggggcaagagccacctcttctggggggccccctctgactgctggaccccagagggaacctggggccaggcctgagccagtgcgctccaaactgccatccaatctatgagctgggcccttccttccctcttctttcttcttttctctcccttccttcttccttcaggtttaactgtgattaggagatataccaataacagtaataattatttaaaaaaccacacacaccagaaaaacaaaagacagcagaaaataaccaggtattcttagagctatagatttttggtcacttgcttttatagactattttaatactcagcactagagggagggagggggagggaggagggagcaggcaggtcccaaatgcaaaagccagagaaaggcagatggggtctccggggctgggcaggggtgggagtggccagtgttggcggttcttagagcagatgtgtcattgtgttcatttagagaaacagctgccatcagcccgttagctgtaacttggagctccactctgcccccagaaaggggctgccctggggtgtgccctggggagcctcagaagcctgcgaccttgggagaaaagggccagggccctgagggcctagcattttttctactgtaaacgtagcaagatctgtatatgaatatgtatatgtatatgtatgtaagatgtgtatatgtatagctatgtagcgctctgtagagccatgtagatagccactcacatgtgcgcacacgtgtgcggtctagtttaatcccatgttgacaggatgcccaggtcaccttacacccagcaacccgccttggcccacaggctgtgcactgcatggtctagggacgttctctctccagtcctcagggaagaggaccccaggacttcgcagcaggccccctctctccccatctctggtctcaaagccagtcccagcctgacctctcaccacacggaagtggaagactcccctttcctagggcctcaagcacacaccgccacctctggggccgtcagtttgcccatctgtacagtgggaggtgagcggaacttctgtttattgagtctgctctgtgccaagcactggtttcgcactttacacacattaactccttcagtttcacaaagaccatggggtgggtactttgattctccccatttagcagaggaagaaacagttttgggtaatttttccagaatcatgtaactaggagtggcagagtggggactgatttgaggttcgagtccacgcctccttgaggcccaagtctgtgttccttccatcagaaaactgtgttgaggggggctgaggtagatggtccccaagcatggtacagaaggaagacaccagattttggcagcagtcaggcctgggtttgaatcccagccctgccacttcttagctgtatgatcttgggcaagttatctgacctttctgtcacctcatttgtaaaatgggaataattatggtactgcctcacaaggacctatgaggaccagatgagaaaaatctatatgtgaaatgcccagcccagcgcctggcacataccatggtaggtgctcaataaaaaatcacatttcttctgcccctcatatgcccagcctattgctccagcaaactatgtgagagcccagggagctttggctgagggctccaagacttaaaatctcaggactcaggaggtggctgggcctccctaagggcccaaggaaggtgtgtggccagaggtgggtgggagccaggccttgagaagtgggaagacttcaacagggagagagggagggaatggtgggtgggatggagtgtatggtggggagattcctgaggtggatgtggagtggtggatcagggctttgggaggggatccccaggctgaggggtcagagggacggccttgggtgatagggtaagggattgtctgggcttagtcctggcaactaggagccataagcaggttccagattgcgggaacgagaaagcagctcagatgcctttggaggcaccatcctccctcctcccagatgggatcttgccagagccaaggtcaggggtctgcccctgcctatagggccagagcaggtatggctgcaatccccaagtaatgagaagggctggtcccacattatccatccagaaccttccatgctccaagccagaatgttggcaagatcgggttttgccttgagctatcctgggatgtgagacaaaccgatttctccatagatgggctgcagggagtgggaggcagtactccaggagagaagtgggtgaaggttcctgggatcttaggtaaagactagacgccgcctagtactggtctctactgtgctggctcaggagttctgagaactggaaggacttagcctcaacctgagttctgcacacaccccttccccttaaggaaggcagctctgagaggcagcaggacttgatccaaacccacagtcttgtcctggaggcagcaggggtgaaggtggagggtccagggccatgaggagcccccttgccatcagagcctggcctaaccaccctcttctctacttacacacacatgcattttataatagctctgacccaacctggccactctgcagagactgggacagacaggtgcaggcaatgggccctcccacacccagtcacctacaaggaattttcaaatccacttttaaaacagaaaccggtaaatgcgccgtattgtatattttatttaaataaaaaaaattccagca

SEQ ID NO: 156430 - DNA, 3612 bp, Artificial Sequence
  derived and/or modified sequence
atggacaagctgcccccatccatgaggaagaggctgtacagcctgccccagcaggtgggcgccaaggcctggatcatggatgaggaggaggatgctgaggaggagggcgccggcggccggcaggaccccagcagaagaagcatccggctgcggcccctgcccagccccagccccagcgctgctgctgggggcacagagagccgcagcagcgccctgggcgctgctgacagcgagggccctgcccggggggccggcaagagcagcaccaacggggactgccgccgcttccggggcagcctggccagcctgggcagcagaggaggcggcagcggcggcactggaagtggcagcagccacggccacctgcatgattctgctgaggagcggcggctgattgctgaaggagatgccagccctggagaggacaggaccccacctggcctggccgctgagcctgagaggcctggggccagcgcccagcctgctgccagccccccaccaccccagcagcccccccagcctgccagcgccagctgtgagcagcccagcgtggacacagccatcaaggtggagggcggcgctgctgctggggaccagatcctgcctgaggccgaggtgcggctgggccaggccggcttcatgcagaggcagtttggagccatgctgcagcccggggtgaacaagttcagcctgaggatgtttggcagccagaaggctgtggagcgggagcaggagcgggtgaagtctgctggcttctggatcatccacccctacagcgacttccgcttctactgggacctgaccatgctgctgctgatggtgggcaacctgatcatcatccctgtgggcatcaccttcttcaaggatgagaacaccaccccctggatcgtgttcaacgtggtgtctgacaccttcttcctgattgacctggtgctgaacttcagaacaggcatcgtggtggaggacaacacagagatcatcctggacccccagaggatcaagatgaagtacctgaagtcctggttcatggtggacttcatcagcagcatccctgtggactacatcttcctgattgtggagaccagaattgattctgaggtgtacaagacagcccgggccctgcgcatcgtgcgcttcaccaagatcctgagcctgctgcggctgctgcggctgagccgcctcatccgctacatccaccagtgggaggagatcttccacatgacctatgacctggccagcgctgtggtgcgcatcgtgaacctgattggcatgatgctgctgctgtgccactgggatggctgcctgcagttcctggtgcccatgctgcaggacttcccagatgactgctgggtgtccatcaacaacatggtgaacaacagctggggcaagcagtacagctatgccctcttcaaggccatgagccacatgctgtgcatcggctacggccggcaggcccctgtgggcatgtctgatgtgtggctgaccatgctgtccatgattgtgggcgccacctgctacgccatgttcatcggccacgccacagccctgatccagagcctggacagcagccggcggcagtaccaggagaagtacaagcaggtggagcagtacatgtccttccacaagctgcccccagacacccggcagagaattcatgactactatgagcaccgctaccagggcaagatgtttgatgaggagagcatcctgggggagctgtctgagcccctgcgggaggagatcatcaacttcaactgcaggaagctggtggcctccatgcccctgtttgccaatgctgaccccaactttgtgacctccatgctgaccaagctgcgctttgaggtgttccagcccggggactacatcatccgggagggcaccatcggcaagaagatgtacttcatccagcacggcgtggtgtctgtgctgaccaagggcaacaaggagaccaagctggctgatggcagctactttggagagatctgcctgctgacccggggccgcaggacagcctctgtgcgggctgacacctactgccgcctgtacagcctgtctgtggacaacttcaatgaggtgctggaggagtaccccatgatgaggcgggcctttgaaacagtggccctggaccggctggaccgcatcggcaagaagaacagcatcctgctgcacaaggtgcagcacgacctgaacagcggggtcttcaactaccaggagaatgagatcatccagcagatcgtgcagcacgaccgggagatggcccactgtgcccaccgggtgcaggccgccgccagcgccacccccacccccacccctgtgatctggacccccctcatccaggcccccctgcaggccgccgccgccaccacctctgtggccatcgccctgacccaccacccccggctgcctgctgccatcttccggcccccacctggcagcggcctgggcaacctgggcgccggccagacccccaggcacctgaagaggctgcagagcctcatccccagcgccctgggcagcgccagccctgccagcagccccagccaggtggacacccccagcagcagcagcttccacatccagcagctggccggcttcagcgccccagctggcctgagccccctgctgcccagcagcagcagcagccccccacctggggcctgtggcagccccagcgcccccacccccagcgctggggtggccgccaccaccatcgccggcttcggccacttccacaaggccctgggcggcagcctgagcagcagtgacagccccctgctgacccccctgcagcccggggcccggagcccccaggccgcccagcccagccctgcccctcctggggcccggggcggcctgggcctgcctgagcacttcctgcccccaccacccagcagccgcagccccagcagcagccctggccagctgggccagcccccaggagagctgagcctgggcctggccaccggccccctgagcaccccagagaccccaccccggcagcctgagccccccagcctggtggccggggccagcggcggggccagccctgtgggcttcaccccccggggcggcctgagccccccaggccacagccctggcccccccaggaccttccccagcgccccaccccgggccagcggcagccacggcagcctgctgctgcccccagccagcagccccccaccaccccaggtgccccagaggcggggcaccccacccctgaccccaggccgcctgacccaggacctgaagctgatcagcgccagccagcctgccctgccccaggatggagcccagaccctgcggcgggccagcccccacagcagtggagagagcatggccgccttccccctcttcccccgggccggcggcggcagcggcggcagcggcagcagcggcggcctgggccccccaggccggccctacggggccatccctggccagcacgtgaccctgcccaggaagaccagcagcggcagcctgcccccacccctgagcctgtttggagcccgggccaccagcagcggcggcccccccctgacagctggcccccagcgggagcccggggcccggcctgagcctgtgcgcagcaagctgcccagcaacctgtag

SEQ ID NO: 156431 - DNA, 3612 bp, Artificial Sequence
  derived and/or modified sequence
atggacaagctgccccccagcatgcggaagcggctgtacagcctgcctcagcaggttggggccaaggcctggatcatggatgaggaagaggatgctgaggaggagggcgctgggggcaggcaggacccatctaggcgtagcattcggctccgccctctccccagcccgtcaccaagcgcggccgccggcggcaccgagtcccggtcatcagccctgggtgccgcagatagtgaggggcccgcccggggggctgggaaatcctctacaaatggggactgtagacgcttccgcggcagcctggccagtctggggtccaggggcggtggcagcggcgggacaggcagcgggagttctcacggtcaccttcacgactccgccgaagagagacgcctcattgcagagggcgacgcgagcccaggtgaggatagaactcccccaggactggctgccgaaccagagcggcctggcgctagcgcacaacccgcagcttcacctccccccccgcagcagccaccccagcccgcttcagcatcctgcgagcagccttccgtggacactgccattaaggtcgaaggaggcgccgctgcaggagatcagatattgccggaggctgaagtgcgtttgggccaggcaggctttatgcagaggcagtttggggctatgttgcaacccggcgtcaacaagtttagcctacggatgttcggcagtcaaaaagccgtggaaagagaacaagagagagttaagagtgccggtttctggatcattcacccctattccgactttcgcttctactgggacctcaccatgctgctgttgatggtgggtaatttaattatcatcccagtcggaataactttcttcaaagacgagaataccaccccttggattgtgtttaatgtagtgtcagataccttttttcttatcgatctggtcctgaatttcagaacgggtatcgtggttgaggacaacacagagataatcctcgatcctcagcgcattaagatgaaatacctgaagagctggttcatggtcgactttatcagctctatcccagtagactacatttttctgatcgtggaaacacgaattgacagcgaagtctacaagacagcgagggctctcagaatcgtccggttcactaaaatcctgtctctcctccgcttacttcgactgtcgagactcatacgctacatccaccagtgggaggagatattccacatgacatatgatctggcctcagcagtggtgcggatagttaatctcataggtatgatgctcctgttgtgtcattgggacggttgcctgcagtttttagttcctatgctccaggactttcctgatgattgctgggtcagtatcaataatatggtcaacaactcatggggaaagcagtactcgtatgccctatttaaggccatgagtcacatgctgtgcataggctacggcaggcaggcccccgtgggcatgtcagatgtctggctgaccatgctctctatgatcgtaggagcaacttgctatgccatgtttatcggtcacgctactgcgctgattcagtctttggatagctctcgccggcagtatcaggaaaagtataaacaggtggagcagtacatgagcttccataaactgccgcccgatactcgccagcgcatccatgattactatgagcacagataccagggcaaaatgtttgatgaggagtcaatcctgggggagctcagcgagcctttaagggaagaaattataaattttaactgtaggaaactagtggctagtatgcccctgtttgcgaatgcggacccaaatttcgttacctctatgctgacaaagctgcgattcgaagtcttccaacccggcgattacattatccgtgagggaaccattggcaaaaaaatgtatttcattcagcacggcgtggtctccgttctgacgaagggcaacaaagagactaaacttgccgacggctcttacttcggcgaaatctgcctgcttacacgaggacgccgcacggccagcgttagggcagacacatactgtagactctacagcctctctgtggacaattttaacgaggttttagaggagtaccctatgatgcgcagggcatttgagaccgtggcactggacaggttagatcggataggcaagaagaattcgattcttctacacaaagtgcaacacgatctgaactccggggtgttcaactatcaggagaatgaaattattcagcagatcgtgcagcatgatagagaaatggcccattgcgctcacagggtgcaggcagcagctagcgccaccccgacacccaccccagtgatatggacgcccctcattcaggctccactgcaggcagcagccgccaccacttctgttgctatcgccctaactcaccacccaaggctgcctgccgcaatattcagaccacccccaggctccgggctcggaaacctaggcgccggccaaactcctcgacatctcaaacgtctgcagtctctcattccgtccgctctaggcagcgcatcccctgctagcagcccaagtcaggtagacacgccatctagctccagctttcatatacagcagctggctggattttccgctcccgcggggctatctccgctgttaccatccagtagttcttcacctcctccgggcgcttgcggctcaccttctgcccccacccccagtgctggtgtcgcggccacaactatcgccggcttcggacacttccacaaagccttaggtggctcactgtctagcagcgattccccgttgttaactcctctgcagccaggggctcggtctccccaagccgcccaaccctctcccgctccaccaggcgcacggggaggactcggcctgcccgagcattttctgcctcccccgccctcaagccggagtccctcatcgagcccgggacagttgggtcagccaccaggcgaactgtccctcggcctggccacagggccactgtccacacccgagacaccacctaggcagcccgagccaccctctttggtggcaggcgcctcagggggagcatctcctgtaggctttacaccacgaggaggcttaagcccaccaggtcactcccccgggccgcctagaacatttccatcagcccctccacgagctagcgggagccacggaagcctgctccttccacctgcgtcttcacccccacccccccaggtcccacagaggagagggacaccccccttaacccctgggcgcctgacccaagacctcaagctcatttcagcgtctcagcccgcgctgccccaggatggagcccagactctgaggagggcgtctccgcactcttctggggaaagtatggccgcgttcccactttttccccgggccggcggcggcagcggcggatctgggtctagtggaggactcggtccgcccggacgaccttatggagctatcccaggacagcacgtcacactgccaagaaagacatcttcgggaagtctgcctccccccttatcactgttcggcgccagagcgacctcctccggaggcccgcctctgacggccggcccccagagggaacctggagcacgccccgagcccgtcagatctaagctgcctagtaatctgtag

SEQ ID NO: 156432 - DNA, 3612 bp, Artificial Sequence
  derived and/or modified sequence
atggataaactgccaccctctatgcgcaagcgcctctatagtttgccccagcaagtgggagccaaagcatggataatggatgaagaggaagatgcggaagaggaaggcgctggcggaagacaggatccttcccggcgttcaatcagactgagacctctgccaagtccctctccttccgccgcagcaggcggtacagagtccagatcttccgctctgggcgctgctgactcggagggtccagccagaggtgctggcaagtcaagcacaaatggcgactgtcgtaggttccggggtagtctcgctagtctgggctccaggggagggggttcaggtgggacaggcagcggctccagccacggacatcttcacgatagcgcagaggaacgcagattgatcgccgaaggcgatgcctctcctggtgaagataggactccacctggtctagccgctgaaccagagcgtccaggcgctagcgcacagcctgcagcttcaccacctccgccacagcagcctccccaaccagccagtgcctcctgcgaacaaccctcagtggacaccgccatcaaggtggaagggggagctgccgcaggggatcagattttacctgaggccgaagtaagacttggacaggctggttttatgcaaaggcagtttggggctatgctgcaacccggtgtcaataaattttcccttcgcatgttcggatcccaaaaggccgtggagcgcgaacaggagcgcgtaaaatctgcaggtttctggattattcacccctacagtgattttcgcttttattgggacctcactatgctacttctgatggtcggcaacctcatcatcattccagtgggtatcacattcttcaaggatgagaacacaactccatggattgtctttaatgtggtgagcgacaccttctttctcattgacctcgttctaaattttcggaccggcatcgtagtagaggacaataccgagatcattctggacccccagcggatcaagatgaagtatctcaaatcgtggttcatggtggacttcatttcgagcatccctgttgactacatatttttgatcgtcgagacccgcattgattcagaagtgtataagactgctcgcgcactgagaatagtgagatttaccaagattctttctctcttgcgcttgttaagactgtcgagattaattcggtatattcaccagtgggaagagatcttccatatgacctatgatctggccagcgcagtcgtaaggatagtgaacctgatcgggatgatgctgctcctgtgccactgggacggttgtttgcagttcctcgtgcccatgctccaagatttccccgacgattgctgggtatctatcaacaatatggtgaacaattcctggggtaagcagtacagctacgctctcttcaaggccatgagtcacatgttgtgcattggctatggacgccaagcccctgtgggtatgtcagatgtctggcttacgatgctgtcaatgatcgttggagctacttgttacgccatgttcataggtcatgcaaccgccctgatacagtcacttgattcctctcgtagacaatatcaagaaaaatacaaacaggttgagcaatacatgagttttcacaaactcccacccgatactcgacagagaatccacgactattacgagcatcgctaccaggggaaaatgtttgatgaagaaagtatcctaggtgagctgagcgagcccctgcgggaagagattatcaattttaactgtcgcaaactggtggcttctatgccactattcgccaatgccgacccaaatttcgtgacctccatgctgacaaaactgcggtttgaggtatttcagcctggggactatataatcagggagggaaccatcggaaaaaaaatgtattttatccagcatggtgtcgtgtcagtcctgactaaaggcaataaggaaaccaaactcgcggatggatcatactttggcgaaatctgtctcctcacgcggggtcgcagaacagcctccgtgcgggcagacacgtactgtcggctttactctctgtccgtggataactttaacgaagtgttggaggaataccccatgatgagaagggcatttgagactgtagcgctggacaggcttgacaggattgggaaaaaaaactccatacttctccacaaagtgcagcatgatctgaactcaggtgtgtttaactatcaggagaatgaaataatacagcagattgtgcagcatgaccgtgaaatggcacattgtgcccatagagtgcaggccgcagctagtgccacacctacccccactcccgtgatttggaccccacttattcaagcccctctgcaggctgcagctgctactacctccgtggccattgctcttacccatcaccccaggcttcctgccgctatttttcgcccacctcccggaagcggcttgggtaatctgggggctggccagacaccgcgacacttaaagcggttgcagtcccttatcccatcagcgctggggtctgccagccctgcaagtagcccatctcaggtggacacaccatcttcctctagctttcatatccagcaacttgccggtttttcagcccctgctggtttaagcccactcctccccagctcctccagttcccccccacccggagcatgcggcagccccagcgctccgacgccttctgccggagtcgccgcaactactatcgctggtttcggccactttcataaagccttaggcggaagtctatcctccagcgacagcccccttctcacccccttacagcccggagccaggtcccctcaggcggctcagcctagtcccgcacctcccggagcacggggtgggctgggacttcctgaacattttctacccccaccccctagcagcagatcaccatccagtagccccggtcagctgggtcagcctcctggagagctgtccctgggacttgctacagggccattatccacgccggagaccccaccaagacagccagaacctccatcactggtagcaggcgcatccgggggtgcgagtcctgtgggctttacccccaggggtggtctcagtccgccagggcactctccagggccaccacgcaccttcccatccgcccctcctcgggcaagtggcagccatggctctttattgctgccaccagcttcttcgccaccaccaccccaggtaccacagcgcagaggcacccctcctctgactcctgggagattgacccaagatctaaaactgatatctgcatcacagcccgctctgccgcaggatggcgctcaaaccctgagacgggcatccccacactctagcggggagtcaatggcagcatttcccctcttccctcgcgctggtgggggttcagggggaagtgggtcctcagggggactgggccctcctgggaggccatacggtgccatccccggacagcacgtaacgctcccgaggaaaacatcttccggaagcctgccaccacccttgagtctctttggggctcgagcgactagttcaggagggcctccattgaccgccggaccccagcgagagcccggagccagacccgaacctgttcgatcaaaacttccctccaacttgtag

SEQ ID NO: 156433 - DNA, 3612 bp, Artificial Sequence
  derived and/or modified sequence
atggacaagctgccccccagcatgagaaagagactgtacagcctgccccagcaggtgggcgccaaggcctggatcatggacgaggaggaggacgccgaggaggagggcgccggcggcagacaggaccccagcagaagaagcatcagactgagacccctgcccagccccagccccagcgccgccgccggcggcaccgagagcagaagcagcgccctgggcgccgccgacagcgagggccccgccagaggcgccggcaagagcagcaccaacggcgactgcagaagattcagaggcagcctggccagcctgggcagcagaggcggcggcagcggcggcaccggcagcggcagcagccacggccacctgcacgacagcgccgaggagagaagactgatcgccgagggcgacgccagccccggcgaggacagaaccccccccggcctggccgccgagcccgagagacccggcgccagcgcccagcccgccgccagccccccccccccccagcagcccccccagcccgccagcgccagctgcgagcagcccagcgtggacaccgccatcaaggtggagggcggcgccgccgccggcgaccagatcctgcccgaggccgaggtgagactgggccaggccggcttcatgcagagacagttcggcgccatgctgcagcccggcgtgaacaagttcagcctgagaatgttcggcagccagaaggccgtggagagagagcaggagagagtgaagagcgccggcttctggatcatccacccctacagcgacttcagattctactgggacctgaccatgctgctgctgatggtgggcaacctgatcatcatccccgtgggcatcaccttcttcaaggacgagaacaccaccccctggatcgtgttcaacgtggtgagcgacaccttcttcctgatcgacctggtgctgaacttcagaaccggcatcgtggtggaggacaacaccgagatcatcctggacccccagagaatcaagatgaagtacctgaagagctggttcatggtggacttcatcagcagcatccccgtggactacatcttcctgatcgtggagaccagaatcgacagcgaggtgtacaagaccgccagagccctgagaatcgtgagattcaccaagatcctgagcctgctgagactgctgagactgagcagactgatcagatacatccaccagtgggaggagatcttccacatgacctacgacctggccagcgccgtggtgagaatcgtgaacctgatcggcatgatgctgctgctgtgccactgggacggctgcctgcagttcctggtgcccatgctgcaggacttccccgacgactgctgggtgagcatcaacaacatggtgaacaacagctggggcaagcagtacagctacgccctgttcaaggccatgagccacatgctgtgcatcggctacggcagacaggcccccgtgggcatgagcgacgtgtggctgaccatgctgagcatgatcgtgggcgccacctgctacgccatgttcatcggccacgccaccgccctgatccagagcctggacagcagcagaagacagtaccaggagaagtacaagcaggtggagcagtacatgagcttccacaagctgccccccgacaccagacagagaatccacgactactacgagcacagataccagggcaagatgttcgacgaggagagcatcctgggcgagctgagcgagcccctgagagaggagatcatcaacttcaactgcagaaagctggtggccagcatgcccctgttcgccaacgccgaccccaacttcgtgaccagcatgctgaccaagctgagattcgaggtgttccagcccggcgactacatcatcagagagggcaccatcggcaagaagatgtacttcatccagcacggcgtggtgagcgtgctgaccaagggcaacaaggagaccaagctggccgacggcagctacttcggcgagatctgcctgctgaccagaggcagaagaaccgccagcgtgagagccgacacctactgcagactgtacagcctgagcgtggacaacttcaacgaggtgctggaggagtaccccatgatgagaagagccttcgagaccgtggccctggacagactggacagaatcggcaagaagaacagcatcctgctgcacaaggtgcagcacgacctgaacagcggcgtgttcaactaccaggagaacgagatcatccagcagatcgtgcagcacgacagagagatggcccactgcgcccacagagtgcaggccgccgccagcgccacccccacccccacccccgtgatctggacccccctgatccaggcccccctgcaggccgccgccgccaccaccagcgtggccatcgccctgacccaccaccccagactgcccgccgccatcttcagacccccccccggcagcggcctgggcaacctgggcgccggccagacccccagacacctgaagagactgcagagcctgatccccagcgccctgggcagcgccagccccgccagcagccccagccaggtggacacccccagcagcagcagcttccacatccagcagctggccggcttcagcgcccccgccggcctgagccccctgctgcccagcagcagcagcagccccccccccggcgcctgcggcagccccagcgcccccacccccagcgccggcgtggccgccaccaccatcgccggcttcggccacttccacaaggccctgggcggcagcctgagcagcagcgacagccccctgctgacccccctgcagcccggcgccagaagcccccaggccgcccagcccagccccgccccccccggcgccagaggcggcctgggcctgcccgagcacttcctgccccccccccccagcagcagaagccccagcagcagccccggccagctgggccagccccccggcgagctgagcctgggcctggccaccggccccctgagcacccccgagaccccccccagacagcccgagccccccagcctggtggccggcgccagcggcggcgccagccccgtgggcttcacccccagaggcggcctgagcccccccggccacagccccggcccccccagaaccttccccagcgccccccccagagccagcggcagccacggcagcctgctgctgccccccgccagcagccccccccccccccaggtgccccagagaagaggcaccccccccctgacccccggcagactgacccaggacctgaagctgatcagcgccagccagcccgccctgccccaggacggcgcccagaccctgagaagagccagcccccacagcagcggcgagagcatggccgccttccccctgttccccagagccggcggcggcagcggcggcagcggcagcagcggcggcctgggcccccccggcagaccctacggcgccatccccggccagcacgtgaccctgcccagaaagaccagcagcggcagcctgcccccccccctgagcctgttcggcgccagagccaccagcagcggcggcccccccctgaccgccggcccccagagagagcccggcgccagacccgagcccgtgagaagcaagctgcccagcaacctgtag

SEQ ID NO: 156434 - DNA, 936 bp, Artificial Sequence
  derived and/or modified sequence
atggccagaagcggcagaagaccctggagcgaccccggcggcctgagcggcgccgtgcagagagccggcggccccggcgccagacccgccggcaccagcggcgactgcagagtggccggcaccggcggctgccacagagagagagtggacggcctgagaacccccgccagagtgcacgccgagctgagaccccccagagccaaccaggtggccgagggcggcagaagcagccccgccggcctgagaagagccctgcacagcccccaccagagacccgacgccggcatggcccccggcctgctggagcccggcgaggccgccctgtggtgcggccacgagctgcccggcggcctgagacacgccctgagccacggccccctgggcgacagatgcgccggcatcgtgagaagaggcagagccggccccgccgccgccctgtgcagcgccagagccctgcccagaagactgggcgccggcgccggcggcagaagcggcagagccctgcccctgcagctgctgtggctgggcgcccacgcctggctgtgccacctggtgcccggcgacctgccctggagaggcgtgggcgagacccccggcgccgtgcacctggccttcagccccggccacagcctggagaccggcgcccccctgcccgagagagccggcgccagcggcgccagacacggcagattcagaagagaccacgccgccgccctgcccggccagccccccagccccgccagagccgccgccctgcagagcggcagacccggcggcgaggaccagagactgtgccacggcggcctgagcgtggccttcagccccagctacctgcccaagcagcccgacctgagaggcagaggcgtggccagaagcgagggcaagggcagaagccacgtgcaggtgggcggcatcagcccccccttccccagctag

SEQ ID NO: 156435 - protein, 279 aa, Artificial Sequence
  derived and/or modified sequence
MPCRREEEEEAGEEAEGEEEEEDSFLLLQQSVALGSSGEVDRLVAQIGETLQLDAAQHSPASPCGPPGAPLRAPGPLAAAVPADKARSPAVPLLLPPALAETVGPAPPGVLRCALGDRGRVRGRAAPYCVAELATGPSALSPLPPQADLDGPPGAGKQGIPQPLSGPCRRGWLRGAAASRRLQQRRGSQPETRTGDDDPHRLLQQLVLSGNLIKEAVRRLHSRRLQLRAKLPQRPLLGPLSAPVHEPPSPRSPRAACSDPGASGRAQLRTGDGVLVPGS

SEQ ID NO: 156436 - DNA, 840 bp, Artificial Sequence
  derived and/or modified sequence
atgccctgcagaagagaggaggaggaggaggccggcgaggaggccgagggcgaggaggaggaggaggacagcttcctgctgctgcagcagagcgtggccctgggcagcagcggcgaggtggacagactggtggcccagatcggcgagaccctgcagctggacgccgcccagcacagccccgccagcccctgcggcccccccggcgcccccctgagagcccccggccccctggccgccgccgtgcccgccgacaaggccagaagccccgccgtgcccctgctgctgccccccgccctggccgagaccgtgggccccgccccccccggcgtgctgagatgcgccctgggcgacagaggcagagtgagaggcagagccgccccctactgcgtggccgagctggccaccggccccagcgccctgagccccctgcccccccaggccgacctggacggcccccccggcgccggcaagcagggcatcccccagcccctgagcggcccctgcagaagaggctggctgagaggcgccgccgccagcagaagactgcagcagagaagaggcagccagcccgagaccagaaccggcgacgacgacccccacagactgctgcagcagctggtgctgagcggcaacctgatcaaggaggccgtgagaagactgcacagcagaagactgcagctgagagccaagctgccccagagacccctgctgggccccctgagcgcccccgtgcacgagccccccagccccagaagccccagagccgcctgcagcgaccccggcgccagcggcagagcccagctgagaaccggcgacggcgtgctggtgcccggcagctag

SEQ ID NO: 156437 - DNA, 840 bp, Artificial Sequence
  derived and/or modified sequence
atgccctgtcggcgagaggaggaggaggaagccggcgaggaggccgagggggaagaagaggaagaagattccttcctgttgctgcagcaatctgtagccctaggctcatcgggggaggtggacaggctagttgcccagatcggtgagacccttcagctcgatgccgcccagcacagccctgcgagtccctgtgggccacccggtgctccattgcgagcaccgggacccctggccgccgcagtgcccgccgacaaggcgcgcagcccagcggtcccactgctcctgcccccagcactggccgagaccgtgggaccggctcctccgggtgtgctcagatgcgcactgggtgatcggggccgggtgcgcgggcgggcagccccttattgcgtggcagagctcgcgaccgggcccagcgccttgtctcccttaccacctcaggccgaccttgatggccctcccggcgccggcaaacagggcataccccagcccctctcgggaccttgccgaagagggtggttacgcggcgcggccgcatcaagaaggcttcagcagcgtcgcggttcccagccagagacacgcacaggcgacgatgatccccatagattgctgcagcagctggtcctgagcggaaacctgatcaaggaggccgtccgcaggctccacagtcgcagactacaacttagagcaaaactcccacagcgaccacttctgggcccattgtccgctccggtccatgaaccgccctcaccacggtcaccaagagctgcctgttccgatccaggcgccagcggcagggcccaactccggacgggagacggcgtcctcgtccctggctcatag

SEQ ID NO: 156438 - DNA, 2651 bp, Artificial Sequence
  derived and/or modified sequence
ggattccggctcccgcggctgcaggcgcgcggctagagtgcctggcgggctccggcttccgcgtccgccccggccccggtccagacttagtcttcagctccgcgcccgctccgccgcggcccaccgcgcccgccggcagccgagcccccagcgacgcccgcacagctccgggtgcccagacagggggccatgccgtgccggagggaggaggaagaggaagccggcgaggaggcggagggggaggaagaggaggaggacagcttcctcctactgcagcagtcagtggcgctgggcagctcgggcgaggtggaccggctggtggcccagatcggcgagacgctgcagctggacgcggcgcagcacagcccggcctcgccgtgcgggcccccgggggcgccgctgcgggccccggggcccctggctgcggcggtgccggcggacaaggccaggtccccggcggtgccgctgctgctgccgcccgcgttggcggagactgtgggcccggcgccccctggggtcctgcgctgcgccctgggggaccgcggccgcgtgcggggccgcgctgcgccctactgcgtggccgagctcgccacaggccccagcgcgctgtccccactgccccctcaggccgaccttgatgggcctccgggagctggcaagcagggcatcccgcagccgctgtcgggtccgtgccggcgaggatggctccggggcgccgccgcctcccgccgcctgcagcagcgacgcgggtcccaaccagaaacccgcacaggcgacgacgacccgcaccggcttctgcagcagctagtgctctctggaaacctcatcaaggaggccgtgcgaaggcttcattcgcgacggctgcagttacgtgcaaagcttccccaacgcccgctcctgggacctctgtcggccccggtgcatgaacccccttcgcctcgcagccctcgcgcggcctgcagtgaccctggcgcctccgggagggcgcagctcagaactggcgacggcgttcttgtgcctggcagctaacacgcccggggtggccacagcgccagcctcagactggagggcaaggggttcccttgagggctgcagttctactcaggctggtggagaactctggcttttggaagcgagagtaaaaagctaatgacgaggaaccgaaaaatcgcgagtgtttcgcgggtaactggggttgagggccaaaatatttggaatgaaggactttggccctatttaaggcagattttacagagcgcacctcaaacgtacaagtcagtaggactccttatttggcgtgacccgacctggccgcggagcctgcatttcctcgcagcctctcagtgccctccagccccgcgaccatgtggccacaatccacgcttctccggatcgcggtgcgccggaaccacggaggatgatgccagttacttgctttaccttttcagggctggctcctgatccactttgggggaggagaacatgagtagataatttcagggtgcagcccaatctgccagacttaaaaaaaccatcttgtgtctttggaggtgctgcttaataccaaacatgcggtgccatgaagggaccctttgggggttgaataggagttaacccctgcgctctctttgcaactgtctctcttctcagagtggtgggggaaggctgtacgacacgggtggggaaaggaggtgggggcggggagtattgaatggtggtggaagggtagagaggcgcggagtgaaccccacgccctgtctaaagtgtattttcagagccggcccgcctctcctcggttcaaggtcactgtttcctgggcacgcactgggttgcgggacagagtagccaggttctgccggtgctcggagaagagcgcagtgttttgcaagtgctggagtctcctgaggacacgcgcgtcgccgccaccgcgggtgtgggaaagcgcggacgtgctgggcggctgtgcttcggtaggcgaccaccgcccctggccgcgctccgggctttcacggaaactcccgagaccgggccctgggttcctcctctcctactcggctctgcagtcctactcaagcgggtggctctgggatcctgggggcctgggttgggggctagggagacgccatgtgatggacactccagggacacacagcctagcacagcagcttataatgggctctccggggccatttgcaataacagctgcaattccctggatagacgagttgatttcctccctctgcccctcccccagccatgccagctggcctttgtaagtgcaggaaaccgagtagaaaatgtgaccctccaaatggagaagctgcaggctttgccattgtgaaccatggtgaagtgcttggaacatactgttcactcactctaaaggcgctgagactgtgctgttgttctcgtttttatagtcaatggcttgttcatcatccagatgtggctactgacatatctacacttcgcaccggagtgtctggaattgtggctatcctgattataggattttaacttaactgaaatgcctgctttgaataaatgtgttgggttttttgtttggttttattttatacttgccatcagtgaaaaagatgtacagaacacatttctctgatctccataaacatgaaaacacttgaaatctc

SEQ ID NO: 156439 - DNA, 840 bp, Artificial Sequence
  derived and/or modified sequence
atgccctgccggcgggaggaggaggaggaggccggggaggaggccgagggggaggaggaggaggaggacagcttcctgctgctgcagcagagcgtggccctgggcagcagtggagaggtggaccggctggtggcccagattggagagaccctgcagctggatgctgcccagcacagccctgccagcccctgtggccccccaggggcccccctgcgggcccctggccccctggccgctgctgtgcctgctgacaaggcccggagccctgctgtgcccctgctgctgcccccagccctggccgagaccgtgggccctgcccctcctggggtgctgcgctgtgccctgggggaccggggccgggtgcggggccgggccgccccctactgtgtggccgagctggccaccggccccagcgccctgagccccctgcccccccaggccgacctggatggccccccaggagctgggaagcagggcatcccccagcccctgagcggcccctgcagaagaggctggctgcggggagctgctgccagccggcggctgcagcagaggcggggcagccagcctgagaccaggactggagatgatgacccccaccggctgctgcagcagctggtgctgagcggcaacctgatcaaggaggccgtgcggcggctgcacagccggcggctgcagctgcgggccaagctgccccagaggcccctgctgggccccctgagcgcccctgtgcatgagccccccagccccaggagccccagggctgcctgcagcgaccccggggccagcggccgggcccagctgaggactggagatggagtgctggtgcccggcagctag

SEQ ID NO: 156440 - DNA, 840 bp, Artificial Sequence
  derived and/or modified sequence
atgccctgccggcgggaggaggaggaggaggccggcgaggaggccgaaggtgaggaggaggaagaggatagcttcctgctgcttcagcagagtgtagctctcgggagctcaggtgaggtggataggttagtcgctcagataggggagacgctgcagttagacgctgcacagcatagtcctgcgtctccttgtggcccgcctggcgcccctttgagggccccaggtcccttggccgcagctgttcccgcagataaggcccgcagtcccgctgtgcctctgctgctccctcccgctctcgccgaaaccgtaggccccgcaccacccggggtgttgcgttgtgctctgggggacaggggtagagtgcggggccgcgccgctccctactgcgtcgctgaattggcaactggtcccagcgccctgagtcctctgcctccgcaagccgacttggatggcccgcctggcgcgggcaagcaggggattccccagccgttgagcgggccttgcagaaggggttggctcagaggggcagccgcaagccgacgactgcagcagagacggggcagtcagcctgagaccagaactggcgatgatgatccacatcgcctcctgcagcagcttgtactgtccggtaatctgattaaagaggccgtgcgacggctgcactctcggagactacagctgagggcgaagctgccccagcggccactgctcgggccactctctgcgccagtgcacgagccccccagcccacggtcaccaagagctgcctgttctgatccaggggccagtggccgggctcagcttaggacaggggatggagttttagttccaggcagctag

SEQ ID NO: 156441 - DNA, 840 bp, Artificial Sequence
  derived and/or modified sequence
atgccatgcaggcgggaagaggaggaggaggctggggaagaagctgaaggcgaagaagaggaggaggactctttcttactgttgcagcagagcgtggccctcggaagcagcggcgaagttgataggctggttgctcagatcggggaaaccttacaactggacgccgctcagcattcaccggcttccccctgcggacctcctggagctccactgagagccccaggcccacttgcagccgctgtgcccgcagataaagccaggtcccccgctgtgcccttgctgttgcccccagccctggctgagacggtgggcccagcccctcctggcgtcctccgatgcgcactaggggatcgaggtagggtgcgcggaagggccgcaccctactgcgttgccgaactcgccacagggccttcagcactcagtcccctgccaccccaggctgatttggacgggcctcccggagcgggaaaacaaggtataccacaaccattgagcggaccatgccgccgtggctggctaagaggtgctgccgcttcaaggcgcttgcagcaaaggcgtggctcacaacccgagacccgcaccggcgacgatgatcctcacagactgcttcagcagctcgtgctgagtggaaatcttatcaaggaagccgtgaggcggcttcactcacgacgcctccagcttagggctaaattgccccagagacccctgcttggacccctgtctgctcccgttcacgagccgccatcgcctagatcaccccgtgccgcttgctcagatcccggagcatccggcagagcacagctgcgcacaggtgacggcgtcctggtgcccggttcttag

SEQ ID NO: 156442 - protein, 751 aa, Artificial Sequence
  derived and/or modified sequence
MCDLRRPAAGGMMDLAYVCEWEKWSKSTHCPSVPLACAWSCRNLIAFTMDLRSDDQDLTRMIHILDTEHPWDLHSIPSEHHEAITCLEWDQSGSRLLSADADGQIKCWSMADHLANSWESSVGSLVEGDPIVALSWLHNGVKLALHVEKSGASSFGEKFSRVKFSPSLTLFGGKPMEGWIAVTVSGLVTVSLLKPSGQVLTSTESLCRLRGRVALADIAFTGGGNIVVATADGSSASPVQFYKVCVSVVSEKCRIDTEILPSLFMRCTTDLNRKDKFPAITHLKFLARDMSEQVLLCASSQTSSIVECWSLRKEGLPVNNIFQQISPVVGDKQPTILKWRILSATNDLDRVSAVALPKLPISLTNTDLKVASDTQFYPGLGLALAFHDGSVHIVHRLSLQTMAVFYSSAAPRPVDEPAMKRPRTAGPAVHLKAMQLSWTSLALVGIDSHGKLSVLRLSPSMGHPLEVGLALRHLLFLLEYCMVTGYDWWDILLHVQPSMVQSLVEKLHEEYTRQTAALQQVLSTRILAMKASLCKLSPCTVTRVCDYHTKLFLIAISSTLKSLLRPHFLNTPDKSPGDRLTEICTKITDVDIDKVMINLKTEEFVLDMNTLQALQQLLQWVGDFVLYLLASLPNQVAMRAQRASRTRRWWMNAACCPASCLSPAWTGCQPATAWLAACSPSSPFVCSLAGRPRCLAVLPPCSSTASPGPQASPRSTTCGGCTLALAPRRNARPAPGAAVSPCSSRPTEPRR

SEQ ID NO: 156443 - protein, 860 aa, Artificial Sequence
  derived and/or modified sequence
MCDLRRPAAGGMMDLAYVCEWEKWSKSTHCPSVPLACAWSCRNLIAFTMDLRSDDQDLTRMIHILDTEHPWDLHSIPSEHHEAITCLEWDQSGSRLLSADADGQIKCWSMADHLANSWESSVGSLVEGDPIVALSWLHNGVKLALHVEKSGASSFGEKFSRVKFSPSLTLFGGKPMEGWIAVTVSGLVTVSLLKPSGQVLTSTESLCRLRGRVALADIAFTGGGNIVVATADGSSASPVQFYKVCVSVVSEKCRIDTEILPSLFMRCTTDLNRKDKFPAITHLKFLARDMSEQVLLCASSQTSSIVECWSLRKEGLPVNNIFQQISPVVGDKQPTILKWRILSATNDLDRVSAVALPKLPISLTNTDLKVASDTQFYPGLGLALAFHDGSVHIVHRLSLQTMAVFYSSAAPRPVDEPAMKRPRTAGPAVHLKAMQLSWTSLALVGIDSHGKLSVLRLSPSMGHPLEVGLALRHLLFLLEYCMVTGYDWWDILLHVQPSMVQSLVEKLHEEYTRQTAALQQVLSTRILAMKASLCKLSPCTVTRVCDYHTKLFLIAISSTLKSLLRPHFLNTPDKSPGDRLTEICTKITDVDIDKVMINLKTEEFVLDMNTLQALQQLLQWVGDFVLYLLASLPNQGSLLRPGHSFLRDGTSLGMLRELMVVIRIWGLLKPSCLPVYTATSDTQDSMSLLFRLLTKLWICFPSTGPCSVWVLLGWQPLPGRDEGPASEPDEALVDECCLLPSQLLIPSLDWLPASDGLVSRLQPKQPLRLQFGRAPTLPGSAATLQLDGLARAPGQPKIDHLRRLHLGACPTEECKACTRCGCVTMLKSPNRTTAVKQWEQRWIKNCLCGGLWWRVPLSYP

SEQ ID NO: 156444 - protein, 877 aa, Artificial Sequence
  derived and/or modified sequence
MCDLRRPAAGGMMDLAYVCEWEKWSKSTHCPSVPLACAWSCRNLIAFTMDLRSDDQDLTRMIHILDTEHPWDLHSIPSEHHEAITCLEWDQSGSRLLSADADGQIKCWSMADHLANSWESSVGSLVEGDPIVALSWLHNGVKLALHVEKSGASSFGEKFSRVKFSPSLTLFGGKPMEGWIAVTVSGLVTVSLLKPSGQVLTSTESLCRLRGRVALADIAFTGGGNIVVATADGSSASPVQFYKVCVSVVSEKCRIDTEILPSLFMRCTTDLNRKDKFPAITHLKFLARDMSEQVLLCASSQTSSIVECWSLRKEGLPVNNIFQQISPVVGDKQPTILKWRILSATNDLDRVSAVALPKLPISLTNTDLKVASDTQFYPGLGLALAFHDGSVHIVHRLSLQTMAVFYSSAAPRPVDEPAMKRPRTAGPAVHLKAMQLSWTSLALVGIDSHGKLSVLRLSPSMGHPLEVGLALRHLLFLLEYCMVTGYDWWDILLHVQPSMVQSLVEKLHEEYTRQTAALQQVLSTRILAMKASLCKLSPCTVTRVCDYHTKLFLIAISSTLKSLLRPHFLNTPDKSPGDRLTEICTKITDVDIDKVMINLKTEEFVLDMNTLQALQQLLQWVGDFVLYLLASLPNQGSLLRPGHSFLRDGTSLGMLRELMVVIRIWGLLKPSCLPVYTATSDTQDSMSLLFRLLTKLWICCRDEGPASEPDEALVDECCLLPSQLLIPSLDWLPASDGLVSRLQPKQPLRLQFGRAPTLPGSAATLQLDGLARAPGQPKIDHLRRLHLGACPTEECKACTRCGCVTMLKSPNRTTAVKQWEQRWIKNCLAVEGRGPDACVTSRASEEAPAFVQLGPQSTHHSPRTPRSLDHLHPEDRP

SEQ ID NO: 156445 - protein, 841 aa, Artificial Sequence
  derived and/or modified sequence
MCDLRRPAAGGMMDLAYVCEWEKWSKSTHCPSVPLACAWSCRNLIAFTMDLRSDDQDLTRMIHILDTEHPWDLHSIPSEHHEAITCLEWDQSGSRLLSADADGQIKCWSMADHLANSWESSVGSLVEGDPIVALSWLHNGVKLALHVEKSGASSFGEKFSRVKFSPSLTLFGGKPMEGWIAVTVSGLVTVSLLKPSGQVLTSTESLCRLRGRVALADIAFTGGGNIVVATADGSSASPVQFYKVCVSVVSEKCRIDTEILPSLFMRCTTDLNRKDKFPAITHLKFLARDMSEQVLLCASSQTSSIVECWSLRKEGLPVNNIFQQISPVVGDKQPTILKWRILSATNDLDRVSAVALPKLPISLTNTDLKVASDTQFYPGLGLALAFHDGSVHIVHRLSLQTMAVFYSSAAPRPVDEPAMKRPRTAGPAVHLKAMQLSWTSLALVGIDSHGKLSVLRLSPSMGHPLEVGLALRHLLFLLEYCMVTGYDWWDILLHVQPSMVQSLVEKLHEEYTRQTAALQQVLSTRILAMKASLCKLSPCTVTRVCDYHTKLFLIAISSTLKSLLRPHFLNTPDKSPGDRLTEICTKITDVDIDKVMINLKTEEFVLDMNTLQALQQLLQWVGDFVLYLLASLPNQGSLLRPGHSFLRDGTSLGMLRELMVVIRIWGLLKPSCLPVYTATSDTQDSMSLLFRLLTKLWICCRDEGPASEPDEALVDECCLLPSQLLIPSLDWLPASDGLVSRLQPKQPLRLQFGRAPTLPGSAATLQLDGLARAPGQPKIDHLRRLHLGACPTEECKACTRCGCVTMLKSPNRTTAVKQWEQRWIKNCLCGGLWWRVPLSYP

SEQ ID NO: 156446 - protein, 663 aa, Artificial Sequence
  derived and/or modified sequence
MCDLRRPAAGGMMDLAYVCEWEKWSKSTHCPSVPLACAWSCRNLIAFTMDLRSDDQDLTRMIHILDTEHPWDLHSIPSEHHEAITCLEWDQSGSRLLSADADGQIKCWSMADHLANSWESSVGSLVEGDPIVALSWLHNGVKLALHVEKSGASSFGEKFSRVKFSPSLTLFGGKPMEGWIAVTVSGLVTVSLLKPSGQVLTSTESLCRLRGRVALADIAFTGGGNIVVATADGSSASPVQFYKVCVSVVSEKCRIDTEILPSLFMRCTTDLNRKDKFPAITHLKFLARDMSEQVLLCASSQTSSIVECWSLRKEGLPVNNIFQQISPVVGDKQPTILKWRILSATNDLDRVSAVALPKLPISLTNTDLKVASDTQFYPGLGLALAFHDGSVHIVHRLSLQTMAVFYSSAAPRPVDEPAMKRPRTAGPAVHLKAMQLSWTSLALVGIDSHGKLSVLRLSPSMGHPLEVGLALRHLLFLLEYCMVTGYDWWDILLHVQPSMVQSLVEKLHEEYTRQTAALQQVLSTRILAMKASLCKLSPCTVTRVCDYHTKLFLIAISSTLKSLLRPHFLNTPDKSPGDRLTEICTKITDVDIDKVMINLKTEEFVLDMNTLQALQQLLQWVGDFVLYLLASLPNQPCPTSEPCPTSEPCPTSEPSPTSEPSPT

SEQ ID NO: 156447 - protein, 462 aa, Artificial Sequence
  derived and/or modified sequence
MCDLRRPAAGGMMDLAYVCEWEKWSKSTHCPSVPLACAWSCRNLIAFTMDLRSDDQDLTRMIHILDTEHPWDLHSIPSEHHEAITCLEWDQSGSRLLSADADGQIKCWSMADHLANSWESSVGSLVEGDPIVALSWLHNGVKLALHVEKVLLCASSQTSSIVECWSLRKEGLPVNNIFQQISPVVGDKQPTILKWRILSATNDLDRVSAVALPKLPISLTNTDLKVASDTQFYPGLGLALAFHDGSVHIVHRLSLQTMAVFYSSAAPRPVDEPAMKRPRTAGPAVHLKAMQLSWTSLALVGIDSHGKLSVLRLSPSMGHPLEVGLALRHLLFLLEYCMVTGYDWWDILLHVQPSMVQSLVEKLHEEYTRQTAALQQVLSTRILAMKASLCKLSPCTVTRVCDYHTKLFLIAISSTLKSLLRPHFLNTPDKSPGDRLTEICTKITDVDIDKVMINLKTEEFVL

SEQ ID NO: 156448 - protein, 365 aa, Artificial Sequence
  derived and/or modified sequence
MCDLRRPAAGGMMDLAYVCEWEKWSKSTHCPSVPLACAWSCRNLIAFTMDLRSDDQDLTRMIHILDTEHPWDLHSIPSEHHEAITCLEWDQSGSRLLSADADGQIKCWSMADHLANSWESSVGSLVEGDPIVALSWLHNGLALAFHDGSVHIVHRLSLQTMAVFYSSAAPRPVDEPAMKRPRTAGPAVHLKAMQLSWTSLALVGIDSHGKLSVLRLSPSMGHPLEVGLALRHLLFLLEYCMVTGYDWWDILLHVQPSMVQSLVEKLHEEYTRQTAALQQVLSTRILAMKASLCKLSPCTVTRVCDYHTKLFLIAISSTLKSLLRPHFLNTPDKSPGDRLTEICTKITDVDIDKVMINLKTEEFVL

SEQ ID NO: 156449 - protein, 367 aa, Artificial Sequence
  derived and/or modified sequence
MCDLRRPAAGGMMDLAYVCEWEKWSKSTHCPSVPLACAWSCRNLIAFTMDLRSDDQDLTRMIHILDTEHPWDLHSIPSEHHEAITCLEWDQSGSRLLSADADGQIKCWSMADHLANSWESSVGSLVEGDPIVALSWLHNGVRLALAFHDGSVHIVHRLSLQTMAVFYSSAAPRPVDEPAMKRPRTAGPAVHLKAMQLSWTSLALVGIDSHGKLSVLRLSPSMGHPLEVGLALRHLLFLLEYCMVTGYDWWDILLHVQPSMVQSLVEKLHEEYTRQTAALQQVLSTRILAMKASLCKLSPCTVTRVCDYHTKLFLIAISSTLKSLLRPHFLNTPDKSPGDRLTEICTKITDVDIDKVMINLKTEEFVL

SEQ ID NO: 156450 - protein, 324 aa, Artificial Sequence
  derived and/or modified sequence
MCDLRRPAAGGMMDLAYVCEWEKWSKSTHCPSVPLACAWSCRNLIAFTMDLRSDDQDLTRMIHILDTEHPWDLHSIPSEHHEAITCLEWDQSGSRLLSADADGQIKCWSMADHLANSWESSVGSLVEGDPIVALSWLHNGVKLALHVEKSGASSFGEKFSRVKFSPSLTLFGGKPMEGWIAVTVSGLVTVSLLFLLEYCMVTGYDWWDILLHVQPSMVQSLVEKLHEEYTRQTAALQQVLSTRILAMKASLCKLSPCTVTRVCDYHTKLFLIAISSTLKSLLRPHFLNTPDKSPGDRLTEICTKITDVDIDKVMINLKTEEFVL

SEQ ID NO: 156451 - DNA, 2952 bp, Artificial Sequence
  derived and/or modified sequence
cagaagtctttgggaggcggccccacgcctcaggcgactggttgttaccgaggaagatggcggcgccagacccgaggcgctagggaagatcgcaccgcggacgcccgctgagcttggcgcacgggccgaccaggagctggtgactgccctcatgtgtgatttgcggcggccagcggcaggtgggatgatggacttggcctacgtctgtgagtgggagaaatggtccaagagcacccactgcccatcggtgcccctggcctgcgcctggtcctgccgaaatctcatcgccttcaccatggacctgcgcagcgatgaccaggacctgacccgcatgatccacatcctggacacggagcacccctgggacctgcactcgatcccctcagagcaccacgaggccatcacctgcctggagtgggaccagtcaggctcccggctcctgtcagcagatgccgacgggcagatcaagtgctggagcatggcggaccacctggctaatagctgggagagctcagtgggcagcctagtggagggggaccccattgtggccctgtcctggctgcacaatggtgtgaaactggccctgcacgtggagaagtcgggcgcctccagcttcggggagaagttctcccgagtcaagttctcaccgtcgctcacgctgttcggcggcaagcccatggagggctggatcgcggtgacggtcagcggcctggtcaccgtgtccctgctgaagcccagcgggcaggtgctgacgtccaccgagagcctgtgccggctgcgcggccgcgtggccctggccgacatcgccttcaccggcggcggcaacatcgtggtggccacggcggacggcagcagcgcgtcgcccgtgcagttctacaaggtgtgcgtgagcgtggtgagcgagaagtgccgtatcgacacggagatcctgccctccctgttcatgcgctgcaccaccgacctcaaccgcaaggacaagtttcccgccatcacccacctcaagttcctggcccgggacatgtcggagcaggtgcttttgtgcgcgtccagccagaccagcagcatcgtggagtgctggtccctgcgcaaggagggactccccgtgaacaacatcttccagcagatctcccccgtggttggcgacaaacagcccacaattctcaaatggcggatcctatcggccaccaacgatctggaccgtgtgtcggccgtggcgctgcccaagctgcccatctcgctcaccaacaccgacctcaaggtggccagcgacacacagttctaccctggcctcgggctggccctggccttccacgacggcagcgtccacatcgtgcaccggctctcactgcagaccatggccgtcttctacagctccgcggccccgaggcctgtggatgagccggccatgaagcgcccccgcaccgcgggccccgccgtccacttaaaggctatgcagctatcgtggacgtcactggccctggtggggattgacagccacgggaagctgagcgtgctccgcctctcaccttccatgggccacccgctggaggtggggctggcgctgcggcacctgctcttcctgctggagtactgcatggtgaccggctacgactggtgggacatcctgctgcacgtgcagcccagtatggtacagagcctggtggagaagctgcacgaggagtacacgcgccagaccgctgccctgcagcaggtcctctccacccggatcctggccatgaaggcctcgctctgcaagctgtcgccctgcacggtgacccgcgtgtgcgactaccacaccaagctcttcctcatcgccatcagctccaccctgaagtcgctgctgcgcccccactttctcaacacgcctgacaagagccccggcgaccggctgaccgagatctgcaccaagatcaccgacgtcgacattgacaaggtcatgatcaacctcaagacggaggaatttgtgctggacatgaacacactgcaggcgctgcagcagctcttgcagtgggtgggcgacttcgtgctgtacctgctggccagcctacccaaccagggttccctgctgaggccgggccacagctttctgcgggacggcacctcgctgggcatgcttcgggaattgatggtggtcatccgcatctggggccttctgaagcccagctgcctgcccgtgtatacggccacctcggatacccaggacagcatgtccctgctcttccgcctgctcaccaagctctggatctgctgtcgcgatgagggcccagcgagcgagccggacgaggcgctggtggatgaatgctgcctgctgcccagccagctgcttatccccagcctggactggctgccagccagcgacggcctggttagccgcctgcagcccaagcagccccttcgtctgcagtttggccgggcgcccacgctgcctggcagtgctgccaccctgcagctcgacggcctcgccagggccccaggccagcccaagatcgaccacctgcggaggctgcaccttggcgcttgccccacggaggaatgcaaggcctgcaccaggtgcggctgtgtcaccatgctcaagtcgcccaacagaaccacggcggtgaagcagtgggagcagcgctggatcaagaactgcctggctgttgaaggccgtgggccggacgcctgcgtgaccagcagagcttctgaggaagcccctgcctttgtccagctgggcccgcagtccacacaccactctcccaggacccccagatccctggaccatctgcatccagaggaccgtccgtgacggccgggggtccaggcggaccttgtggtgacccggctcgggcgtctcctcggtttccttgcctcacccgcggagagcgctgaacctggacaagcagcggctgggaaggacaggtccaataaacgccctctgcgcccagaaaaaaaaaaaaaaaaaaaaaaaaaaaa

SEQ ID NO: 156452 - DNA, 2875 bp, Artificial Sequence
  derived and/or modified sequence
ggccccacgcctcaggcgactggttgttaccgaggaagatggcggcgccagacccgaggcgctagggaagatcgcaccgcggacgcccgctgagcttggcgcacgggccgaccaggagctggtgactgccctcatgtgtgatttgcggcggccagcggcaggtgggatgatggacttggcctacgtctgtgagtgggagaaatggtccaagagcacccactgcccatcggtgcccctggcctgcgcctggtcctgccgaaatctcatcgccttcaccatggacctgcgcagcgatgaccaggacctgacccgcatgatccacatcctggacacggagcacccctgggacctgcactcgatcccctcagagcaccacgaggccatcacctgcctggagtgggaccagtcaggctcccggctcctgtcagcagatgccgacgggcagatcaagtgctggagcatggcggaccacctggctaatagctgggagagctcagtgggcagcctagtggagggggaccccattgtggccctgtcctggctgcacaatggtgtgaaactggccctgcacgtggagaagtcgggcgcctccagcttcggggagaagttctcccgagtcaagttctcaccgtcgctcacgctgttcggcggcaagcccatggagggctggatcgcggtgacggtcagcggcctggtcaccgtgtccctgctgaagcccagcgggcaggtgctgacgtccaccgagagcctgtgccggctgcgcggccgcgtggccctggccgacatcgccttcaccggcggcggcaacatcgtggtggccacggcggacggcagcagcgcgtcgcccgtgcagttctacaaggtgtgcgtgagcgtggtgagcgagaagtgccgtatcgacacggagatcctgccctccctgttcatgcgctgcaccaccgacctcaaccgcaaggacaagtttcccgccatcacccacctcaagttcctggcccgggacatgtcggagcaggtgcttttgtgcgcgtccagccagaccagcagcatcgtggagtgctggtccctgcgcaaggagggactccccgtgaacaacatcttccagcagatctcccccgtggttggcgacaaacagcccacaattctcaaatggcggatcctatcggccaccaacgatctggaccgtgtgtcggccgtggcgctgcccaagctgcccatctcgctcaccaacaccgacctcaaggtggccagcgacacacagttctaccctggcctcgggctggccctggccttccacgacggcagcgtccacatcgtgcaccggctctcactgcagaccatggccgtcttctacagctccgcggccccgaggcctgtggatgagccggccatgaagcgcccccgcaccgcgggccccgccgtccacttaaaggctatgcagctatcgtggacgtcactggccctggtggggattgacagccacgggaagctgagcgtgctccgcctctcaccttccatgggccacccgctggaggtggggctggcgctgcggcacctgctcttcctgctggagtactgcatggtgaccggctacgactggtgggacatcctgctgcacgtgcagcccagtatggtacagagcctggtggagaagctgcacgaggagtacacgcgccagaccgctgccctgcagcaggtcctctccacccggatcctggccatgaaggcctcgctctgcaagctgtcgccctgcacggtgacccgcgtgtgcgactaccacaccaagctcttcctcatcgccatcagctccaccctgaagtcgctgctgcgcccccactttctcaacacgcctgacaagagccccggcgaccggctgaccgagatctgcaccaagatcaccgacgtcgacattgacaaggtcatgatcaacctcaagacggaggaatttgtgctggacatgaacacactgcaggcgctgcagcagctcttgcagtgggtgggcgacttcgtgctgtacctgctggccagcctacccaaccaggtcgcgatgagggcccagcgagcgagccggacgaggcgctggtggatgaatgctgcctgctgcccagccagctgcttatccccagcctggactggctgccagccagcgacggcctggttagccgcctgcagcccaagcagccccttcgtctgcagtttggccgggcgcccacgctgcctggcagtgctgccaccctgcagctcgacggcctcgccagggccccaggccagcccaagatcgaccacctgcggaggctgcaccttggcgcttgccccacggaggaatgcaaggcctgcaccaggtgcggctgtgtcaccatgctcaagtcgcccaacagaaccacggcggtgaagcagtgggagcagcgctggatcaagaactgcctgtgcggtgggctctggtggcgggtgcccctcagctacccctgagcccagctgcccctcagctactcctcagctacccctcagctgcccctgagcccggctgctgcaagagccaccgctcgccctggactctcctcggcgcggttaacctcagcccgccctgcagggctgttgaaggccgtgggccggacgcctgcgtgaccagcagagcttctgaggaagcccctgcctttgtccagctgggcccgcagtccacacaccactctcccaggacccccagatccctggaccatctgcatccagaggaccgtccgtgacggccgggggtccaggcggaccttgtggtgacccggctcgggcgtctcctcggtttccttgcctcacccgcggagagcgctgaacctggacaagcagcggctgggaaggacaggtccaataaacgccctctgcgccc

SEQ ID NO: 156453 - DNA, 3125 bp, Artificial Sequence
  derived and/or modified sequence
ggccccacgcctcaggcgactggttgttaccgaggaagatggcggcgccagacccgaggcgctagggaagatcgcaccgcggacgcccgctgagcttggcgcacgggccgaccaggagctggtgactgccctcatgtgtgatttgcggcggccagcggcaggtgggatgatggacttggcctacgtctgtgagtgggagaaatggtccaagagcacccactgcccatcggtgcccctggcctgcgcctggtcctgccgaaatctcatcgccttcaccatggacctgcgcagcgatgaccaggacctgacccgcatgatccacatcctggacacggagcacccctgggacctgcactcgatcccctcagagcaccacgaggccatcacctgcctggagtgggaccagtcaggctcccggctcctgtcagcagatgccgacgggcagatcaagtgctggagcatggcggaccacctggctaatagctgggagagctcagtgggcagcctagtggagggggaccccattgtggccctgtcctggctgcacaatggtgtgaaactggccctgcacgtggagaagtcgggcgcctccagcttcggggagaagttctcccgagtcaagttctcaccgtcgctcacgctgttcggcggcaagcccatggagggctggatcgcggtgacggtcagcggcctggtcaccgtgtccctgctgaagcccagcgggcaggtgctgacgtccaccgagagcctgtgccggctgcgcggccgcgtggccctggccgacatcgccttcaccggcggcggcaacatcgtggtggccacggcggacggcagcagcgcgtcgcccgtgcagttctacaaggtgtgcgtgagcgtggtgagcgagaagtgccgtatcgacacggagatcctgccctccctgttcatgcgctgcaccaccgacctcaaccgcaaggacaagtttcccgccatcacccacctcaagttcctggcccgggacatgtcggagcaggtgcttttgtgcgcgtccagccagaccagcagcatcgtggagtgctggtccctgcgcaaggagggactccccgtgaacaacatcttccagcagatctcccccgtggttggcgacaaacagcccacaattctcaaatggcggatcctatcggccaccaacgatctggaccgtgtgtcggccgtggcgctgcccaagctgcccatctcgctcaccaacaccgacctcaaggtggccagcgacacacagttctaccctggcctcgggctggccctggccttccacgacggcagcgtccacatcgtgcaccggctctcactgcagaccatggccgtcttctacagctccgcggccccgaggcctgtggatgagccggccatgaagcgcccccgcaccgcgggccccgccgtccacttaaaggctatgcagctatcgtggacgtcactggccctggtggggattgacagccacgggaagctgagcgtgctccgcctctcaccttccatgggccacccgctggaggtggggctggcgctgcggcacctgctcttcctgctggagtactgcatggtgaccggctacgactggtgggacatcctgctgcacgtgcagcccagtatggtacagagcctggtggagaagctgcacgaggagtacacgcgccagaccgctgccctgcagcaggtcctctccacccggatcctggccatgaaggcctcgctctgcaagctgtcgccctgcacggtgacccgcgtgtgcgactaccacaccaagctcttcctcatcgccatcagctccaccctgaagtcgctgctgcgcccccactttctcaacacgcctgacaagagccccggcgaccggctgaccgagatctgcaccaagatcaccgacgtcgacattgacaaggtcatgatcaacctcaagacggaggaatttgtgctggacatgaacacactgcaggcgctgcagcagctcttgcagtgggtgggcgacttcgtgctgtacctgctggccagcctacccaaccagggttccctgctgaggccgggccacagctttctgcgggacggcacctcgctgggcatgcttcgggaattgatggtggtcatccgcatctggggccttctgaagcccagctgcctgcccgtgtatacggccacctcggatacccaggacagcatgtccctgctcttccgcctgctcaccaagctctggatctgctttcctagcacaggtccatgctctgtgtgggtgcttttgggatggcagccacttccaggtcgcgatgagggcccagcgagcgagccggacgaggcgctggtggatgaatgctgcctgctgcccagccagctgcttatccccagcctggactggctgccagccagcgacggcctggttagccgcctgcagcccaagcagccccttcgtctgcagtttggccgggcgcccacgctgcctggcagtgctgccaccctgcagctcgacggcctcgccagggccccaggccagcccaagatcgaccacctgcggaggctgcaccttggcgcttgccccacggaggaatgcaaggcctgcaccaggtgcggctgtgtcaccatgctcaagtcgcccaacagaaccacggcggtgaagcagtgggagcagcgctggatcaagaactgcctgtgcggtgggctctggtggcgggtgcccctcagctacccctgagcccagctgcccctcagctactcctcagctacccctcagctgcccctgagcccggctgctgcaagagccaccgctcgccctggactctcctcggcgcggttaacctcagcccgccctgcagggctgttgaaggccgtgggccggacgcctgcgtgaccagcagagcttctgaggaagcccctgcctttgtccagctgggcccgcagtccacacaccactctcccaggacccccagatccctggaccatctgcatccagaggaccgtccgtgacggccgggggtccaggcggaccttgtggtgacccggctcgggcgtctcctcggtttccttgcctcacccgcggagagcgctgaacctggacaagcagcggctgggaaggacaggtccaataaacgccctctgcgccc

SEQ ID NO: 156454 - DNA, 2922 bp, Artificial Sequence
  derived and/or modified sequence
cagaagtctttgggaggcggccccacgcctcaggcgactggttgttaccgaggaagatggcggcgccagacccgaggcgctagggaagatcgcaccgcggacgcccgctgagcttggcgcacgggccgaccaggagctggtgactgccctcatgtgtgatttgcggcggccagcggcaggtgggatgatggacttggcctacgtctgtgagtgggagaaatggtccaagagcacccactgcccatcggtgcccctggcctgcgcctggtcctgccgaaatctcatcgccttcaccatggacctgcgcagcgatgaccaggacctgacccgcatgatccacatcctggacacggagcacccctgggacctgcactcgatcccctcagagcaccacgaggccatcacctgcctggagtgggaccagtcaggctcccggctcctgtcagcagatgccgacgggcagatcaagtgctggagcatggcggaccacctggctaatagctgggagagctcagtgggcagcctagtggagggggaccccattgtggccctgtcctggctgcacaatggtgtgaaactggccctgcacgtggagaagtcgggcgcctccagcttcggggagaagttctcccgagtcaagttctcaccgtcgctcacgctgttcggcggcaagcccatggagggctggatcgcggtgacggtcagcggcctggtcaccgtgtccctgctgaagcccagcgggcaggtgctgacgtccaccgagagcctgtgccggctgcgcggccgcgtggccctggccgacatcgccttcaccggcggcggcaacatcgtggtggccacggcggacggcagcagcgcgtcgcccgtgcagttctacaaggtgtgcgtgagcgtggtgagcgagaagtgccgtatcgacacggagatcctgccctccctgttcatgcgctgcaccaccgacctcaaccgcaaggacaagtttcccgccatcacccacctcaagttcctggcccgggacatgtcggagcaggtgcttttgtgcgcgtccagccagaccagcagcatcgtggagtgctggtccctgcgcaaggagggactccccgtgaacaacatcttccagcagatctcccccgtggttggcgacaaacagcccacaattctcaaatggcggatcctatcggccaccaacgatctggaccgtgtgtcggccgtggcgctgcccaagctgcccatctcgctcaccaacaccgacctcaaggtggccagcgacacacagttctaccctggcctcgggctggccctggccttccacgacggcagcgtccacatcgtgcaccggctctcactgcagaccatggccgtcttctacagctccgcggccccgaggcctgtggatgagccggccatgaagcgcccccgcaccgcgggccccgccgtccacttaaaggctatgcagctatcgtggacgtcactggccctggtggggattgacagccacgggaagctgagcgtgctccgcctctcaccttccatgggccacccgctggaggtggggctggcgctgcggcacctgctcttcctgctggagtactgcatggtgaccggctacgactggtgggacatcctgctgcacgtgcagcccagtatggtacagagcctggtggagaagctgcacgaggagtacacgcgccagaccgctgccctgcagcaggtcctctccacccggatcctggccatgaaggcctcgctctgcaagctgtcgccctgcacggtgacccgcgtgtgcgactaccacaccaagctcttcctcatcgccatcagctccaccctgaagtcgctgctgcgcccccactttctcaacacgcctgacaagagccccggcgaccggctgaccgagatctgcaccaagatcaccgacgtcgacattgacaaggtcatgatcaacctcaagacggaggaatttgtgctggacatgaacacactgcaggcgctgcagcagctcttgcagtgggtgggcgacttcgtgctgtacctgctggccagcctacccaaccagggttccctgctgaggccgggccacagctttctgcgggacggcacctcgctgggcatgcttcgggaattgatggtggtcatccgcatctggggccttctgaagcccagctgcctgcccgtgtatacggccacctcggatacccaggacagcatgtccctgctcttccgcctgctcaccaagctctggatctgctgtcgcgatgagggcccagcgagcgagccggacgaggcgctggtggatgaatgctgcctgctgcccagccagctgcttatccccagcctggactggctgccagccagcgacggcctggttagccgcctgcagcccaagcagccccttcgtctgcagtttggccgggcgcccacgctgcctggcagtgctgccaccctgcagctcgacggcctcgccagggccccaggccagcccaagatcgaccacctgcggaggctgcaccttggcgcttgccccacggaggaatgcaaggcctgcaccaggtgcggctgtgtcaccatgctcaagtcgcccaacagaaccacggcggtgaagcagtgggagcagcgctggatcaagaactgcctggctgttgaaggccgtgggccggacgcctgcgtgaccagcagagcttctgaggaagcccctgcctttgtccagctgggcccgcagtccacacaccactctcccaggacccccagatccctggaccatctgcatccagaggaccgtccgtgacggccgggggtccaggcggaccttgtggtgacccggctcgggcgtctcctcggtttccttgcctcacccgcggagagcgctgaacctggacaagcagcggctgggaaggacaggtccaataaacgccctctgcgccc

SEQ ID NO: 156455 - DNA, 3068 bp, Artificial Sequence
  derived and/or modified sequence
ggccccacgcctcaggcgactggttgttaccgaggaagatggcggcgccagacccgaggcgctagggaagatcgcaccgcggacgcccgctgagcttggcgcacgggccgaccaggagctggtgactgccctcatgtgtgatttgcggcggccagcggcaggtgggatgatggacttggcctacgtctgtgagtgggagaaatggtccaagagcacccactgcccatcggtgcccctggcctgcgcctggtcctgccgaaatctcatcgccttcaccatggacctgcgcagcgatgaccaggacctgacccgcatgatccacatcctggacacggagcacccctgggacctgcactcgatcccctcagagcaccacgaggccatcacctgcctggagtgggaccagtcaggctcccggctcctgtcagcagatgccgacgggcagatcaagtgctggagcatggcggaccacctggctaatagctgggagagctcagtgggcagcctagtggagggggaccccattgtggccctgtcctggctgcacaatggtgtgaaactggccctgcacgtggagaagtcgggcgcctccagcttcggggagaagttctcccgagtcaagttctcaccgtcgctcacgctgttcggcggcaagcccatggagggctggatcgcggtgacggtcagcggcctggtcaccgtgtccctgctgaagcccagcgggcaggtgctgacgtccaccgagagcctgtgccggctgcgcggccgcgtggccctggccgacatcgccttcaccggcggcggcaacatcgtggtggccacggcggacggcagcagcgcgtcgcccgtgcagttctacaaggtgtgcgtgagcgtggtgagcgagaagtgccgtatcgacacggagatcctgccctccctgttcatgcgctgcaccaccgacctcaaccgcaaggacaagtttcccgccatcacccacctcaagttcctggcccgggacatgtcggagcaggtgcttttgtgcgcgtccagccagaccagcagcatcgtggagtgctggtccctgcgcaaggagggactccccgtgaacaacatcttccagcagatctcccccgtggttggcgacaaacagcccacaattctcaaatggcggatcctatcggccaccaacgatctggaccgtgtgtcggccgtggcgctgcccaagctgcccatctcgctcaccaacaccgacctcaaggtggccagcgacacacagttctaccctggcctcgggctggccctggccttccacgacggcagcgtccacatcgtgcaccggctctcactgcagaccatggccgtcttctacagctccgcggccccgaggcctgtggatgagccggccatgaagcgcccccgcaccgcgggccccgccgtccacttaaaggctatgcagctatcgtggacgtcactggccctggtggggattgacagccacgggaagctgagcgtgctccgcctctcaccttccatgggccacccgctggaggtggggctggcgctgcggcacctgctcttcctgctggagtactgcatggtgaccggctacgactggtgggacatcctgctgcacgtgcagcccagtatggtacagagcctggtggagaagctgcacgaggagtacacgcgccagaccgctgccctgcagcaggtcctctccacccggatcctggccatgaaggcctcgctctgcaagctgtcgccctgcacggtgacccgcgtgtgcgactaccacaccaagctcttcctcatcgccatcagctccaccctgaagtcgctgctgcgcccccactttctcaacacgcctgacaagagccccggcgaccggctgaccgagatctgcaccaagatcaccgacgtcgacattgacaaggtcatgatcaacctcaagacggaggaatttgtgctggacatgaacacactgcaggcgctgcagcagctcttgcagtgggtgggcgacttcgtgctgtacctgctggccagcctacccaaccagggttccctgctgaggccgggccacagctttctgcgggacggcacctcgctgggcatgcttcgggaattgatggtggtcatccgcatctggggccttctgaagcccagctgcctgcccgtgtatacggccacctcggatacccaggacagcatgtccctgctcttccgcctgctcaccaagctctggatctgctgtcgcgatgagggcccagcgagcgagccggacgaggcgctggtggatgaatgctgcctgctgcccagccagctgcttatccccagcctggactggctgccagccagcgacggcctggttagccgcctgcagcccaagcagccccttcgtctgcagtttggccgggcgcccacgctgcctggcagtgctgccaccctgcagctcgacggcctcgccagggccccaggccagcccaagatcgaccacctgcggaggctgcaccttggcgcttgccccacggaggaatgcaaggcctgcaccaggtgcggctgtgtcaccatgctcaagtcgcccaacagaaccacggcggtgaagcagtgggagcagcgctggatcaagaactgcctgtgcggtgggctctggtggcgggtgcccctcagctacccctgagcccagctgcccctcagctactcctcagctacccctcagctgcccctgagcccggctgctgcaagagccaccgctcgccctggactctcctcggcgcggttaacctcagcccgccctgcagggctgttgaaggccgtgggccggacgcctgcgtgaccagcagagcttctgaggaagcccctgcctttgtccagctgggcccgcagtccacacaccactctcccaggacccccagatccctggaccatctgcatccagaggaccgtccgtgacggccgggggtccaggcggaccttgtggtgacccggctcgggcgtctcctcggtttccttgcctcacccgcggagagcgctgaacctggacaagcagcggctgggaaggacaggtccaataaacgccctctgcgccc

SEQ ID NO: 156456 - DNA, 2122 bp, Artificial Sequence
  derived and/or modified sequence
ggccccacgcctcaggcgactggttgttaccgaggaagatggcggcgccagacccgaggcgctagggaagatcgcaccgcggacgcccgctgagcttggcgcacgggccgaccaggagctggtgactgccctcatgtgtgatttgcggcggccagcggcaggtgggatgatggacttggcctacgtctgtgagtgggagaaatggtccaagagcacccactgcccatcggtgcccctggcctgcgcctggtcctgccgaaatctcatcgccttcaccatggacctgcgcagcgatgaccaggacctgacccgcatgatccacatcctggacacggagcacccctgggacctgcactcgatcccctcagagcaccacgaggccatcacctgcctggagtgggaccagtcaggctcccggctcctgtcagcagatgccgacgggcagatcaagtgctggagcatggcggaccacctggctaatagctgggagagctcagtgggcagcctagtggagggggaccccattgtggccctgtcctggctgcacaatggtgtgaaactggccctgcacgtggagaagtcgggcgcctccagcttcggggagaagttctcccgagtcaagttctcaccgtcgctcacgctgttcggcggcaagcccatggagggctggatcgcggtgacggtcagcggcctggtcaccgtgtccctgctgaagcccagcgggcaggtgctgacgtccaccgagagcctgtgccggctgcgcggccgcgtggccctggccgacatcgccttcaccggcggcggcaacatcgtggtggccacggcggacggcagcagcgcgtcgcccgtgcagttctacaaggtgtgcgtgagcgtggtgagcgagaagtgccgtatcgacacggagatcctgccctccctgttcatgcgctgcaccaccgacctcaaccgcaaggacaagtttcccgccatcacccacctcaagttcctggcccgggacatgtcggagcaggtgcttttgtgcgcgtccagccagaccagcagcatcgtggagtgctggtccctgcgcaaggagggactccccgtgaacaacatcttccagcagatctcccccgtggttggcgacaaacagcccacaattctcaaatggcggatcctatcggccaccaacgatctggaccgtgtgtcggccgtggcgctgcccaagctgcccatctcgctcaccaacaccgacctcaaggtggccagcgacacacagttctaccctggcctcgggctggccctggccttccacgacggcagcgtccacatcgtgcaccggctctcactgcagaccatggccgtcttctacagctccgcggccccgaggcctgtggatgagccggccatgaagcgcccccgcaccgcgggccccgccgtccacttaaaggctatgcagctatcgtggacgtcactggccctggtggggattgacagccacgggaagctgagcgtgctccgcctctcaccttccatgggccacccgctggaggtggggctggcgctgcggcacctgctcttcctgctggagtactgcatggtgaccggctacgactggtgggacatcctgctgcacgtgcagcccagtatggtacagagcctggtggagaagctgcacgaggagtacacgcgccagaccgctgccctgcagcaggtcctctccacccggatcctggccatgaaggcctcgctctgcaagctgtcgccctgcacggtgacccgcgtgtgcgactaccacaccaagctcttcctcatcgccatcagctccaccctgaagtcgctgctgcgcccccactttctcaacacgcctgacaagagccccggcgaccggctgaccgagatctgcaccaagatcaccgacgtcgacattgacaaggtcatgatcaacctcaagacggaggaatttgtgctggacatgaacacactgcaggcgctgcagcagctcttgcagtgggtgggcgacttcgtgctgtacctgctggccagcctacccaaccagccctgccccacctcggagccctgccccacctcggagccctgccccacctcggagccctcccccacctcggagccctcccccacc

SEQ ID NO: 156457 - DNA, 2636 bp, Artificial Sequence
  derived and/or modified sequence
ggccccacgcctcaggcgactggttgttaccgaggaagatggcggcgccagacccgaggcgctagggaagatcgcaccgcggacgcccgctgagcttggcgcacgggccgaccaggagctggtgactgccctcatgtgtgatttgcggcggccagcggcaggtgggatgatggacttggcctacgtctgtgagtgggagaaatggtccaagagcacccactgcccatcggtgcccctggcctgcgcctggtcctgccgaaatctcatcgccttcaccatggacctgcgcagcgatgaccaggacctgacccgcatgatccacatcctggacacggagcacccctgggacctgcactcgatcccctcagagcaccacgaggccatcacctgcctggagtgggaccagtcaggctcccggctcctgtcagcagatgccgacgggcagatcaagtgctggagcatggcggaccacctggctaatagctgggagagctcagtgggcagcctagtggagggggaccccattgtggccctgtcctggctgcacaatggtgtgaaactggccctgcacgtggagaaggtgcttttgtgcgcgtccagccagaccagcagcatcgtggagtgctggtccctgcgcaaggagggactccccgtgaacaacatcttccagcagatctcccccgtggttggcgacaaacagcccacaattctcaaatggcggatcctatcggccaccaacgatctggaccgtgtgtcggccgtggcgctgcccaagctgcccatctcgctcaccaacaccgacctcaaggtggccagcgacacacagttctaccctggcctcgggctggccctggccttccacgacggcagcgtccacatcgtgcaccggctctcactgcagaccatggccgtcttctacagctccgcggccccgaggcctgtggatgagccggccatgaagcgcccccgcaccgcgggccccgccgtccacttaaaggctatgcagctatcgtggacgtcactggccctggtggggattgacagccacgggaagctgagcgtgctccgcctctcaccttccatgggccacccgctggaggtggggctggcgctgcggcacctgctcttcctgctggagtactgcatggtgaccggctacgactggtgggacatcctgctgcacgtgcagcccagtatggtacagagcctggtggagaagctgcacgaggagtacacgcgccagaccgctgccctgcagcaggtcctctccacccggatcctggccatgaaggcctcgctctgcaagctgtcgccctgcacggtgacccgcgtgtgcgactaccacaccaagctcttcctcatcgccatcagctccaccctgaagtcgctgctgcgcccccactttctcaacacgcctgacaagagccccggcgaccggctgaccgagatctgcaccaagatcaccgacgtcgacattgacaaggtcatgatcaacctcaagacggaggaatttgtgctggacatgaacacactgcaggcgctgcagcagctcttgcagtgggtgggcgacttcgtgctgtacctgctggccagcctacccaaccagggttccctgctgaggccgggccacagctttctgcgggacggcacctcgctgggcatgcttcgggaattgatggtggtcatccgcatctggggccttctgaagcccagctgcctgcccgtgtatacggccacctcggatacccaggacagcatgtccctgctcttccgcctgctcaccaagctctggatctgctgtcgcgatgagggcccagcgagcgagccggacgaggcgctggtggatgaatgctgcctgctgcccagccagctgcttatccccagcctggactggctgccagccagcgacggcctggttagccgcctgcagcccaagcagccccttcgtctgcagtttggccgggcgcccacgctgcctggcagtgctgccaccctgcagctcgacggcctcgccagggccccaggccagcccaagatcgaccacctgcggaggctgcaccttggcgcttgccccacggaggaatgcaaggcctgcaccaggtgcggctgtgtcaccatgctcaagtcgcccaacagaaccacggcggtgaagcagtgggagcagcgctggatcaagaactgcctgtgcggtgggctctggtggcgggtgcccctcagctacccctgagcccagctgcccctcagctactcctcagctacccctcagctgcccctgagcccggctgctgcaagagccaccgctcgccctggactctcctcggcgcggttaacctcagcccgccctgcagggctgttgaaggccgtgggccggacgcctgcgtgaccagcagagcttctgaggaagcccctgcctttgtccagctgggcccgcagtccacacaccactctcccaggacccccagatccctggaccatctgcatccagaggaccgtccgtgacggccgggggtccaggcggaccttgtggtgacccggctcgggcgtctcctcggtttccttgcctcacccgcggagagcgctgaacctggacaagcagcggctgggaaggacaggtccaataaacgccctctgcgccc

SEQ ID NO: 156458 - DNA, 2345 bp, Artificial Sequence
  derived and/or modified sequence
ggccccacgcctcaggcgactggttgttaccgaggaagatggcggcgccagacccgaggcgctagggaagatcgcaccgcggacgcccgctgagcttggcgcacgggccgaccaggagctggtgactgccctcatgtgtgatttgcggcggccagcggcaggtgggatgatggacttggcctacgtctgtgagtgggagaaatggtccaagagcacccactgcccatcggtgcccctggcctgcgcctggtcctgccgaaatctcatcgccttcaccatggacctgcgcagcgatgaccaggacctgacccgcatgatccacatcctggacacggagcacccctgggacctgcactcgatcccctcagagcaccacgaggccatcacctgcctggagtgggaccagtcaggctcccggctcctgtcagcagatgccgacgggcagatcaagtgctggagcatggcggaccacctggctaatagctgggagagctcagtgggcagcctagtggagggggaccccattgtggccctgtcctggctgcacaatgggctggccctggccttccacgacggcagcgtccacatcgtgcaccggctctcactgcagaccatggccgtcttctacagctccgcggccccgaggcctgtggatgagccggccatgaagcgcccccgcaccgcgggccccgccgtccacttaaaggctatgcagctatcgtggacgtcactggccctggtggggattgacagccacgggaagctgagcgtgctccgcctctcaccttccatgggccacccgctggaggtggggctggcgctgcggcacctgctcttcctgctggagtactgcatggtgaccggctacgactggtgggacatcctgctgcacgtgcagcccagtatggtacagagcctggtggagaagctgcacgaggagtacacgcgccagaccgctgccctgcagcaggtcctctccacccggatcctggccatgaaggcctcgctctgcaagctgtcgccctgcacggtgacccgcgtgtgcgactaccacaccaagctcttcctcatcgccatcagctccaccctgaagtcgctgctgcgcccccactttctcaacacgcctgacaagagccccggcgaccggctgaccgagatctgcaccaagatcaccgacgtcgacattgacaaggtcatgatcaacctcaagacggaggaatttgtgctggacatgaacacactgcaggcgctgcagcagctcttgcagtgggtgggcgacttcgtgctgtacctgctggccagcctacccaaccagggttccctgctgaggccgggccacagctttctgcgggacggcacctcgctgggcatgcttcgggaattgatggtggtcatccgcatctggggccttctgaagcccagctgcctgcccgtgtatacggccacctcggatacccaggacagcatgtccctgctcttccgcctgctcaccaagctctggatctgctgtcgcgatgagggcccagcgagcgagccggacgaggcgctggtggatgaatgctgcctgctgcccagccagctgcttatccccagcctggactggctgccagccagcgacggcctggttagccgcctgcagcccaagcagccccttcgtctgcagtttggccgggcgcccacgctgcctggcagtgctgccaccctgcagctcgacggcctcgccagggccccaggccagcccaagatcgaccacctgcggaggctgcaccttggcgcttgccccacggaggaatgcaaggcctgcaccaggtgcggctgtgtcaccatgctcaagtcgcccaacagaaccacggcggtgaagcagtgggagcagcgctggatcaagaactgcctgtgcggtgggctctggtggcgggtgcccctcagctacccctgagcccagctgcccctcagctactcctcagctacccctcagctgcccctgagcccggctgctgcaagagccaccgctcgccctggactctcctcggcgcggttaacctcagcccgccctgcagggctgttgaaggccgtgggccggacgcctgcgtgaccagcagagcttctgaggaagcccctgcctttgtccagctgggcccgcagtccacacaccactctcccaggacccccagatccctggaccatctgcatccagaggaccgtccgtgacggccgggggtccaggcggaccttgtggtgacccggctcgggcgtctcctcggtttccttgcctcacccgcggagagcgctgaacctggacaagcagcggctgggaaggacaggtccaataaacgccctctgcgccc

SEQ ID NO: 156459 - DNA, 2351 bp, Artificial Sequence
  derived and/or modified sequence
ggccccacgcctcaggcgactggttgttaccgaggaagatggcggcgccagacccgaggcgctagggaagatcgcaccgcggacgcccgctgagcttggcgcacgggccgaccaggagctggtgactgccctcatgtgtgatttgcggcggccagcggcaggtgggatgatggacttggcctacgtctgtgagtgggagaaatggtccaagagcacccactgcccatcggtgcccctggcctgcgcctggtcctgccgaaatctcatcgccttcaccatggacctgcgcagcgatgaccaggacctgacccgcatgatccacatcctggacacggagcacccctgggacctgcactcgatcccctcagagcaccacgaggccatcacctgcctggagtgggaccagtcaggctcccggctcctgtcagcagatgccgacgggcagatcaagtgctggagcatggcggaccacctggctaatagctgggagagctcagtgggcagcctagtggagggggaccccattgtggccctgtcctggctgcacaatggtgtgaggctggccctggccttccacgacggcagcgtccacatcgtgcaccggctctcactgcagaccatggccgtcttctacagctccgcggccccgaggcctgtggatgagccggccatgaagcgcccccgcaccgcgggccccgccgtccacttaaaggctatgcagctatcgtggacgtcactggccctggtggggattgacagccacgggaagctgagcgtgctccgcctctcaccttccatgggccacccgctggaggtggggctggcgctgcggcacctgctcttcctgctggagtactgcatggtgaccggctacgactggtgggacatcctgctgcacgtgcagcccagtatggtacagagcctggtggagaagctgcacgaggagtacacgcgccagaccgctgccctgcagcaggtcctctccacccggatcctggccatgaaggcctcgctctgcaagctgtcgccctgcacggtgacccgcgtgtgcgactaccacaccaagctcttcctcatcgccatcagctccaccctgaagtcgctgctgcgcccccactttctcaacacgcctgacaagagccccggcgaccggctgaccgagatctgcaccaagatcaccgacgtcgacattgacaaggtcatgatcaacctcaagacggaggaatttgtgctggacatgaacacactgcaggcgctgcagcagctcttgcagtgggtgggcgacttcgtgctgtacctgctggccagcctacccaaccagggttccctgctgaggccgggccacagctttctgcgggacggcacctcgctgggcatgcttcgggaattgatggtggtcatccgcatctggggccttctgaagcccagctgcctgcccgtgtatacggccacctcggatacccaggacagcatgtccctgctcttccgcctgctcaccaagctctggatctgctgtcgcgatgagggcccagcgagcgagccggacgaggcgctggtggatgaatgctgcctgctgcccagccagctgcttatccccagcctggactggctgccagccagcgacggcctggttagccgcctgcagcccaagcagccccttcgtctgcagtttggccgggcgcccacgctgcctggcagtgctgccaccctgcagctcgacggcctcgccagggccccaggccagcccaagatcgaccacctgcggaggctgcaccttggcgcttgccccacggaggaatgcaaggcctgcaccaggtgcggctgtgtcaccatgctcaagtcgcccaacagaaccacggcggtgaagcagtgggagcagcgctggatcaagaactgcctgtgcggtgggctctggtggcgggtgcccctcagctacccctgagcccagctgcccctcagctactcctcagctacccctcagctgcccctgagcccggctgctgcaagagccaccgctcgccctggactctcctcggcgcggttaacctcagcccgccctgcagggctgttgaaggccgtgggccggacgcctgcgtgaccagcagagcttctgaggaagcccctgcctttgtccagctgggcccgcagtccacacaccactctcccaggacccccagatccctggaccatctgcatccagaggaccgtccgtgacggccgggggtccaggcggaccttgtggtgacccggctcgggcgtctcctcggtttccttgcctcacccgcggagagcgctgaacctggacaagcagcggctgggaaggacaggtccaataaacgccctctgcgccc

SEQ ID NO: 156460 - DNA, 2222 bp, Artificial Sequence
  derived and/or modified sequence
ggccccacgcctcaggcgactggttgttaccgaggaagatggcggcgccagacccgaggcgctagggaagatcgcaccgcggacgcccgctgagcttggcgcacgggccgaccaggagctggtgactgccctcatgtgtgatttgcggcggccagcggcaggtgggatgatggacttggcctacgtctgtgagtgggagaaatggtccaagagcacccactgcccatcggtgcccctggcctgcgcctggtcctgccgaaatctcatcgccttcaccatggacctgcgcagcgatgaccaggacctgacccgcatgatccacatcctggacacggagcacccctgggacctgcactcgatcccctcagagcaccacgaggccatcacctgcctggagtgggaccagtcaggctcccggctcctgtcagcagatgccgacgggcagatcaagtgctggagcatggcggaccacctggctaatagctgggagagctcagtgggcagcctagtggagggggaccccattgtggccctgtcctggctgcacaatggtgtgaaactggccctgcacgtggagaagtcgggcgcctccagcttcggggagaagttctcccgagtcaagttctcaccgtcgctcacgctgttcggcggcaagcccatggagggctggatcgcggtgacggtcagcggcctggtcaccgtgtccctgctcttcctgctggagtactgcatggtgaccggctacgactggtgggacatcctgctgcacgtgcagcccagtatggtacagagcctggtggagaagctgcacgaggagtacacgcgccagaccgctgccctgcagcaggtcctctccacccggatcctggccatgaaggcctcgctctgcaagctgtcgccctgcacggtgacccgcgtgtgcgactaccacaccaagctcttcctcatcgccatcagctccaccctgaagtcgctgctgcgcccccactttctcaacacgcctgacaagagccccggcgaccggctgaccgagatctgcaccaagatcaccgacgtcgacattgacaaggtcatgatcaacctcaagacggaggaatttgtgctggacatgaacacactgcaggcgctgcagcagctcttgcagtgggtgggcgacttcgtgctgtacctgctggccagcctacccaaccagggttccctgctgaggccgggccacagctttctgcgggacggcacctcgctgggcatgcttcgggaattgatggtggtcatccgcatctggggccttctgaagcccagctgcctgcccgtgtatacggccacctcggatacccaggacagcatgtccctgctcttccgcctgctcaccaagctctggatctgctgtcgcgatgagggcccagcgagcgagccggacgaggcgctggtggatgaatgctgcctgctgcccagccagctgcttatccccagcctggactggctgccagccagcgacggcctggttagccgcctgcagcccaagcagccccttcgtctgcagtttggccgggcgcccacgctgcctggcagtgctgccaccctgcagctcgacggcctcgccagggccccaggccagcccaagatcgaccacctgcggaggctgcaccttggcgcttgccccacggaggaatgcaaggcctgcaccaggtgcggctgtgtcaccatgctcaagtcgcccaacagaaccacggcggtgaagcagtgggagcagcgctggatcaagaactgcctgtgcggtgggctctggtggcgggtgcccctcagctacccctgagcccagctgcccctcagctactcctcagctacccctcagctgcccctgagcccggctgctgcaagagccaccgctcgccctggactctcctcggcgcggttaacctcagcccgccctgcagggctgttgaaggccgtgggccggacgcctgcgtgaccagcagagcttctgaggaagcccctgcctttgtccagctgggcccgcagtccacacaccactctcccaggacccccagatccctggaccatctgcatccagaggaccgtccgtgacggccgggggtccaggcggaccttgtggtgacccggctcgggcgtctcctcggtttccttgcctcacccgcggagagcgctgaacctggacaagcagcggctgggaaggacaggtccaataaacgccctctgcgccc

SEQ ID NO: 156461 - DNA, 2256 bp, Artificial Sequence
  derived and/or modified sequence
atgtgcgacctgagaaggcccgccgcaggcggaatgatggacctggcctacgtttgcgaatgggaaaaatggagcaagtcaacccactgcccaagtgttcccctggcttgtgcttggtcttgccgtaacctcatcgccttcactatggacctgagatcagacgatcaagacctcacccgtatgattcacatcttggacactgaacacccatgggatttacactctattccctcagagcatcatgaggccattacatgtctggaatgggaccagtcggggtcacgtttgctatccgccgatgcagacggccagatcaaatgttggagtatggctgatcaccttgcgaattcttgggagtcctctgtaggttctcttgtagaaggggacccaatcgtggccttgtcctggctccacaacggggttaagctggccctgcatgtggaaaagtcaggggctagctcctttggagagaaattctcccgtgtgaagttctcaccctcacttaccctattcgggggtaaacccatggagggttggattgcagtgaccgtctctggcttggtgaccgtctctcttctgaagccctccggccaggtactaactagtactgagtccctgtgtcgactgagaggccgagtggctcttgccgacattgcttttacaggaggcgggaatattgtggtcgcaaccgcagatggaagctctgcctcaccagtacaattctacaaggtgtgcgtgagtgtggtgtcggaaaagtgcagaatcgatacagagatcttaccgtctctttttatgagatgtactacagacctgaataggaaagataaattccctgcaattacccacctgaagtttctggctcgagatatgtccgagcaagtgctcttgtgtgctagctcacaaacctcatcgattgttgaatgctggtcgttgcgcaaagagggcttacccgtcaataacatctttcagcaaatttcacctgtggtcggcgacaagcagcctactatcttgaaatggaggatcctctccgccacaaacgatctggaccgcgtctcagccgtcgctctgcccaaactgcccatctctctgacaaatacagatctgaaagtagcatccgacacacagttctaccccggactcggcctcgccctggcgtttcacgatggttctgttcacatcgtgcacaggttgagccttcagactatggctgtgttttattccagtgccgctcctagacccgtggatgagcctgcaatgaaaagaccccggactgcaggcccggccgtgcatctgaaagccatgcaattatcctggacaagtctcgccctggtggggatagacagccacggaaagttgagcgtgttgcgactgagccctagtatgggccaccctctggaagtcgggttggccctgcgccacctcttgtttctgttggaatactgcatggtgaccggctacgactggtgggacattctgttgcatgttcaaccgagtatggtccagagcctggtagaaaagctccacgaagagtacactaggcagacagccgctttgcagcaagtgctgtctaccagaattctagcaatgaaggcgagcctgtgtaagttgagcccctgcacagtaactcgcgtctgtgactaccatacaaagctctttctgattgccatatcctcaactcttaagtcattgcttcggccacactttctcaatactcctgacaaaagtcctggggaccggctgaccgagatatgcactaaaatcaccgatgtggatattgataaagttatgatcaacctcaagactgaagagtttgtcctcgacatgaacacactgcaggctttgcagcaattgctgcagtgggttggcgacttcgttctgtacctccttgcgtctttaccgaaccaggtcgctatgcgagcccagcgagcaagtagaacccgacgctggtggatgaacgctgcttgctgccctgcttcctgtctgagtccagcctggaccgggtgtcagcctgccacggcctggttggccgcttgttctcccagtagccctttcgtctgttcacttgctggtcgccctagatgcctggccgttttgccgccgtgcagttctacagcgtctcccgggcctcaggcctctcccagatctacaacctgcggaggatgcacgctggctctcgccccaagaagaaacgctaggccagctcccggcgccgccgtcagcccttgcagctcccgccctaccgagcctagacgttag

SEQ ID NO: 156462 - DNA, 2583 bp, Artificial Sequence
  derived and/or modified sequence
atgtgtgacctgcgccggccggctgcaggaggtatgatggacttggcctacgtgtgcgagtgggagaaatggtccaagagcacccactgcccttctgtcccactggcctgcgcctggagttgtcgaaacctgatagcattcactatggaccttcgatctgacgaccaagatctgacaagaatgatccacattctggacacagaacacccctgggatctccacagtatcccctcagaacaccacgaggctatcacttgtctcgaatgggatcagtccggatctcgcctgctctcagccgatgctgatggacaaataaaatgctggagcatggccgatcacctggcaaactcatgggaaagtagcgtgggatcattagtagaaggcgaccccatcgtcgctctgtcttggctccacaatggagtgaaactggcactccatgtcgagaaatcaggtgcttcatccttcggagaaaagttctcccgcgttaagttctcgccatcccttacactgtttgggggtaagcctatggaaggatggatagctgtcacagtttctgggctggtgacggtgtccctccttaagcccagcgggcaagtgctgacgagcacagagagtctgtgcagactgcggggtcgcgtggccctcgcggatatcgcatttacgggaggcgggaatatagtcgtcgctaccgccgatggaagctctgcctctcccgtgcaattctacaaggtgtgtgtgagcgtagtgtctgaaaaatgccggatcgacactgagatcttacccagtttgttcatgcggtgcaccactgacctcaatagaaaagataaatttcctgctataacgcacctgaaattcctggcaagagacatgtccgagcaagtccttctctgtgctagctcccagacatcctcaatcgtggaatgctggagtttacggaaagagggcctccccgtgaataatatctttcagcagatcagcccggtcgtcggagataagcaacctaccatacttaaatggcgaatcctgtccgcgacgaacgatctggacagggtaagtgcggtggccctacctaagctaccaatctctctgacaaacacagatctgaaggtggcatctgatactcagttttatccgggcctgggccttgccctggcatttcacgacgggtcagtgcacatcgttcaccgcctgagtctccaaactatggccgtattttactcctctgccgcgccccgtccagtggatgagccagccatgaaacgtcctcggactgcaggcccggctgtgcatttgaaggcaatgcagctgtcatggacaagcctggccctggttggaattgattctcatggcaaattgagtgttttgcggctgtccccgagcatgggccatccattggaggtgggactggcgcttcgccacctgctttttctactggagtactgcatggtaaccggctacgattggtgggatattctgctccatgtccagcctagtatggttcagtcactggtggaaaagttgcacgaagaatacacaaggcaaacggctgctctgcagcaggttttaagtacacggatcctcgcaatgaaagctagtttgtgtaagctctcaccctgcacggtgactagggtgtgcgattatcacaccaagctctttcttattgccatctccagcacactgaagagtctgcttcgcccacactttcttaatacacctgataagagccctggcgacaggctgactgagatctgcaccaaaattactgacgttgatatcgataaagtaatgattaacctcaagacggaggagtttgtgttggatatgaacactctacaggccttgcagcagttgctgcagtgggtgggggattttgtgctgtacctgttggcttcactccctaatcagggttctctgctccgacccggacatagttttctgcgggatggcacgtctctgggaatgctgagagaactgatggtggtgataagaatttggggcctccttaagccaagttgtttacccgtgtataccgctacctccgacacacaggatagtatgtctctcctgtttagactgctgacgaaactgtggatctgtttcccctccaccggcccttgttccgtgtgggtcctcctgggttggcagccattgccagggagggacgaggggccggctagcgagccggatgaggcactggttgatgaatgctgcctcctgcctagccagctccttattccctcattagattggcttcctgcctccgatgggctggtctctagactccagcctaaacagcctctgagattgcagttcgggcgagccccaacactgcccggcagcgcagctaccctgcagttggatgggctggcgcgcgctccagggcagcccaagatcgaccacctgaggcgtctgcacctgggggcctgtcccacggaagaatgcaaagcctgtacacgttgtgggtgtgtgacgatgcttaaaagtcctaatcgcacaaccgccgtgaagcaatgggagcagagatggattaagaactgtctctgcggaggactctggtggcgggtgccattgtcgtatccgtag

SEQ ID NO: 156463 - DNA, 2634 bp, Artificial Sequence
  derived and/or modified sequence
atgtgcgaccttcgccgtcccgctgctggtggcatgatggatctggcatacgtgtgtgagtgggagaaatggagtaaaagcactcattgcccatcagtgccgttagcttgcgcctggtcctgcaggaacctcatcgcctttacgatggatctgagaagtgatgatcaggatctcacacgaatgatccacatcttagacaccgaacacccatgggacctgcactcaattccaagcgagcaccatgaagctattacctgcctggagtgggaccagtcgggcagtcggctactgtccgccgatgctgacgggcagataaagtgttggtccatggcagaccacctggctaactcctgggaatccagcgtgggatcactggtcgaaggagatcctatcgtcgccctttcgtggctgcacaatggcgtgaagttggccctgcatgtggaaaagtccggcgcatccagcttcggagagaagttctcccgagtgaaattctctccatccctgaccttgtttgggggcaaacctatggagggctggatcgcagtgacagtgtcagggctggtgactgtttccctcttgaaaccatccggacaggtgcttacaagtaccgagtcgctctgcagactgcgcggcagagtggccttagccgacatagcattcaccggaggaggtaacatcgtggtcgctaccgcagacggcagctcggcgagccccgtacaattttacaaggtatgtgtgtctgtcgtgagtgagaaatgccggattgatacagaaatcttgccctccctctttatgcgatgcactacagatttgaaccgcaaagacaagttccccgctattacccatttgaagtttctcgctagagacatgtctgagcaagtgctgttatgcgcgtcttctcagacaagctccatcgtcgagtgctggtcacttaggaaggaggggttgccagtgaacaacatcttccagcagatctcaccggttgtcggtgataaacagcccactatcctgaagtggaggatcctgtctgcaacaaatgacctggatagagtgagtgccgttgcccttcccaaactgccgatctctctcactaatacggacctcaaggtcgcgtcagacacacaattctaccccgggctgggcctcgcactcgctttccacgacggctcagtgcatattgttcatcggttatctctacagactatggctgtgttttactctagtgccgccccccgtccagtcgatgagcctgccatgaaacgcccgcggacggcagggccagccgtgcatctgaaagctatgcaactgtcctggaccagcctggccctcgtagggatcgacagtcatgggaaactgtcggtgctgcggttgtcgccaagcatgggccacccacttgaagtcggactggccctgaggcatctactctttctgcttgagtattgtatggtgaccggctatgactggtgggacatcttgctccatgttcaaccctcaatggtccagtctttggtggagaaactgcacgaggaatatacccggcaaaccgccgctttacagcaggtgctttctacccggattctcgccatgaaggcaagcctgtgcaagcttagcccatgtactgtgacccgagtttgcgattatcacaccaaactgttcctgatagccatttcaagtaccctgaagtcactactcagaccacactttcttaacactcccgataaaagtccgggcgaccgcttgactgagatctgcacaaaaattacggacgtagatattgataaggtcatgatcaacctgaaaacagaagaattcgtcttggacatgaacacgttgcaggcattgcaacaactcctccaatgggtaggtgacttcgtgctttatcttctggcgagtctgcccaatcaaggctcgctcctgaggcctggtcactcattcctgcgtgacgggacaagcctgggcatgctgagggaactgatggttgtcattagaatctggggtctcctcaagccctcctgtttgcccgtatacactgctaccagtgacacacaggattccatgagccttctgtttcggctgctaaccaaactctggatctgttgtcgagatgaaggtcctgccagcgagcccgacgaagcactggtggacgagtgctgtctgctccctagccagctcctgatacctagcctggactggctgccggcctccgacggtctggtctcgagacttcagcctaagcagcctttgcgcctgcaatttggacgtgcaccgactctgcccgggtctgctgcgacgctccagttggatgggctggcaagggcccctggccagcctaaaatcgatcaccttaggagactgcatctgggggcttgcccgactgaggaatgtaaggcatgcacccggtgtgggtgcgtcacaatgctaaaatctccaaatcggaccaccgccgtgaagcagtgggagcagcggtggattaaaaattgtttggctgtggaaggcaggggacccgatgcctgcgtaacatcacgagcttctgaggaagcaccggcattcgttcagctcggccctcagtctacacaccatagccccaggaccccccgctccctggaccacctacatccagaggacaggccctag

SEQ ID NO: 156464 - DNA, 2526 bp, Artificial Sequence
  derived and/or modified sequence
atgtgcgacttaaggcgacccgctgccggcggcatgatggacctggcctatgtgtgcgaatgggaaaagtggagtaaaagtacgcattgtccctctgttccacttgcatgcgcgtggtcctgcaggaatctgatagccttcaccatggatctgcgcagcgacgatcaagacctaacgcggatgatccatattcttgacacggagcacccctgggatcttcatagtatcccatcggagcaccacgaggccattacgtgtcttgaatgggatcagagtgggtcccgattgcttagcgcggatgcggatggccagattaaatgttggtctatggccgaccacctcgccaattcctgggagagctccgtggggagcctggtggagggcgaccctattgtcgcattgagctggctgcataacggagttaagctggccttgcacgtggagaagtctggggcttctagcttcggggaaaagtttagccgggtgaagttttcaccatccttgacgctgttcggggggaaacccatggaggggtggattgccgtcacagtgagcgggctcgtaactgtgtctctcttaaagcctagcgggcaggtgctgacgagcaccgagtctctgtgcaggctccgcggtcgggtggctctggccgacattgcatttactggaggaggcaatatcgtcgtggcaacagccgatggctctagtgcttcccctgttcagttttacaaggtgtgtgtcagtgtggtcagcgaaaagtgtcgaattgacacagagatacttcctagtctcttcatgagatgcacaactgatctgaacagaaaggacaagttcccagctatcactcatctcaaatttctggctcgggatatgtcagagcaggttttgctatgcgccagcagccaaacttctagtattgttgagtgttggtccctccgcaaagagggcttacccgtcaacaacatttttcagcaaatctcccccgtcgtgggggacaagcaacctaccatccttaaatggcgaatactgtctgccaccaacgacctggatagggtgagtgcagtagctttgccaaagttaccaatatctctgaccaatactgaccttaaggttgccagtgacactcagttctaccccgggttgggtctcgccctcgccttccacgatggctccgtgcatatcgtgcatagactgtctctgcagacaatggccgtattctacagcagcgcggcccctagacctgtcgatgaacctgcaatgaagcggcctagaaccgccgggccagctgtgcacttaaaggccatgcagttgtcctggacttcactcgccctggttgggattgattcgcacggaaaactttccgttctgcgactttctccctctatgggtcaccccttggaggttggcctagccttgcgacatctcctctttttattagaatactgtatggtgacaggctatgactggtgggacatcttattgcatgttcagcctagcatggtacaatcactagtggagaagttgcacgaggaatatacccgacagaccgccgctctccagcaagtgctgtctacaaggattctcgcaatgaaagccagcctatgtaaattgtctccctgtaccgtcactcgagtttgtgactaccacactaagttatttcttatagcgatatcatccaccctcaagtccctcttgcggccacacttcttgaacacccccgataaatcacctggggatcgtttgactgaaatatgtacaaaaataactgatgtcgacattgacaaagtgatgatcaacctaaaaaccgaagagtttgttttagacatgaacaccctgcaagctttgcaacaactactgcagtgggttggggatttcgttctctatctcctcgcgtccctgccaaatcagggcagtctgctcagaccaggtcactccttcctcagggatggcactagtcttggcatgctgcgggagttgatggtggtcatacgaatctggggccttttaaaaccatcctgcctgcctgtgtatactgcaaccagtgacacgcaggatagcatgagtctgctgtttaggctgctcacaaaactgtggatatgttgtcgtgatgaaggccccgcttccgagccggatgaagcactggtggatgagtgctgcctgctcccttctcaactccttataccttctctggactggttacctgcaagtgacgggctggtgtcaagactgcaacctaaacagccgcttcggcttcaatttgggagggcccccacactgcctggatccgcagctaccctccagttagatggacttgcaagggcccctggccagccaaagattgatcatttacggcgcctccacctgggcgcatgtcctactgaagagtgcaaagcctgcactaggtgcggatgcgtgacgatgctgaaaagtcctaacagaacaactgctgtgaagcagtgggaacaacggtggattaagaattgtttgtgtggaggcctgtggtggcgcgtaccccttagttacccgtag

SEQ ID NO: 156465 - DNA, 1992 bp, Artificial Sequence
  derived and/or modified sequence
atgtgtgatctacggcgtcccgccgcaggtggaatgatggacctggcatatgtttgtgaatgggagaagtggtctaagtccacacactgtccctccgtgcccctcgcatgcgcctggtcctgcaggaatctgattgcctttaccatggatctgaggagtgacgaccaggacctgacaaggatgatacatatcctcgacacagaacatccttgggatctgcactctatccctagtgaacaccatgaagccattacatgccttgaatgggaccagtccggatctcgtcttctgagcgccgacgctgacggccagattaagtgttggagcatggctgaccacttggctaacagctgggagtcatcagttggatctcttgtcgaaggcgaccctattgtggctctgtcatggctccacaacggagtgaagctggcattgcacgtcgagaaatcgggcgctagtagcttcggtgagaaattcagcagagttaaattctccccctccctcacattgtttgggggaaaaccaatggaggggtggattgccgtcactgtttcaggattagtgaccgtgtcactcctcaagccaagtggacaggttcttacttcaaccgaatcattgtgcagactccggggccgggttgccttggctgatatcgccttcaccggcgggggcaacatagtcgtcgctacagcagatggatcttccgcctctccagtgcagttttataaagtgtgtgtgtccgtagtcagtgagaaatgcaggattgataccgagatccttccttcattatttatgaggtgcacgacagatcttaataggaaagataagttcccagcgattacacacctcaagtttctcgctcgggatatgagcgaacaggtcctcctgtgtgcatcctcgcagactagcagtatagtggaatgttggtccctgcggaaggagggactccccgtgaacaacatattccagcaaatatctccagtagtgggcgataaacaacccacaatcttgaagtggaggatcctctcagctaccaacgatctggatcgagtgagcgctgtggccctccctaagctcccaatttccctaactaacactgatctgaaagttgcgtctgatactcaattctaccctggccttggtctggctctcgcatttcatgacggatcggttcacatcgtgcaccgcctctctctacagacaatggcggtgttctacagtagcgcagcccctaggcccgtggatgaacctgctatgaagcgccccaggacagctggacccgccgtgcacctgaaagccatgcaactctcatggacatcgctcgctctcgtgggcatcgattcacacggcaaattgtccgtcttgaggctgtccccaagcatggggcacccgctggaggtaggactggctttacggcacttgttgttcctcctggagtactgtatggtgacaggctatgactggtgggacatcctcctgcatgtgcaaccatcaatggtgcagagtctggtggaaaaactacatgaggagtataccaggcaaaccgccgcactccagcaggtgctatccacgcggatccttgccatgaaagcgtccctctgcaagctctctccgtgtaccgttactagagtctgtgattaccacacaaaactgttcctgattgcaatttcgtcaacactcaaaagcctgctccggccacattttctgaacactcctgataagtccccaggggaccgcctgactgaaatttgtactaaaataactgatgtcgacattgataaagttatgattaacctgaaaaccgaagaatttgtgctcgatatgaacaccctgcaggccctgcaacagcttttgcagtgggttggcgacttcgtgctgtatctgctagctagtttaccaaaccaaccatgtcccacctcagaaccctgcccaacaagtgaaccctgccctacttcggaaccttcgcctacttccgaacccagccccacctag

SEQ ID NO: 156466 - DNA, 1614 bp, Artificial Sequence
  derived and/or modified sequence
atgtgcgacctgagacgacctgcagccggaggcatgatggatttagcctacgtgtgtgagtgggagaagtggtcaaaatccacccattgtccttcagttcccctcgcctgcgcgtggtcctgtagaaacttgatcgctttcaccatggacctgcgaagcgacgatcaagacctcacccggatgatccatattcttgatactgagcacccttgggacctgcactcgatcccttcagaacatcacgaagcaataacctgtttagaatgggaccagtctggttcgcgcctcctttctgcagatgccgatgggcagataaaatgttggtccatggctgaccaccttgcaaactcttgggaaagctcagtcggaagcctcgtggagggcgatcctatagtagccttaagttggttacacaacggggttaagcttgctctccatgtcgagaagtctggcgcatcctcctttggggaaaaattctccagagtaaaattctcccccagtttgaccctcttcggagggaagcctatggaaggctggatagcagtgactgtgtcaggcctggtgaccgtttcgctgctgaagcctagcgggcaggtgctcacaagtacagagtccctgtgcagactccgaggcagagtggcactcgccgacattgcgttcactggcggagggaatattgtcgtcgccacagccgacggaagctccgcctctccggtacagttctataaggtgtgtgtatcagtagtatcagagaagtgcaggatcgacacagaaattctccccagcttgttcatgaggtgcacaactgacctgaacagaaaagacaagtttccagctatcactcacctgaagtttttggcacgcgatatgtctgagcaggtgcttctgtgtgctagctctcagacatcatcaatcgtcgagtgttggagcctgcgaaaagaaggtctacccgtgaacaacatttttcagcagatttcacccgtcgtgggggacaagcagcccacaatcctcaagtggagaatcctgtctgcgaccaacgacctggacagagtatcagccgtcgctcttccaaagctgccgattagtttaacaaatacagatttaaaagtggcgtctgacacacagttctatccggggcttggactggcattggcatttcatgatgggtctgtccacattgtccatagactgagcttgcagactatggccgtgttctacagctccgctgctccccgacctgtcgatgaacctgccatgaagcggccacggacagcgggccctgctgtccacctgaaggctatgcagctgtcttggacaagccttgccctcgttggaatcgattctcacggtaaggtcttgagcacacggatccttgccatgaaagcatcactgtgtaagctctccccatgtactgtgacccgggtgtgcgactaccatacaaagctgttcttgatagccattagttcaactctcaaatctctactgcgccctcacttcctgaacacgcctgacaaaagcccaggtgaccgtctcacggagatttgcaccaagatcaccgacgtggatatagataaagtgatgatcaacctgaaaacagaagagttcgtactgtag

SEQ ID NO: 156467 - DNA, 1389 bp, Artificial Sequence
  derived and/or modified sequence
atgtgtgatctacgtcgacctgctgcgggcggcatgatggatcttgcctacgtctgtgagtgggagaaatggtcgaagtccacacactgtcctagtgtacctctggcttgtgcctggtcttgtaggaatctgatcgccttcaccatggatctgcgatcggacgaccaagacctgacccggatgatccatattttggacaccgagcacccctgggacctgcactctatcccttctgaacatcacgaggcaattacctgccttgagtgggaccaaagcggatcccgcctcctgagcgctgacgccgatggccagattaaatgttggtctatggccgaccatctcgcaaacagctgggaatcctctgtgggctccctcgtggagggtgatcctatagtcgctctctcttggctccataatggtgtcaagctggccctgcacgtggaaaaagtgttgctgtgtgctagcagtcagaccagctcaatcgttgagtgttggtcccttcgcaaagagggcctgccggtaaacaacattttccagcaaatctcgccggtcgtgggcgacaaacagcctactattctgaaatggagaatcttgtcggccactaatgatctagaccgtgtctctgctgtagcgttacccaagctccctattagtttaactaatacggacctaaaagtggcatctgatacccagttctacccaggcctcggcctcgccctggccttccatgatggcagcgtccatattgtgcatcgtctcagcctgcaaactatggcggtgttctactcttctgcggctccacgacctgtagacgagcccgccatgaagcgcccccgcaccgcgggacctgctgtgcatctgaaggccatgcagttaagctggacttccctcgccctggtggggatcgactcccacggcaagctgagtgtcctgaggctgtcaccatctatgggccacccccttgaggttggcttggcactcaggcacctgctgttcctcctggagtactgcatggtcacagggtacgactggtgggatattttgcttcacgtgcagccctctatggttcagtcactcgtggaaaaactccatgaggagtacactcgtcagacagccgccctccagcaggtactctctacgcgcatcctggccatgaaagcttccctgtgcaagctttcgccgtgcacagtgactcgggtgtgcgactaccacacaaagctgtttctgatcgcaatctcctccaccctcaagtccctgcttagacctcattttctgaacacacccgacaagagcccgggtgacagacttaccgagatttgtaccaaaatcacggacgtggacattgacaaggtgatgatcaacctaaaaactgaagaatttgtactctag

SEQ ID NO: 156468 - DNA, 1098 bp, Artificial Sequence
  derived and/or modified sequence
atgtgcgaccttcgtcgtcctgccgcagggggcatgatggatctggcatatgtttgcgaatgggaaaaatggtcaaagtcaactcactgtccgagtgtccccctcgcatgcgcatggtcctgcagaaatttaatagcctttacgatggatctgagatccgatgaccaggacctgacccgcatgatccacattctggatacagagcatccatgggatctccatagtatccctagcgagcaccatgaggcgattacgtgcctggagtgggatcagagcggaagtaggttgttatccgctgacgctgacggccaaattaagtgttggtcaatggctgatcacctggcaaacagctgggagagctctgtgggctccttggtggagggggatcctatcgtggcactgagctggctgcataacgggctcgccctggcatttcatgatggatccgtccatatagttcaccgcttaagcctgcaaactatggccgtattctacagctccgcagccccaagaccagtggatgagcctgccatgaaaaggccccgcacagccggaccagcagtgcacctcaaggccatgcagctgtcatggacatccttggctctggttgggattgactcccacggaaaactgagcgtcctccgtttaagcccatctatgggacacccactggaagtcggactcgccctgcgacatcttctgttcttacttgagtattgcatggtgactggctacgactggtgggacatccttctgcatgtacagccaagcatggtccagagcctcgttgaaaagctgcacgaggagtacacccggcagactgcggcccttcagcaggtgttatctactaggatcttggccatgaaggccagtttgtgtaagttgtcaccttgcaccgtgaccagggtctgtgattaccacactaagttgtttctcatcgcaatctcgtcaactctgaaaagcttgctgcgaccacacttcttgaacacgcctgataaatcacctggggaccggctaactgagatctgtacaaaaataaccgacgtggacattgataaagtgatgatcaatctcaaaacagaagagtttgtgttatag

SEQ ID NO: 156469 - DNA, 1104 bp, Artificial Sequence
  derived and/or modified sequence
atgtgtgacttgagacgtcccgccgccggaggtatgatggacctggcctacgtatgtgagtgggaaaaatggagtaaatcgacccactgtccatccgttcccttggcgtgtgcttggagctgccgcaacctgatcgcctttaccatggacctgcgaagtgacgatcaggatttgacgcgaatgatacatattttggacacagagcatccctgggacctgcacagtatcccttccgaacaccacgaagctattacatgcctggagtgggaccaaagcggaagcaggctgctgagcgccgacgcggacggacagataaagtgttggtcgatggctgatcacctggccaactcatgggagagctcagtcggatctctagtagagggagatcccatcgtggctctttcctggctgcacaatggcgttcggctggccctggctttccacgacggatccgtccacatagtacatcgcctaagcttgcagacaatggccgtcttctactccagtgcggcaccccgacctgtagatgagccggctatgaagcggccacgtaccgccggtcctgccgtgcaccttaaagcgatgcagctcagctggacctcactcgctctcgttggcattgattctcatgggaaactctctgtgctgcggctttctcccagcatgggccatcctctcgaggtaggcctggctctgaggcacctgttgttcctactcgaatattgcatggtgactggctacgattggtgggatatccttttgcacgtgcagccatctatggtacaatcacttgtcgaaaaactacacgaagagtacacccgacagactgctgctctgcagcaggtgctttctacaagaattcttgctatgaaagccagtctgtgtaagctatccccctgtaccgtgacacgagtttgcgattatcatacaaaactcttcctcattgcaataagcagcacgctgaagtcccttctgcgcccacacttcctcaataccccagataagagtccaggcgacaggctcacagaaatctgcacaaaaatcactgatgttgatattgataaggtgatgattaacttaaaaacagaagagtttgttctgtag

SEQ ID NO: 156470 - DNA, 2256 bp, Artificial Sequence
  derived and/or modified sequence
atgtgtgacctgcggcggcctgctgctgggggcatgatggacctggcctacgtgtgtgagtgggagaagtggagcaagagcacccactgccccagcgtgcccctggcctgtgcctggagctgcaggaacctgattgccttcaccatggacctgcggagtgatgaccaggacctgaccaggatgatccacatcctggacacagagcacccctgggacctgcacagcatccccagcgagcaccacgaggccatcacctgcctggagtgggaccagagcggcagccggctgctgtctgcagatgctgatggccagatcaagtgctggagcatggctgaccacctggccaacagctgggagagctctgtgggcagcctggtggagggggaccccatcgtggccctgtcctggctgcacaatggagtgaagctggccctgcacgtggagaagagcggggccagcagctttggagagaagttcagccgggtgaagttcagccccagcctgaccctgtttggaggcaagcccatggagggctggattgctgtgacagtgtctggcctggtgacagtgtccctgctgaagcccagcggccaggtgctgaccagcacagagagcctgtgccgcctgcggggccgggtggccctggccgacatcgccttcaccggcggcggcaacatcgtggtggccacagcagatggcagcagcgccagccctgtgcagttctacaaggtgtgtgtgtctgtggtgtctgagaagtgcagaattgacacagagatcctgcccagcctcttcatgcgctgcaccacagacctgaacaggaaggacaagtttcctgccatcacccacctgaagttcctggcccgggacatgtctgagcaggtgctgctgtgtgccagcagccagaccagcagcatcgtggagtgctggagcctgaggaaggagggcctgcctgtgaacaacatcttccagcagatcagccctgtggtgggggacaagcagcccaccatcctgaagtggaggatcctgagcgccaccaatgacctggacagagtgtctgctgtggccctgcccaagctgcccatcagcctgaccaacacagacctgaaggtggccagtgacacccagttctacccaggcctgggcctggccctggccttccatgatggctctgtgcacatcgtgcaccggctgagcctgcagaccatggctgtgttctacagcagcgctgcccccaggcctgtggatgagcccgccatgaagaggcccaggacagctggccctgctgtgcacctgaaggccatgcagctgtcctggaccagcctggccctggtgggcatcgacagccacggcaagctgtctgtgctgcggctgagccccagcatgggccaccccctggaggtgggcctggccctgcggcacctgctcttcctgctggagtactgcatggtgacaggctatgactggtgggacatcctgctgcacgtgcagcccagcatggtgcagagcctggtggagaagctgcacgaggagtacacccggcagacagctgccctgcagcaggtgctgagcacccgcatcctggccatgaaggccagcctgtgcaagctgagcccctgcaccgtgaccagggtgtgtgactaccacaccaagctgttcctgattgccatcagcagcaccctgaagagcctgctgcggccccacttcctgaacaccccagacaagagccctggggaccggctgacagagatctgcaccaagatcacagatgtggacatcgacaaggtgatgatcaacctgaagacagaggagtttgtgctggacatgaacaccctgcaggccctgcagcagctgctgcagtgggtgggggactttgtgctgtacctgctggccagcctgcccaaccaggtggccatgagggcccagagggccagcaggacccggcgctggtggatgaatgctgcctgctgcccagccagctgcctgagccctgcctggacaggctgccagcctgccacagcctggctggccgcctgcagccccagcagcccctttgtgtgcagcctggccggccggccccgctgcctggccgtgctgcccccctgcagcagcacagccagccctggcccccaggccagccccaggagcaccacctgtggcggctgcaccctggccctggcccccaggagaaatgcccggcctgcccctggagctgctgtgagcccctgcagcagccggcccacagagcccaggaggtag

SEQ ID NO: 156471 - DNA, 2583 bp, Artificial Sequence
  derived and/or modified sequence
atgtgtgacctgcggcggcctgctgctgggggcatgatggacctggcctacgtgtgtgagtgggagaagtggagcaagagcacccactgccccagcgtgcccctggcctgtgcctggagctgcaggaacctgattgccttcaccatggacctgcggagtgatgaccaggacctgaccaggatgatccacatcctggacacagagcacccctgggacctgcacagcatccccagcgagcaccacgaggccatcacctgcctggagtgggaccagagcggcagccggctgctgtctgcagatgctgatggccagatcaagtgctggagcatggctgaccacctggccaacagctgggagagctctgtgggcagcctggtggagggggaccccatcgtggccctgtcctggctgcacaatggagtgaagctggccctgcacgtggagaagagcggggccagcagctttggagagaagttcagccgggtgaagttcagccccagcctgaccctgtttggaggcaagcccatggagggctggattgctgtgacagtgtctggcctggtgacagtgtccctgctgaagcccagcggccaggtgctgaccagcacagagagcctgtgccgcctgcggggccgggtggccctggccgacatcgccttcaccggcggcggcaacatcgtggtggccacagcagatggcagcagcgccagccctgtgcagttctacaaggtgtgtgtgtctgtggtgtctgagaagtgcagaattgacacagagatcctgcccagcctcttcatgcgctgcaccacagacctgaacaggaaggacaagtttcctgccatcacccacctgaagttcctggcccgggacatgtctgagcaggtgctgctgtgtgccagcagccagaccagcagcatcgtggagtgctggagcctgaggaaggagggcctgcctgtgaacaacatcttccagcagatcagccctgtggtgggggacaagcagcccaccatcctgaagtggaggatcctgagcgccaccaatgacctggacagagtgtctgctgtggccctgcccaagctgcccatcagcctgaccaacacagacctgaaggtggccagtgacacccagttctacccaggcctgggcctggccctggccttccatgatggctctgtgcacatcgtgcaccggctgagcctgcagaccatggctgtgttctacagcagcgctgcccccaggcctgtggatgagcccgccatgaagaggcccaggacagctggccctgctgtgcacctgaaggccatgcagctgtcctggaccagcctggccctggtgggcatcgacagccacggcaagctgtctgtgctgcggctgagccccagcatgggccaccccctggaggtgggcctggccctgcggcacctgctcttcctgctggagtactgcatggtgacaggctatgactggtgggacatcctgctgcacgtgcagcccagcatggtgcagagcctggtggagaagctgcacgaggagtacacccggcagacagctgccctgcagcaggtgctgagcacccgcatcctggccatgaaggccagcctgtgcaagctgagcccctgcaccgtgaccagggtgtgtgactaccacaccaagctgttcctgattgccatcagcagcaccctgaagagcctgctgcggccccacttcctgaacaccccagacaagagccctggggaccggctgacagagatctgcaccaagatcacagatgtggacatcgacaaggtgatgatcaacctgaagacagaggagtttgtgctggacatgaacaccctgcaggccctgcagcagctgctgcagtgggtgggggactttgtgctgtacctgctggccagcctgcccaaccagggcagcctgctgcggcccggccacagcttcctgagagatggcaccagcctgggcatgctgcgggagctgatggtggtgatccgcatctggggcctgctgaagcccagctgcctgcctgtgtacacagccaccagtgacacccaggacagcatgagcctgctcttccggctgctgaccaagctgtggatctgcttccccagcacaggcccctgcagcgtgtgggtgctgctgggctggcagcccctgcccggcagagatgagggccctgccagcgagccagatgaggccctggtggatgagtgctgcctgctgcccagccagctgctgatccccagcctggactggctgcctgccagtgatggcctggtgtcccggctgcagcccaagcagcccctgcggctgcagtttggccgggcccccaccctgcccggcagcgctgccaccctgcagctggatggcctggcccgggcccctggccagcccaagattgaccacctgcggcggctgcacctgggcgcctgccccacagaggagtgcaaggcctgcacccgctgtggctgtgtgaccatgctgaagagccccaacagaaccacagctgtgaagcagtgggagcagcgctggatcaagaactgcctgtgtggcggcctgtggtggagggtgcccctgagctacccctag

SEQ ID NO: 156472 - DNA, 2634 bp, Artificial Sequence
  derived and/or modified sequence
atgtgtgacctgcggcggcctgctgctgggggcatgatggacctggcctacgtgtgtgagtgggagaagtggagcaagagcacccactgccccagcgtgcccctggcctgtgcctggagctgcaggaacctgattgccttcaccatggacctgcggagtgatgaccaggacctgaccaggatgatccacatcctggacacagagcacccctgggacctgcacagcatccccagcgagcaccacgaggccatcacctgcctggagtgggaccagagcggcagccggctgctgtctgcagatgctgatggccagatcaagtgctggagcatggctgaccacctggccaacagctgggagagctctgtgggcagcctggtggagggggaccccatcgtggccctgtcctggctgcacaatggagtgaagctggccctgcacgtggagaagagcggggccagcagctttggagagaagttcagccgggtgaagttcagccccagcctgaccctgtttggaggcaagcccatggagggctggattgctgtgacagtgtctggcctggtgacagtgtccctgctgaagcccagcggccaggtgctgaccagcacagagagcctgtgccgcctgcggggccgggtggccctggccgacatcgccttcaccggcggcggcaacatcgtggtggccacagcagatggcagcagcgccagccctgtgcagttctacaaggtgtgtgtgtctgtggtgtctgagaagtgcagaattgacacagagatcctgcccagcctcttcatgcgctgcaccacagacctgaacaggaaggacaagtttcctgccatcacccacctgaagttcctggcccgggacatgtctgagcaggtgctgctgtgtgccagcagccagaccagcagcatcgtggagtgctggagcctgaggaaggagggcctgcctgtgaacaacatcttccagcagatcagccctgtggtgggggacaagcagcccaccatcctgaagtggaggatcctgagcgccaccaatgacctggacagagtgtctgctgtggccctgcccaagctgcccatcagcctgaccaacacagacctgaaggtggccagtgacacccagttctacccaggcctgggcctggccctggccttccatgatggctctgtgcacatcgtgcaccggctgagcctgcagaccatggctgtgttctacagcagcgctgcccccaggcctgtggatgagcccgccatgaagaggcccaggacagctggccctgctgtgcacctgaaggccatgcagctgtcctggaccagcctggccctggtgggcatcgacagccacggcaagctgtctgtgctgcggctgagccccagcatgggccaccccctggaggtgggcctggccctgcggcacctgctcttcctgctggagtactgcatggtgacaggctatgactggtgggacatcctgctgcacgtgcagcccagcatggtgcagagcctggtggagaagctgcacgaggagtacacccggcagacagctgccctgcagcaggtgctgagcacccgcatcctggccatgaaggccagcctgtgcaagctgagcccctgcaccgtgaccagggtgtgtgactaccacaccaagctgttcctgattgccatcagcagcaccctgaagagcctgctgcggccccacttcctgaacaccccagacaagagccctggggaccggctgacagagatctgcaccaagatcacagatgtggacatcgacaaggtgatgatcaacctgaagacagaggagtttgtgctggacatgaacaccctgcaggccctgcagcagctgctgcagtgggtgggggactttgtgctgtacctgctggccagcctgcccaaccagggcagcctgctgcggcccggccacagcttcctgagagatggcaccagcctgggcatgctgcgggagctgatggtggtgatccgcatctggggcctgctgaagcccagctgcctgcctgtgtacacagccaccagtgacacccaggacagcatgagcctgctcttccggctgctgaccaagctgtggatctgctgcagagatgagggccctgccagcgagccagatgaggccctggtggatgagtgctgcctgctgcccagccagctgctgatccccagcctggactggctgcctgccagtgatggcctggtgtcccggctgcagcccaagcagcccctgcggctgcagtttggccgggcccccaccctgcccggcagcgctgccaccctgcagctggatggcctggcccgggcccctggccagcccaagattgaccacctgcggcggctgcacctgggcgcctgccccacagaggagtgcaaggcctgcacccgctgtggctgtgtgaccatgctgaagagccccaacagaaccacagctgtgaagcagtgggagcagcgctggatcaagaactgcctggccgtggagggccggggcccagatgcctgtgtgaccagccgggccagcgaggaggccccagcctttgtgcagctgggcccccagagcacccaccacagccccaggacccccaggagcctggaccacctgcaccctgaggaccggccctag

SEQ ID NO: 156473 - DNA, 2526 bp, Artificial Sequence
  derived and/or modified sequence
atgtgtgacctgcggcggcctgctgctgggggcatgatggacctggcctacgtgtgtgagtgggagaagtggagcaagagcacccactgccccagcgtgcccctggcctgtgcctggagctgcaggaacctgattgccttcaccatggacctgcggagtgatgaccaggacctgaccaggatgatccacatcctggacacagagcacccctgggacctgcacagcatccccagcgagcaccacgaggccatcacctgcctggagtgggaccagagcggcagccggctgctgtctgcagatgctgatggccagatcaagtgctggagcatggctgaccacctggccaacagctgggagagctctgtgggcagcctggtggagggggaccccatcgtggccctgtcctggctgcacaatggagtgaagctggccctgcacgtggagaagagcggggccagcagctttggagagaagttcagccgggtgaagttcagccccagcctgaccctgtttggaggcaagcccatggagggctggattgctgtgacagtgtctggcctggtgacagtgtccctgctgaagcccagcggccaggtgctgaccagcacagagagcctgtgccgcctgcggggccgggtggccctggccgacatcgccttcaccggcggcggcaacatcgtggtggccacagcagatggcagcagcgccagccctgtgcagttctacaaggtgtgtgtgtctgtggtgtctgagaagtgcagaattgacacagagatcctgcccagcctcttcatgcgctgcaccacagacctgaacaggaaggacaagtttcctgccatcacccacctgaagttcctggcccgggacatgtctgagcaggtgctgctgtgtgccagcagccagaccagcagcatcgtggagtgctggagcctgaggaaggagggcctgcctgtgaacaacatcttccagcagatcagccctgtggtgggggacaagcagcccaccatcctgaagtggaggatcctgagcgccaccaatgacctggacagagtgtctgctgtggccctgcccaagctgcccatcagcctgaccaacacagacctgaaggtggccagtgacacccagttctacccaggcctgggcctggccctggccttccatgatggctctgtgcacatcgtgcaccggctgagcctgcagaccatggctgtgttctacagcagcgctgcccccaggcctgtggatgagcccgccatgaagaggcccaggacagctggccctgctgtgcacctgaaggccatgcagctgtcctggaccagcctggccctggtgggcatcgacagccacggcaagctgtctgtgctgcggctgagccccagcatgggccaccccctggaggtgggcctggccctgcggcacctgctcttcctgctggagtactgcatggtgacaggctatgactggtgggacatcctgctgcacgtgcagcccagcatggtgcagagcctggtggagaagctgcacgaggagtacacccggcagacagctgccctgcagcaggtgctgagcacccgcatcctggccatgaaggccagcctgtgcaagctgagcccctgcaccgtgaccagggtgtgtgactaccacaccaagctgttcctgattgccatcagcagcaccctgaagagcctgctgcggccccacttcctgaacaccccagacaagagccctggggaccggctgacagagatctgcaccaagatcacagatgtggacatcgacaaggtgatgatcaacctgaagacagaggagtttgtgctggacatgaacaccctgcaggccctgcagcagctgctgcagtgggtgggggactttgtgctgtacctgctggccagcctgcccaaccagggcagcctgctgcggcccggccacagcttcctgagagatggcaccagcctgggcatgctgcgggagctgatggtggtgatccgcatctggggcctgctgaagcccagctgcctgcctgtgtacacagccaccagtgacacccaggacagcatgagcctgctcttccggctgctgaccaagctgtggatctgctgcagagatgagggccctgccagcgagccagatgaggccctggtggatgagtgctgcctgctgcccagccagctgctgatccccagcctggactggctgcctgccagtgatggcctggtgtcccggctgcagcccaagcagcccctgcggctgcagtttggccgggcccccaccctgcccggcagcgctgccaccctgcagctggatggcctggcccgggcccctggccagcccaagattgaccacctgcggcggctgcacctgggcgcctgccccacagaggagtgcaaggcctgcacccgctgtggctgtgtgaccatgctgaagagccccaacagaaccacagctgtgaagcagtgggagcagcgctggatcaagaactgcctgtgtggcggcctgtggtggagggtgcccctgagctacccctag

SEQ ID NO: 156474 - DNA, 1992 bp, Artificial Sequence
  derived and/or modified sequence
atgtgtgacctgcggcggcctgctgctgggggcatgatggacctggcctacgtgtgtgagtgggagaagtggagcaagagcacccactgccccagcgtgcccctggcctgtgcctggagctgcaggaacctgattgccttcaccatggacctgcggagtgatgaccaggacctgaccaggatgatccacatcctggacacagagcacccctgggacctgcacagcatccccagcgagcaccacgaggccatcacctgcctggagtgggaccagagcggcagccggctgctgtctgcagatgctgatggccagatcaagtgctggagcatggctgaccacctggccaacagctgggagagctctgtgggcagcctggtggagggggaccccatcgtggccctgtcctggctgcacaatggagtgaagctggccctgcacgtggagaagagcggggccagcagctttggagagaagttcagccgggtgaagttcagccccagcctgaccctgtttggaggcaagcccatggagggctggattgctgtgacagtgtctggcctggtgacagtgtccctgctgaagcccagcggccaggtgctgaccagcacagagagcctgtgccgcctgcggggccgggtggccctggccgacatcgccttcaccggcggcggcaacatcgtggtggccacagcagatggcagcagcgccagccctgtgcagttctacaaggtgtgtgtgtctgtggtgtctgagaagtgcagaattgacacagagatcctgcccagcctcttcatgcgctgcaccacagacctgaacaggaaggacaagtttcctgccatcacccacctgaagttcctggcccgggacatgtctgagcaggtgctgctgtgtgccagcagccagaccagcagcatcgtggagtgctggagcctgaggaaggagggcctgcctgtgaacaacatcttccagcagatcagccctgtggtgggggacaagcagcccaccatcctgaagtggaggatcctgagcgccaccaatgacctggacagagtgtctgctgtggccctgcccaagctgcccatcagcctgaccaacacagacctgaaggtggccagtgacacccagttctacccaggcctgggcctggccctggccttccatgatggctctgtgcacatcgtgcaccggctgagcctgcagaccatggctgtgttctacagcagcgctgcccccaggcctgtggatgagcccgccatgaagaggcccaggacagctggccctgctgtgcacctgaaggccatgcagctgtcctggaccagcctggccctggtgggcatcgacagccacggcaagctgtctgtgctgcggctgagccccagcatgggccaccccctggaggtgggcctggccctgcggcacctgctcttcctgctggagtactgcatggtgacaggctatgactggtgggacatcctgctgcacgtgcagcccagcatggtgcagagcctggtggagaagctgcacgaggagtacacccggcagacagctgccctgcagcaggtgctgagcacccgcatcctggccatgaaggccagcctgtgcaagctgagcccctgcaccgtgaccagggtgtgtgactaccacaccaagctgttcctgattgccatcagcagcaccctgaagagcctgctgcggccccacttcctgaacaccccagacaagagccctggggaccggctgacagagatctgcaccaagatcacagatgtggacatcgacaaggtgatgatcaacctgaagacagaggagtttgtgctggacatgaacaccctgcaggccctgcagcagctgctgcagtgggtgggggactttgtgctgtacctgctggccagcctgcccaaccagccctgccccaccagcgagccctgccccaccagcgagccctgccccaccagcgagcccagccccaccagcgagcccagccccacctag

SEQ ID NO: 156475 - DNA, 1614 bp, Artificial Sequence
  derived and/or modified sequence
atgtgtgacctgcggcggcctgctgctgggggcatgatggacctggcctacgtgtgtgagtgggagaagtggagcaagagcacccactgccccagcgtgcccctggcctgtgcctggagctgcaggaacctgattgccttcaccatggacctgcggagtgatgaccaggacctgaccaggatgatccacatcctggacacagagcacccctgggacctgcacagcatccccagcgagcaccacgaggccatcacctgcctggagtgggaccagagcggcagccggctgctgtctgcagatgctgatggccagatcaagtgctggagcatggctgaccacctggccaacagctgggagagctctgtgggcagcctggtggagggggaccccatcgtggccctgtcctggctgcacaatggagtgaagctggccctgcacgtggagaagagcggggccagcagctttggagagaagttcagccgggtgaagttcagccccagcctgaccctgtttggaggcaagcccatggagggctggattgctgtgacagtgtctggcctggtgacagtgtccctgctgaagcccagcggccaggtgctgaccagcacagagagcctgtgccgcctgcggggccgggtggccctggccgacatcgccttcaccggcggcggcaacatcgtggtggccacagcagatggcagcagcgccagccctgtgcagttctacaaggtgtgtgtgtctgtggtgtctgagaagtgcagaattgacacagagatcctgcccagcctcttcatgcgctgcaccacagacctgaacaggaaggacaagtttcctgccatcacccacctgaagttcctggcccgggacatgtctgagcaggtgctgctgtgtgccagcagccagaccagcagcatcgtggagtgctggagcctgaggaaggagggcctgcctgtgaacaacatcttccagcagatcagccctgtggtgggggacaagcagcccaccatcctgaagtggaggatcctgagcgccaccaatgacctggacagagtgtctgctgtggccctgcccaagctgcccatcagcctgaccaacacagacctgaaggtggccagtgacacccagttctacccaggcctgggcctggccctggccttccatgatggctctgtgcacatcgtgcaccggctgagcctgcagaccatggctgtgttctacagcagcgctgcccccaggcctgtggatgagcccgccatgaagaggcccaggacagctggccctgctgtgcacctgaaggccatgcagctgtcctggaccagcctggccctggtgggcatcgacagccacggcaaggtgctgagcacccgcatcctggccatgaaggccagcctgtgcaagctgagcccctgcaccgtgaccagggtgtgtgactaccacaccaagctgttcctgattgccatcagcagcaccctgaagagcctgctgcggccccacttcctgaacaccccagacaagagccctggggaccggctgacagagatctgcaccaagatcacagatgtggacatcgacaaggtgatgatcaacctgaagacagaggagtttgtgctgtag

SEQ ID NO: 156476 - DNA, 1389 bp, Artificial Sequence
  derived and/or modified sequence
atgtgtgacctgcggcggcctgctgctgggggcatgatggacctggcctacgtgtgtgagtgggagaagtggagcaagagcacccactgccccagcgtgcccctggcctgtgcctggagctgcaggaacctgattgccttcaccatggacctgcggagtgatgaccaggacctgaccaggatgatccacatcctggacacagagcacccctgggacctgcacagcatccccagcgagcaccacgaggccatcacctgcctggagtgggaccagagcggcagccggctgctgtctgcagatgctgatggccagatcaagtgctggagcatggctgaccacctggccaacagctgggagagctctgtgggcagcctggtggagggggaccccatcgtggccctgtcctggctgcacaatggagtgaagctggccctgcacgtggagaaggtgctgctgtgtgccagcagccagaccagcagcatcgtggagtgctggagcctgaggaaggagggcctgcctgtgaacaacatcttccagcagatcagccctgtggtgggggacaagcagcccaccatcctgaagtggaggatcctgagcgccaccaatgacctggacagagtgtctgctgtggccctgcccaagctgcccatcagcctgaccaacacagacctgaaggtggccagtgacacccagttctacccaggcctgggcctggccctggccttccatgatggctctgtgcacatcgtgcaccggctgagcctgcagaccatggctgtgttctacagcagcgctgcccccaggcctgtggatgagcccgccatgaagaggcccaggacagctggccctgctgtgcacctgaaggccatgcagctgtcctggaccagcctggccctggtgggcatcgacagccacggcaagctgtctgtgctgcggctgagccccagcatgggccaccccctggaggtgggcctggccctgcggcacctgctcttcctgctggagtactgcatggtgacaggctatgactggtgggacatcctgctgcacgtgcagcccagcatggtgcagagcctggtggagaagctgcacgaggagtacacccggcagacagctgccctgcagcaggtgctgagcacccgcatcctggccatgaaggccagcctgtgcaagctgagcccctgcaccgtgaccagggtgtgtgactaccacaccaagctgttcctgattgccatcagcagcaccctgaagagcctgctgcggccccacttcctgaacaccccagacaagagccctggggaccggctgacagagatctgcaccaagatcacagatgtggacatcgacaaggtgatgatcaacctgaagacagaggagtttgtgctgtag

SEQ ID NO: 156477 - DNA, 1098 bp, Artificial Sequence
  derived and/or modified sequence
atgtgtgacctgcggcggcctgctgctgggggcatgatggacctggcctacgtgtgtgagtgggagaagtggagcaagagcacccactgccccagcgtgcccctggcctgtgcctggagctgcaggaacctgattgccttcaccatggacctgcggagtgatgaccaggacctgaccaggatgatccacatcctggacacagagcacccctgggacctgcacagcatccccagcgagcaccacgaggccatcacctgcctggagtgggaccagagcggcagccggctgctgtctgcagatgctgatggccagatcaagtgctggagcatggctgaccacctggccaacagctgggagagctctgtgggcagcctggtggagggggaccccatcgtggccctgtcctggctgcacaacggcctggccctggccttccatgatggctctgtgcacatcgtgcaccggctgagcctgcagaccatggctgtgttctacagcagcgctgcccccaggcctgtggatgagcccgccatgaagaggcccaggacagctggccctgctgtgcacctgaaggccatgcagctgtcctggaccagcctggccctggtgggcatcgacagccacggcaagctgtctgtgctgcggctgagccccagcatgggccaccccctggaggtgggcctggccctgcggcacctgctcttcctgctggagtactgcatggtgacaggctatgactggtgggacatcctgctgcacgtgcagcccagcatggtgcagagcctggtggagaagctgcacgaggagtacacccggcagacagctgccctgcagcaggtgctgagcacccgcatcctggccatgaaggccagcctgtgcaagctgagcccctgcaccgtgaccagggtgtgtgactaccacaccaagctgttcctgattgccatcagcagcaccctgaagagcctgctgcggccccacttcctgaacaccccagacaagagccctggggaccggctgacagagatctgcaccaagatcacagatgtggacatcgacaaggtgatgatcaacctgaagacagaggagtttgtgctgtag

SEQ ID NO: 156478 - DNA, 1104 bp, Artificial Sequence
  derived and/or modified sequence
atgtgtgacctgcggcggcctgctgctgggggcatgatggacctggcctacgtgtgtgagtgggagaagtggagcaagagcacccactgccccagcgtgcccctggcctgtgcctggagctgcaggaacctgattgccttcaccatggacctgcggagtgatgaccaggacctgaccaggatgatccacatcctggacacagagcacccctgggacctgcacagcatccccagcgagcaccacgaggccatcacctgcctggagtgggaccagagcggcagccggctgctgtctgcagatgctgatggccagatcaagtgctggagcatggctgaccacctggccaacagctgggagagctctgtgggcagcctggtggagggggaccccatcgtggccctgtcctggctgcacaatggagtgcggctggccctggccttccatgatggctctgtgcacatcgtgcaccggctgagcctgcagaccatggctgtgttctacagcagcgctgcccccaggcctgtggatgagcccgccatgaagaggcccaggacagctggccctgctgtgcacctgaaggccatgcagctgtcctggaccagcctggccctggtgggcatcgacagccacggcaagctgtctgtgctgcggctgagccccagcatgggccaccccctggaggtgggcctggccctgcggcacctgctcttcctgctggagtactgcatggtgacaggctatgactggtgggacatcctgctgcacgtgcagcccagcatggtgcagagcctggtggagaagctgcacgaggagtacacccggcagacagctgccctgcagcaggtgctgagcacccgcatcctggccatgaaggccagcctgtgcaagctgagcccctgcaccgtgaccagggtgtgtgactaccacaccaagctgttcctgattgccatcagcagcaccctgaagagcctgctgcggccccacttcctgaacaccccagacaagagccctggggaccggctgacagagatctgcaccaagatcacagatgtggacatcgacaaggtgatgatcaacctgaagacagaggagtttgtgctgtag

SEQ ID NO: 156479 - DNA, 2256 bp, Artificial Sequence
  derived and/or modified sequence
atgtgcgacctgcggcggcccgccgccggcggcatgatggacctggcgtatgtatgtgaatgggaaaaatggagcaaaagtacacactgcccctcagttccactggcctgcgcttggtcttgtaggaacctgatagcatttacaatggatctccggtctgatgatcaggatctgacaaggatgattcatatcctggacacagagcacccttgggatctgcacagcatcccaagcgagcatcacgaagcaattacctgtctggaatgggaccagtccgggagccgcctgctgtccgcggacgcagatggtcaaatcaaatgctggagcatggctgatcatctggcaaacagctgggaatcaagtgttggctctctcgtggaaggagacccgatagtggcactgtcctggctgcacaacggcgtcaagttggcgctccacgtggaaaagtccggagcttccagctttggagagaaattttctcgggtgaagttctccccatccctgactctgtttggcgggaagccgatggaaggttggattgccgtaactgtgtctggactcgtcactgtgtctttacttaaaccgagtggccaggtattaacatcaacagaatcactgtgtcggctaagaggaagggtggctctggccgacattgcattcaccggcggagggaacatcgtggtcgctacagccgatggctcaagtgcctcgccggttcagttttataaggtttgcgtttccgttgttagcgagaaatgtcgaatcgacaccgagatcctgccatccctgtttatgaggtgcaccacagatctgaaccgcaaggataagttcccagcgataacccatctgaagttcctggccagagatatgtcagaacaggtgctgctatgcgccagctcgcaaacttcatccattgtggagtgctggtctcttagaaaagaggggctgccagtgaacaatattttccagcagatcagccccgtggttggagacaaacaacccaccattctcaagtggcggattctttctgcaactaatgacctcgatcgcgtgtccgcagtggccctgccaaagctgcctatctcactgactaataccgacttgaaggtcgccagcgacacacaattctatccagggctgggattagccttggcttttcacgacggctccgtacacatagtgcacaggctgtccctccagactatggccgtgttctattcatcagccgccccgagaccagtcgatgaaccagcaatgaagaggccaagaacggctggacccgccgtgcaccttaaagccatgcagctatcctggacatcacttgctcttgtaggcatagacagtcatggaaagctctctgtgctgcgcctaagccccagtatggggcacccactggaggtcggactggcactacgtcatctgctcttcctgctggaatattgtatggtgaccggctacgattggtgggacattctgcttcacgtacagccatccatggtgcagtcccttgtggagaagctccatgaggagtacactaggcaaacagcagccctccaacaggtcctgtccactcgcattctggcgatgaaagcttcactttgcaagctctccccgtgtaccgtgaccagagtgtgcgattaccatacaaaacttttcctcatcgcaatcagtagtactctgaagtccctcttacggccgcactttttgaatacacccgacaaatcaccaggagatcgactgacagaaatatgcacaaaaattacagacgtggacattgataaagttatgatcaatctcaagacagaggaattcgtgctagatatgaacacattacaggcgctgcagcagctgcttcaatgggttggggatttcgtgctgtacctgttggcaagcctgcctaatcaagtggctatgagagcccagagagcaagtcggacacgccgatggtggatgaacgcggcctgttgtcctgcttcatgcttgagtcccgcgtggacaggatgccagccagccactgcctggcttgcagcttgctcacccagtagtccattcgtgtgtagcctggctggacggccaagatgcttggctgtgctgccaccgtgttccagcaccgccagtcctggcccccaagccagccccagaagcaccacatgcggaggttgtacgcttgccctggcccccagacgcaatgctcgaccggcacccggagccgctgtttccccttgcagttcgcggcccacagagcccaggaggtag

SEQ ID NO: 156480 - DNA, 2583 bp, Artificial Sequence
  derived and/or modified sequence
atgtgcgacctgcggcggcccgccgccggcggcatgatggacctggcttacgtatgcgagtgggaaaagtggagcaaatcaacccactgccccagcgtccctctcgcgtgtgcttggtcatgcagaaatcttatcgcattcaccatggacctgcgctctgacgaccaggaccttacgcgtatgatccacattctggatacagaacacccttgggacctccattccatcccatctgaacaccatgaagccatcacttgtctggaatgggaccagtctgggtctcggctgttaagcgcagatgccgacggccagattaagtgctggagcatggctgaccacttggctaactcctgggaaagcagcgtgggatccctggtcgaaggcgatcccatagtcgctctcagctggctgcacaatggggtgaaactggcattgcatgttgagaaatctggagcgagctcttttggggaaaaattttccagagtcaagttctctccaagcctcaccctcttcggcggaaaacccatggagggctggatagccgtcaccgtgagtggcctggtgactgtctctctgcttaagcccagtgggcaggttctgactagtaccgaatccttgtgtaggctccgcggtcgggtggctttagcagacattgcgtttactggcggtggaaacattgtcgtggcgaccgccgatgggtccagcgcatctccagtgcagttctacaaagtgtgcgtatccgtcgttagtgaaaagtgcagaattgacactgaaattttacccagcctatttatgaggtgtacaaccgacctgaaccggaaggacaaatttcctgcaattacacatctgaagttcctggctcgcgacatgtcagagcaagtgttactgtgtgcgagctctcagacgtcctcaatcgtggaatgttggtccctgcgcaaagagggccttcctgtgaataacatcttccagcagatttcccctgtcgttggcgataaacagcctaccattctgaagtggcgtatcctgtctgccaccaatgacctagatagggtgtcggccgttgccctgcccaaactgcctatcagtttaacaaatactgatctgaaggtggcttcagacacacagttttatcccgggcttggtctcgcgctcgcttttcacgacggatccgttcacattgtgcaccgtctttcgctgcagacaatggccgtgttttactccagcgctgcccccagacccgtggatgaaccagccatgaagcgcccgcgaaccgcaggcccagcagtgcacttgaaggcaatgcaactcagctggacctcactagcgctggtgggtatagatagccacgggaagctgagcgttctgagactgtctccaagcatgggccatccgcttgaggtgggtcttgcgctcaggcatctgctgtttttgctcgagtactgtatggtgacggggtatgattggtgggatatcttactgcacgtacagccttccatggttcagtcactagtcgaaaaacttcacgaagagtatacacgacagaccgccgccttgcagcaggtgctgtctacgcggatcctagctatgaaggcctccctttgcaaacttagcccctgcaccgtcacccgggtctgcgactaccatacaaaattattcctgattgcaatatccagcacgttaaagtcactgcttcggcctcatttccttaacaccccagacaagagccccggcgaccgccttaccgaaatctgtactaagatcactgacgttgacatagataaggtcatgattaatctgaaaactgaagaatttgtgttagatatgaacacccttcaggcgctccagcagctgctgcagtgggtgggggacttcgtgctctacctgctggcctccctgcccaatcaaggcagcctgctccgccccggccatagttttctccgcgatgggacttcacttggtatgctccgcgagttgatggtggtaattcgcatttggggactgctcaagccatcttgcctgcccgtgtatacggcaactagcgacacgcaggattccatgtccctgctatttaggctgttaacgaagctctggatctgtttcccttccaccgggccctgctctgtctgggtgcttttaggctggcaacccctaccggggcgagatgaggggcccgctagcgagcccgacgaggcactcgtggatgagtgctgcctgctaccatcacagctcctgattccatctcttgactggcttcctgccagcgacggactcgtgagccgactccaacctaaacagccgctacgtctgcagtttggccgagctcccacgctgccgggttccgccgccactctgcagctcgacggacttgcgcgagctcccggccaacctaagatcgaccatttacggcggctgcacttaggggcctgccccacagaagagtgtaaggcctgcactaggtgcggctgcgtgacaatgctgaagagtccaaacagaaccactgccgtaaaacagtgggagcaacgttggataaagaactgtttatgcgggggtctctggtggcgggttcccctgtcttacccctag

SEQ ID NO: 156481 - DNA, 2634 bp, Artificial Sequence
  derived and/or modified sequence
atgtgcgacctgcggcggcccgccgccggcggcatgatggacctggcctacgtgtgtgagtgggagaagtggagcaagtcaacgcactgccccagcgttccactagcttgcgcctggtcctgcaggaatctaatagccttcactatggatttgcgtagcgatgaccaggacctcacacggatgattcatattttggacaccgaacacccatgggatttacactccatcccgagcgaacatcatgaagccatcacctgcttggagtgggatcaatccggatctaggcttttatctgctgatgccgacgggcagatcaagtgctggtccatggccgaccacttggctaattcatgggagagttctgttggaagtcttgtggaaggcgatcccatcgttgcccttagttggctccataatggcgtcaaactggccttgcatgtggaaaagagcggcgcttcctccttcggcgagaagtttagtcgcgtcaaattctcgccgtctctgaccttgttcgggggcaagccaatggagggatggattgccgtaacagttagcggcttggtgaccgtttccttactcaaacccagcgggcaggtgcttacttccactgagagcctctgcagactccgggggcgggtcgccctggctgatattgcttttaccggcgggggaaatatcgttgtcgccactgccgacggttcaagcgcctcaccagtgcaattttacaaggtctgtgtctcagtcgtctccgaaaaatgtagaatagataccgaaattctacccagcttgtttatgcggtgcaccaccgaccttaaccgaaaggataaatttcctgccataactcacctgaagtttttagcacgcgatatgtctgaacaggtccttttatgtgcgtcttcccaaacttctagcatcgtggaatgctggagcctgagaaaagaagggctgcctgtgaacaacatttttcagcaaataagtcctgtggtgggtgataagcagcctactattcttaagtggagaatcctcagcgccactaacgatctggacagagtgtcagccgtcgctttacccaagctccccatatcccttacaaacacagaccttaaggtggcaagcgacacccaattttaccccggtctgggactggctctggcttttcacgacggcagcgtccacatagtgcatagactctccttgcaaacaatggcagttttttatagctctgccgccccgcggcctgtggatgagccggctatgaagaggcccagaaccgctggacccgcggttcatctgaaggcgatgcagttaagctggactagtctggctcttgtgggaatcgattcacatggcaagctcagtgttcttagactctctccctctatgggccatccattagaagttggccttgcgctccggcacctgctgttcctactggaatattgtatggtcacaggctacgattggtgggacattctgttgcatgtgcagccatcaatggtccagtctctcgtggagaagttgcacgaggaatacacccgccagactgcagccctgcaacaggtactgagcacgagaattctggcgatgaaagcttccctatgcaaactgagcccctgcacagtcaccagagtttgtgattaccataccaaactgttcttaattgcaattagctcaacactcaaatccctcctgcgaccccactttctcaacacaccagacaaatctcccggagatcgcctaacagaaatctgcaccaaaatcaccgatgtggatattgataaggtgatgattaatttgaagaccgaggaatttgttctggacatgaatactttacaggcccttcagcagttactccaatgggttggagactttgtactctacttactggcatcactccccaaccagggctctctcctaaggccggggcacagcttcctccgggacggaactagtttaggtatgctccgcgaactgatggtggtgattcgtatttggggtctgttgaagcctagttgccttcccgtctacaccgccactagcgacactcaggattcaatgagtctgctgttccggctgcttaccaaactgtggatctgctgccgggacgaaggtcccgcctctgagccagatgaagcattagtggatgaatgctgcctgctcccttctcagctgctcatcccttctctggactggctccctgcaagcgatggtctggtttcaaggttgcagcccaaacagccgctccggctgcaatttgggcgcgctccaactctccctggtagtgcggccacactccagcttgatggactcgccagagcgccaggacagcccaagatcgaccaccttcgcagactgcaccttggagcatgcccgactgaggaatgtaaggcttgcaccagatgtggctgtgttacaatgcttaagagtcctaacaggactaccgcagttaaacagtgggaacagcggtggatcaagaattgcctggcggtcgagggtcgcggtccggacgcctgcgtcacgtcaagagcaagcgaggaagctcccgcatttgttcagctcggaccccagtccactcaccattcaccgaggaccccgcgctctttggatcatctgcacccggaggaccgcccttag

SEQ ID NO: 156482 - DNA, 2526 bp, Artificial Sequence
  derived and/or modified sequence
atgtgcgacctgcggcggcccgccgccggcggcatgatggacctggcgtatgtgtgtgaatgggagaaatggtcgaaatcgacacactgcccatccgtcccactcgcatgcgcctggagttgccgtaacctgatcgcttttaccatggatctgagatctgatgaccaagatctaacccgaatgatccacatcctagacaccgagcacccgtgggacctgcattcaatcccctcggagcaccacgaggccatcacctgcttggaatgggatcagagcggttcaaggctactctctgccgacgctgatgggcagatcaaatgctggagcatggctgaccatctggccaacagctgggagtcctccgttggatcgcttgtggaaggcgaccctattgtcgccctgagttggctgcacaacggcgtaaaactcgcccttcatgtcgagaaatctggagcctcctccttcggagagaagttctctcgtgtgaaattcagtccatcactgacactatttggcgggaaaccgatggagggctggatcgccgtcactgtatccggcctggttacggtctcactacttaaaccgtcaggccaggtgctgacgagcaccgagtctctgtgtagactgcgaggccgagtagctctggccgacatcgcctttaccggcgggggcaatatcgtggtggcaacggccgatgggtcgtccgcctcaccagttcagttttataaggtgtgcgtttctgtggtctcggagaagtgtcgtattgacacagagatacttccctccttattcatgaggtgcacaaccgaccttaaccgaaaggacaaatttccagctattactcacctaaaatttctcgccagagacatgtcggaacaggtactgctttgtgcctcaagccaaactagttcgattgttgagtgttggagcttgagaaaagaggggttgcctgtgaacaatatcttccagcagatttcaccggtggtgggcgataaacagccaactatcttaaaatggcgcattctatccgctaccaacgacttggaccgcgtgtccgctgtggccctccctaagctcccaattagtctgacaaatacagatctgaaagtggctagcgacacacagttctacccaggcctgggcctcgccctggccttccatgatggctctgttcatatcgtgcatagactaagccttcaaacaatggctgtgttctactcctccgctgctccccggccagttgacgaaccggctatgaaacgacctaggactgcgggaccagctgtgcatctgaaagccatgcagctctcatggacctccctagcactggtcggaatcgattctcatggcaagctcagcgtgcttagactgagtccaagtatgggtcaccccctggaggtgggtttggccctcagacatctgttgtttctgctggaatactgtatggttactggctatgattggtgggacatactcctgcacgtgcagcctagcatggtccagtctctcgtagaaaaactgcacgaggagtacaccagacagaccgccgccctccagcaggtgctctctaccagaatcctcgctatgaaagcaagtctgtgcaaactttccccctgcacagtgactcgagtctgcgactatcatactaagctgtttttaatcgcaatctcatctacgctgaagtccttgttgcgccctcacttcctgaacactcccgataaatcccctggagaccgcctaaccgagatttgcactaaaataaccgatgttgacatcgacaaggtaatgattaatttaaagacggaggaattcgtattggatatgaacactttacaggctttacagcagctgctccagtgggtaggcgattttgtgctatacctgctggcttcactgcccaaccagggctcactgctacgcccaggacactcttttctccgggatggcacctctctaggtatgctgagagagttgatggttgtaatacgaatatggggactgctaaagccaagctgtctccctgtctatacagctacctctgatactcaggattcgatgtccttgctgtttagacttctcaccaagttatggatctgttgtagagatgaaggccctgcttccgaaccagacgaagccttggtggacgaatgttgccttctgccctcgcagctgctgattccaagcctcgactggctcccagcaagcgacggtttggtttcacgtctgcaacctaaacagcctctgcggctccagttcggaagggccccaactctgccaggatctgctgccactctgcagctcgacggacttgcacgtgcccccgggcagcccaagattgaccacttgagacggctgcatctcggtgcttgcccgacagaagagtgcaaggcctgtaccagatgcggttgtgtgactatgctaaaaagcccaaacagaaccactgccgttaagcaatgggagcagcgctggattaagaattgcctgtgtggcggactgtggtggagggtgccattgtcgtacccatag

SEQ ID NO: 156483 - DNA, 1992 bp, Artificial Sequence
  derived and/or modified sequence
atgtgcgacctgcggcggcccgccgccggcggcatgatggacctggcctatgtgtgcgagtgggagaagtggtctaagtcaacgcattgtccctctgtgcccctggcctgtgcctggtcatgccgtaatctgatcgcatttactatggacctgagaagcgatgaccaggacctgacccgcatgatccacatattagatactgaacatccatgggacctgcactcaatccccagtgaacaccacgaggccattacgtgtctggagtgggaccagtccgggtcacgtctgcttagtgcagacgcagacggtcaaattaaatgctggagcatggctgatcaccttgccaatagttgggagtcaagcgtcggctccctcgtcgaaggcgaccccattgtggccctttcttggctacacaatggggtgaaactcgcactgcacgtggaaaaaagcggtgcgagtagctttggcgaaaagttctccagggttaagttctctccctctctcactctttttggcgggaaacctatggaaggatggatcgcagtgacagtctccggtctggtaacggtgtcccttctgaaacctagcgggcaagttctcacttccactgagtccctgtgccgactgagaggcagggtggcgcttgccgacattgcttttacaggcggcggcaatattgtagtcgccaccgctgacggctctagcgcgtcccctgtgcagttttacaaagtgtgcgtctcagtcgtttctgaaaagtgccggatcgacactgaaatcctgcccagcctgtttatgaggtgcacaactgaccttaatcgcaaagacaaatttcctgctattacgcacctgaagttcctggccagagatatgtctgagcaggttctactctgcgcctcatcacaaacaagctcaatcgttgagtgctggtccttgaggaaggaagggttgcctgtgaacaatatcttccagcagatttcccccgtagtcggggacaagcagcctaccatcttaaagtggcgtatccttagcgctactaatgacctcgatagggtgtccgctgtcgcactgcctaaacttccgatatccctgacaaataccgaccttaaggtggccagtgatacgcagttctacccagggcttggattggccttggcatttcatgacggttccgtgcacatcgttcaccggttgagcctgcagaccatggcagtcttctattctagcgctgccccccgaccagttgatgagccagcaatgaagcgccctcggacggctggccctgcggtccatctcaaggccatgcagttaagctggacaagtctggcactggtggggatagatagtcatgggaagttatccgttctaagactctctccgtctatgggccaccccttggaagtggggctcgctctaagacacctactcttcctgcttgaatactgtatggttaccggctatgactggtgggatattctgctgcatgtgcagccctctatggtgcagtccctggtcgagaagctgcatgaagagtatacccggcagacggctgccctgcagcaagttctgagtacacgtatcttggccatgaaggcttccctgtgtaagctgagcccgtgtactgtcacccgggtgtgcgactaccatacaaaactgttcctcattgctatttcaagcacccttaaatcactgctcaggcctcatttcctgaatactcctgacaagagtcccggggataggttgacagaaatatgcactaagatcacggatgtggacatcgacaaagtgatgatcaacctgaaaacagaggaattcgtcctggatatgaacactctgcaggctcttcagcagctgttgcaatgggtcggtgatttcgtcctttacttgcttgcttcacttcctaaccaaccatgtccgacctcggaaccttgtcccacgagtgaaccatgtcctactagcgagcctagtcctacttcagaaccttcacccacttag

SEQ ID NO: 156484 - DNA, 1614 bp, Artificial Sequence
  derived and/or modified sequence
atgtgcgacctgcggcggcccgccgccggcggcatgatggacctggcatatgtatgtgaatgggagaagtggtctaaaagcacccactgcccctctgtaccactcgcgtgcgcctggtcctgcaggaatctcatcgcatttactatggacctgcgctccgatgaccaggacttgacccgaatgatccatattttggacacggagcacccatgggacctacatagcattcccagcgagcatcacgaggccattacctgtctcgagtgggaccagtctggaagtcggttattgagtgccgatgcggacgggcagattaagtgctggtcaatggctgatcatctagctaatagctgggagagttcggtgggttcactagtggagggcgacccgatcgtcgccttgtcttggcttcataatggggtcaagttggccctgcacgtcgaaaagagcggcgcctcaagtttcggtgaaaaattctccagggtaaagttttcaccttcactgacactctttggcggaaaaccaatggagggctggattgccgttacagtatcaggcctggtcactgtgagcttgctgaagccctctggccaggtgctaacgtccaccgagtctctttgtcgcctacggggaagggtggcgcttgccgatatcgcttttactggagggggaaacattgtggtggccactgccgatgggtcttctgcctcccctgtgcagttttataaagtctgcgtctccgttgtgtccgagaagtgccggatcgacaccgaaatcttaccctccctgtttatgcgctgtaccacggatctcaaccggaaagacaagtttcctgcaatcacgcatctaaaattcctcgccagagacatgtccgagcaggtgctgctgtgcgccagttcccagacgagcagtatcgtggagtgctggagcctgcggaaagagggcctccccgtcaataatatctttcaacagatttcacccgtggtgggcgataagcagcctaccattctcaaatggcggattctgtctgctaccaatgatctcgacagggtctctgcagttgccctacccaagttgccaatctcactcacaaacacagacctcaaggtcgccagtgacacacaattctatccaggtctgggcctcgcccttgcgtttcatgacggctcagtgcacatagttcatcgtcttagcctccagacaatggcagtgttttactcctctgcagcacctcgtcctgtcgacgaacccgctatgaagagacctcgaaccgccggccctgcagtgcatcttaaagccatgcagctgtcttggacttccttggccctcgttggaattgatagccacggtaaagtactttcaacaaggatacttgcgatgaaagcctctctgtgtaagctgtcgccgtgtacagttacaagagtgtgcgattaccatacgaagctgttcctcatcgcaatcagttctactcttaagtccttgctcaggcctcactttctgaatacccctgacaagtccccaggcgatcgacttacggagatctgcactaagatcaccgacgttgatattgacaaagtgatgatcaacctgaagactgaagaatttgtactgtag

SEQ ID NO: 156485 - DNA, 1389 bp, Artificial Sequence
  derived and/or modified sequence
atgtgcgacctgcggcggcccgccgccggcggcatgatggacctggcctacgtgtgcgagtgggaaaaatggagtaaatcaacacactgcccctctgtgcccctggcatgcgcttggagctgccggaatctgattgcctttaccatggatttgcgctcagatgatcaggacctgactaggatgatacatatcctggatacagaacacccttgggacctccactcgatccccagcgaacaccacgaggctataacctgcctggaatgggatcagagcggctccaggctgttaagcgcggatgcagatggccagataaaatgctggtccatggctgaccatcttgctaatagctgggagagctcagtgggcagcctggttgagggagatccgattgtggcactgtcttggctgcataacggggtaaagctagctttgcacgtggagaaagtgctgctgtgcgcgtctagtcagacatcctccatcgtggaatgttggtccctgaggaaagaggggctgcccgtgaacaatatctttcagcagattagtcccgtggtgggcgacaagcagcccacaatcctcaagtggcgcatcctgagtgcaaccaacgaccttgatcgggtgagtgccgtggctctgcccaaactgcctatcagcttaactaacactgacctaaaggtagctagtgacacgcagttttatcctggattaggactggccctggccttccacgacgggtccgtgcacatcgtgcataggctttccttgcagacaatggccgtgttttatagttccgctgcccccaggcccgtggacgagcctgctatgaagcgaccaagaacggcgggacctgcagtccatctgaaagccatgcagctgtcttggacaagcctggctctggtaggtattgatagccacggcaaactcagtgtgttacgcttgtccccaagcatgggccacccgctggaggtcgggttggctctcaggcatttgctgtttttactggagtattgtatggtcacgggatatgattggtgggacatcctgcttcacgtgcagccatccatggtgcaatccttggtagaaaagctccatgaggagtatacccgtcagaccgcggccctgcagcaggtgctgtccaccagaattttggctatgaaggcatctctatgcaagctgtcaccttgtacagtaacacgagtatgcgattaccacactaaactcttcctgattgccatctcgagcacactaaagtcactcttgagaccccactttttgaacactcctgataaaagccctggtgataggctaacagaaatttgtactaaaatcaccgacgtcgacatagataaggtcatgatcaacctgaagactgaagagtttgttctgtag

SEQ ID NO: 156486 - DNA, 1098 bp, Artificial Sequence
  derived and/or modified sequence
atgtgcgacctgcggcggcccgccgccggcggcatgatggacctggcctatgtttgtgagtgggaaaaatggtcgaagtctacgcattgcccgagcgtccctctcgcctgtgcctggtcatgtagaaatctcattgcgttcacaatggacctcaggtcagacgaccaggacttaactcgaatgatccatattctcgacacagagcatccttgggaccttcacagcattcctagcgagcatcatgaggcaatcacatgcctcgaatgggatcagtctgggtcccggcttctgagtgcagacgccgatggccagattaagtgctggagtatggcggatcatctggcaaattcttgggagagtagcgtggggtccctcgtagagggcgaccccatcgtggccctgtcatggcttcataacggattggcactggctttccatgacggctctgtgcatattgtgcacaggctgtcactgcagactatggccgtgttttactcttcggcagcgcccagacctgtggatgagcctgctatgaaacgacctcgaaccgcagggccagcagtccacctcaaagccatgcaattgtcctggacgtcactggccctggtgggcattgactcccatgggaaactttccgtattacgtttgagcccctctatgggtcatccattagaggttggtctggctctgcgacacctgctgttcctgcttgaatactgtatggttacaggctatgactggtgggacattttattacatgtccagccttcaatggtacagagcctggtggaaaaacttcatgaggaatatacaagacagacagccgctttacagcaagtcctcagcacaaggatactggctatgaaggcctctctgtgcaagctgtccccatgcacagtgactcgagtttgcgactatcatacgaagttattccttattgccattagctcaaccctgaaatccctgctcagaccacatttcttgaacactcccgacaagagtccaggcgaccgcctgacagagatctgcactaagatcactgacgtagacatcgacaaggttatgattaatttgaaaactgaagaatttgtgctgtag

SEQ ID NO: 156487 - DNA, 1104 bp, Artificial Sequence
  derived and/or modified sequence
atgtgcgacctgcggcggcccgccgccggcggcatgatggacctggcttacgtctgcgagtgggagaagtggagcaagagcacacattgccccagcgtacccttagcatgtgcctggtcctgtcggaacttaatcgcgttcaccatggatctcaggtccgacgatcaggatctcacccgtatgatccatattctggacacggagcatccttgggatctgcatagtattccaagcgagcatcacgaggccatcacttgtttggaatgggaccaaagcggcagccgcctgctctctgctgacgcagatggacagatcaagtgttggagtatggcagatcacctcgccaattcctgggagtcatcggtaggctctctggtggaaggcgaccctatcgtggccctgtcttggctccataacggcgtcaggctagcattggccttccatgacgggtcagttcatatcgtccaccggctgtcgctccagaccatggcagtgttctattcatctgccgcgcctaggcctgtggatgaacccgccatgaaacgcccccggactgcgggaccagcagtacacctcaaggctatgcaactgtcctggacgagcttggctctggtcggaatcgactcccatggaaagctatcagtcttgcggctgtctcccagtatgggacatcctttagaggtaggcctagctctgcgtcatctgttattcctcttggagtactgcatggtcacaggttacgattggtgggatattctgctacatgtacagccatccatggtgcagagcctggtggagaagctccatgaagagtatactagacagaccgcggcactgcagcaggtactgagcacccgcattctagccatgaaagcttcgctttgcaagttgagcccctgcacggtgacccgtgtgtgtgattatcacacgaagttatttctcattgccatctcttccacgcttaaatctctgctccggcctcattttttgaatacccctgacaagtctccgggagataggctgaccgagatctgtacaaaaatcactgacgtggatattgacaaggtaatgattaatctcaagactgaagagtttgttttgtag

SEQ ID NO: 156488 - DNA, 2256 bp, Artificial Sequence
  derived and/or modified sequence
atgtgcgatctgcgacgccctgctgctggcggaatgatggacctggcttatgtgtgtgagtgggagaagtggagcaaaagtactcattgcccgagtgtgcccctcgcctgcgcctggtcatgcaggaacttaatagctttcacaatggacctgcgctccgacgaccaggacctgacacgcatgattcacatccttgacactgagcacccctgggacctccattctataccgagcgaacaccacgaagcaatcacatgcctggagtgggatcagtcaggctccaggttgctgtctgctgatgcagacggccagatcaaatgttggagtatggccgaccatctggccaattcatgggaaagtagcgtgggctcactggtagagggtgatcccatcgtagcgctgtcatggttgcacaatggtgtgaagctggccctgcatgtggagaagagtggcgcatctagctttggtgagaagttcagccgcgtgaagttttctccttctctcaccctgttcggcggtaagcccatggagggctggatagcggtgaccgtgtctggtctggttaccgtctctctattaaaaccctcaggccaggtcctgacttctaccgagtctttgtgccgtctgcgtgggcgagtcgcattagcagacattgcctttactgggggagggaatattgtggtggccactgctgacggctcttcagcctcgcccgttcagttctataaggtttgtgtctcagtggtgagcgaaaagtgtaggattgataccgagatcctgcctagcctgttcatgagatgtactacagacctgaataggaaggataaattccccgctattacgcacctgaagttcctggctagagatatgagcgagcaagtgctcctgtgcgcctcaagccaaacttctagcatcgtggagtgttggagcttacgaaaagaaggcctacctgtaaataatattttccaacaaatttcccccgtggtgggcgataaacaacccacaatactgaaatggagaattcttagcgcgacaaacgatttggatagggtgagcgctgtggcacttcccaaactgcccatctcattgactaacaccgaccttaaagtcgcctcagacactcagttttacccaggtctgggccttgccttggcatttcatgacggatcggtgcatatcgtgcatcgcctcagtcttcaaacgatggccgttttctactccagcgcggctcccagacctgtagacgagccagccatgaagaggcctcgtactgcagggccagctgtgcacctgaaggccatgcaactgtcctggacatcattggctctagtgggaattgatagccacggaaaattaagcgttcttaggctgtcccccagcatgggacatcctctcgaggtcggattagcactgaggcatttgcttttcctgcttgaatactgtatggtgacaggttacgattggtgggacattttattgcacgtgcagccatccatggtgcagtcgctggtcgaaaagctgcacgaggaatatactcgccagacagcggctcttcagcaagtgctgtctaccagaattctggccatgaaggcgtctctctgtaaattgtcaccttgcactgtgacccgggtgtgtgattatcatacaaagctcttcctcatagccattagcagtaccctgaagtcgctgctgagacctcatttcctaaacacccccgataaaagccccggtgaccggttgacagagatttgcacaaaaataacggatgtcgacattgacaaagtcatgataaatttgaaaactgaggaatttgtgttagacatgaatactctgcaggccctgcagcagctgctgcaatgggtgggagatttcgtgctttacctattagcgtctctgccaaaccaagtcgcgatgcgggcacagagggcttctcgcactcgccgttggtggatgaatgcagcctgctgtccagcgtcatgtctgagcccagcctggacgggatgccagcctgctaccgcctggctggctgcttgttcaccaagtagcccatttgtgtgcagtctggcaggccgtcctcggtgtctcgctgtgctccctccttgtagcagcactgcctccccaggcccacaagcttctcccaggtctaccacttgcggcggatgcacgcttgccttggctcctcggcgtaacgccaggcccgcaccaggcgctgcggtatccccatgttcctcccgccctaccgagcctcgcagatag

SEQ ID NO: 156489 - DNA, 2583 bp, Artificial Sequence
  derived and/or modified sequence
atgtgcgaccttcggaggcccgctgcagggggaatgatggatctagcgtatgtctgtgaatgggagaaatggtctaagtccacacattgcccgagtgtaccgctggcttgcgcatggtcttgcagaaacctgatcgcttttacgatggatctcagaagcgatgaccaggatcttacacgtatgattcacatattggacacagaacacccatgggacctacacagtattcctagtgaacaccatgaagcgataacttgtctggagtgggaccagtctggctcacggctgctgtccgcagatgcggacggacagattaaatgttggagcatggcagaccaccttgcaaactcctgggaaagtagcgttggctcactcgtggagggggatcccatcgtcgccctttcatggctccataacggcgtgaaactcgcacttcatgtggagaagtccggggcttccagcttcggggaaaagttctcccgagtcaaattcagtcctagcctaactctttttggtgggaaaccaatggaagggtggatagcagtgaccgtcagtggactggtcacagtatctttgctgaaaccatctggacaggtcctaacaagcacagaatcattatgccggctccgcggtagagtggcattagcagatattgcctttaccggaggcggaaatatcgtggtggccaccgctgacggctcatccgcctcccccgtacagttctacaaggtctgtgtttccgtggtctcagaaaaatgccgaatagacacagaaatcctgccttccctattcatgcggtgtactacagatcttaacaggaaggataaatttccagccattactcatctgaagtttttggcccgagatatgtcagaacaggtccttctctgtgcttcttcccagacatcttctatcgtggaatgctggagcttgagaaaggaaggtctgcccgtgaacaatattttccagcagatatcaccagtcgtgggcgacaagcagccgactatcctcaaatggagaattctgtcagccaccaatgatcttgatcgcgtttcggcagtggctctgcctaaattacccatctccctgactaacacggatctgaaagtagcaagcgatacgcagttttatccaggactgggtctcgcactagctttccatgacgggtccgtacatatagtgcataggctctcccttcagactatggcagttttttattcatctgcggcacccaggccagtggacgagccggcaatgaagcggccaaggacagccggacctgccgttcatctaaaagctatgcagctgtcttggacttccctggccctggtggggatcgactcacatggaaagctctccgtcctaaggctgagcccgagcatggggcacccactggaggtcggacttgcgctgagacacctcctgtttttgctcgagtactgtatggtgaccggctacgattggtgggatattctgctgcacgtacagccctctatggtccagtcacttgtagaaaagctccacgaggaatacaccaggcagacagctgctttgcagcaagtcctgagtacccggatactggccatgaaggccagcctttgtaagctttcaccatgtactgtgacccgggtgtgtgattaccataccaaactttttttgattgccataagctcgacacttaagtccctgcttcggccacacttcttgaacacacccgacaagtctcccggagaccgcctgactgagatctgcacaaagattacagatgtggacatcgataaagtgatgataaacctgaagaccgaggagtttgtgcttgacatgaacaccctgcaggccctgcaacaactgctgcaatgggttggcgattttgtcctatatctgttggcttcactgcccaatcagggaagcctgttgcgacccggacattcgttccttcgagacgggacatcgctaggcatgctgagagagctcatggtggtcattagaatttggggactgctaaaaccatcctgtctccccgtgtatactgccacatccgatactcaggactcaatgagtctgctgtttcgactcctgacaaaactgtggatttgtttcccctctacgggcccatgttccgtatgggtgctactcgggtggcaaccacttccagggcgagatgaaggacccgcaagtgagccagatgaggctctagtggacgagtgttgtctgttgccatcacagttactcattccaagcctggattggctcccagccagcgatggattagtgagcaggctccagcctaaacagcccctccgacttcaattcggccgagctcccaccctgcccggaagcgccgcaacacttcaactcgacgggctggcacgggctcctggacagccaaaaatcgatcacctcaggaggcttcatctgggtgcttgtccaaccgaggagtgcaaagcttgcactcggtgtggctgtgtgacaatgctcaagtcccccaatcgaaccaccgcagtgaaacaatgggaacagcgatggattaagaactgtctttgtggcggactgtggtggcgtgttccactgtcctatccatag

SEQ ID NO: 156490 - DNA, 2634 bp, Artificial Sequence
  derived and/or modified sequence
atgtgtgacctgcgccgacccgctgccggtgggatgatggatcttgcatatgtctgcgaatgggagaaatggtctaagtccactcattgtccctcagtgccactagcctgcgcgtggtcctgtcgaaatcttattgcattcaccatggaccttcggagtgacgaccaggatctgactcgcatgatacacatcctggacactgagcatccatgggatctgcatagcattccctcggagcaccacgaagcgattacctgtcttgaatgggaccagtcaggcagccgcctgctctctgcagatgctgatggccagatcaagtgttggtctatggcagatcatctcgctaatagctgggaatcaagcgtaggctccctggtcgagggggaccccatcgtcgcgttgtcatggctccacaacggagttaaactggctttgcatgtggagaagagcggcgcatcttcattcggcgagaagttctcccgagtgaaattctctccttccctgaccctgtttggagggaagccaatggaaggctggattgccgtgacagtatcaggcttggtcaccgtcagtcttctcaagcccagtgggcaggtcttaaccagtacagagtcactgtgtagattgcggggaagggtcgcccttgctgacattgcgtttacaggcggtggcaatattgtagtcgctacggctgatgggagctctgcaagtccagtgcagttttataaagtgtgcgtttcggtggtgtcagaaaaatgccggatcgacacagaaatcctgccttccttgttcatgaggtgcacgactgacctgaatcggaaagacaaattccccgcaatcacccacctaaagttcctggctagggatatgagtgaacaggtcctgctgtgcgctagcagccaaacatcttccattgttgagtgctggtcactcagaaaggaagggctacctgtgaacaacatttttcaacaaatatcaccagtcgtgggcgataaacagccaactattcttaaatggcggatcctgtccgccaccaacgacctcgatagagtgagtgccgtagccctcccaaagctccctatctccttgaccaacactgacctgaaggttgcttccgacacccagttttaccctgggctgggtctggccttagcgttccacgacggctctgtacacatcgtccaccggcttagtctgcagaccatggccgtgttttacagcagtgcggctcctcgccctgtggacgagcccgcaatgaaacggccacgaaccgccggtccggctgtgcacttgaaggccatgcagttaagctggacctctttagctttggtaggtattgattcacacggcaagttgagcgtgctgcggctgtccccttcaatgggccatcccctggaggtgggcctcgctctgaggcaccttctgttcctgctcgaatactgcatggtgacaggttacgattggtgggatatcctgctgcatgttcagccatcaatggtgcagtctttggtggaaaaactacatgaggaatatacccgccaaaccgctgcactccaacaggtcctaagtacaagaatcctggcaatgaaagctagcctttgtaaattgagcccgtgcactgtcaccagagtgtgcgactaccatacaaaactctttctgattgcaattagctcaacactcaagagtctgctgcggcctcatttcctcaataccccagataagagcccgggagacaggctgacagagatttgcacaaaaatcaccgacgtggacatagataaagtgatgattaacctcaagacagaagagttcgtgctggatatgaatactctccaggcacttcaacagttgctacaatgggttggagacttcgtattatacctcctggctagcctcccaaatcaaggatccttgctgaggcccggacactcgttcctgcgggacggtacctccttagggatgttgcgtgagctaatggtcgtgatccggatctggggcctgctcaagccgtcatgtttgccagtctataccgctacatcggacacccaggacagcatgtctttgctcttccgccttctgacaaaattgtggatatgttgtagagacgagggcccagcttccgagccggacgaagcactggtagacgaatgctgcctgttgccatcccagctgctaattccctccctcgactggctcccagcatctgacggccttgtgtcccgtctgcagcccaaacaacctctcaggctgcagttcggccgagccccaacccttccagggtccgccgcaactcttcagttggacgggctggctagggctcccggtcaacctaaaatcgaccatttgcgacgcctgcacctgggcgcttgcccaacagaggaatgcaaagcttgtacaaggtgcgggtgcgtgactatgttgaagtccccaaaccggactaccgcagtgaagcagtgggaacagagatggatcaagaattgtctggcagttgagggcagaggtcctgatgcttgtgtgaccagtcgcgcatcagaagaagcccctgcctttgtgcagctcggcccacagagcacacaccacagtccacgcaccccgagatccctggatcatctccacccagaagatagaccatag

SEQ ID NO: 156491 - DNA, 2526 bp, Artificial Sequence
  derived and/or modified sequence
atgtgcgatctgcgaagaccagcagctgggggaatgatggatttagcttacgtgtgcgaatgggagaagtggagcaagtcaactcactgcccctccgtgccactggcttgtgcatggagctgccggaatctaattgccttcaccatggacctgcggtcggacgatcaagatctcactcggatgatccacattctggacacagagcacccctgggacctccacagcatcccatcagagcaccacgaggccattacctgtctggaatgggaccaatccggctcgcgactgttatctgccgatgccgatggtcagatcaaatgttggagcatggcagatcacttggcgaacagctgggaatcatctgtcggatctcttgttgaaggcgatccaattgtcgccctatcttggctgcataacggtgtaaagctcgcgttacacgttgaaaagtccggggctagcagtttcggcgaaaaattctccagagttaagttctcccctagccttaccttatttggcggtaaacctatggagggttggattgcagtgacggtgtccgggctagtaacggtgtctcttctaaaaccctcgggacaggtcctcactagcaccgaaagtctctgcaggctacgagggagagtcgctttggccgatatagctttcacaggtggagggaatattgtcgtggcaactgcagacggttcttcggcctctcccgtgcagttttacaaggtgtgcgtgagcgtcgtctcagagaaatgcaggatcgacactgagatcttgccttccctgtttatgagatgtacaacagatctgaacagaaaggataagtttcctgccatcacgcatttaaagttcctagctcgcgatatgtctgaacaggtgctgctttgcgcatccagtcaaacatccagcatcgtggagtgttggagccttaggaaagaggggttgcctgtgaacaacattttccaacagatcagtcccgttgtcggagataaacagcccactatcctcaaatggcggatactgtccgcaactaacgacttggaccgagtgagcgctgtcgcactccccaagctgccaattagtttgaccaacacagatttgaaagttgccagtgacactcagttctacccaggtttgggcttggcattggcgttccatgatggcagtgtgcacatcgtgcataggctgtccttgcagacaatggctgtgttctattcctcagctgcacccaggccagtcgatgaacccgctatgaaacgccctcgcacagccggaccagccgtccaccttaaagccatgcaactaagttggactagtctggctctggttgggatcgactcgcatggaaagctgtcagtcctcaggctctcaccatccatgggtcatccccttgaggttggcctagccctgaggcacctcttgtttttacttgaatactgcatggtgaccggttatgattggtgggacattctgctgcatgtacagccttcaatggttcagtctctcgtggagaagctgcacgaggaatatacgcgccagacagcagcactacagcaggtcctgagtactagaattctagcaatgaaggcctctttgtgtaaactgagcccatgcactgttacaagggtgtgcgactatcacacaaaattattcctcatagctatctcttctactcttaagtccctcctgagaccccacttcctgaacacccccgataagtccccaggcgacagacttaccgagatctgcactaaaatcactgatgttgacatcgataaggtgatgataaacttaaaaacagaagaattcgtgctcgacatgaacacactgcaggcccttcagcagctccttcaatgggtgggcgactttgtcctgtacctgctggccagcctgcccaaccagggaagtctgctgcggcctgggcactcttttctgagggacggcacctctttagggatgcttagggaactgatggtcgttattaggatatgggggctgctcaaaccctcctgcctccccgtttacaccgctacttccgacacccaggacagtatgagcctacttttccgcctgctgaccaaactgtggatttgctgtcgggacgaaggcccagctagtgagcccgatgaagcgctggtggatgagtgttgcttactgccctcccagctccttatcccgagcttagattggctgcccgctagcgacggcctggtgtctcggttgcagccaaagcaacctctgcgcttgcagttcggcagagcacctaccctgcccggatcagcggctactctacagctggacggcctggctagagctcccggacagccaaagatcgatcacctccgacggttgcatttaggcgcttgccctacagaagagtgtaaggcctgcacaaggtgcggatgcgtcacaatgctgaagtctccgaaccggactacagcagttaaacagtgggaacagcggtggattaagaactgcttgtgcggcggactctggtggcgcgtgcctctgtcatacccgtag

SEQ ID NO: 156492 - DNA, 1992 bp, Artificial Sequence
  derived and/or modified sequence
atgtgtgacctccggaggcctgctgctggaggcatgatggaccttgcctacgtgtgcgagtgggagaagtggtccaaatccactcattgccccagcgttcccctggcttgtgcctggagttgccggaacctgattgcatttaccatggacctgcgcagcgacgaccaggatctcaccagaatgattcatatacttgacaccgagcatccatgggatctgcactcgatccccagcgaacatcacgaggccattacatgcctggagtgggatcagagcggaagtcgactcttgtccgcagatgcagatgggcagatcaagtgctggtccatggcggatcatctcgccaatagttgggaatctagtgtggggtccctcgtggagggcgatcccatcgtggctctaagctggctccataacggcgtgaaactggctctgcacgttgaaaagagcggagcgagttcctttggcgaaaaattcagtcgagtgaaattctctccaagcttgacattgtttgggggaaaaccgatggaggggtggatcgccgtgaccgtctcggggctggtcacagtaagtttactgaagcccagcggccaggtactcacttcaaccgagagcctgtgtaggctgaggggacgggtcgctctggctgacatagctttcactgggggaggcaacatcgtggttgcaactgcagatggatccagcgccagccccgtgcaattctacaaggtctgcgtgagcgtcgtgtctgagaagtgcagaattgataccgagattttgccatccttgtttatgcggtgcactactgatcttaaccggaaagacaagttcccggcaatcacacacctgaagttccttgctcgggatatgagcgagcaggtcttgctctgcgcctcatcccagacctcctcaattgtagaatgctggtctctgagaaaggagggtctccccgtcaataatatttttcaacagatttcccccgtggttggagacaaacagccaaccatcctgaaatggcgcattctatctgctacaaatgatctcgatagagtgtcagctgtggccctacctaagctccccatttccctgacaaacacagatctgaaggtggccagtgacacccagttctacccgggtttgggccttgcgctggcatttcacgacgggtcagtgcacattgtacaccggttgagccttcagaccatggctgtgttttattcgagtgcagcacccaggcccgtggacgaacccgctatgaagaggccaaggacggccggtcccgcagtgcacttaaaagccatgcagttaagctggacttcgctcgccctcgtggggatagattcgcacggaaaactcagcgttttgaggctaagcccgagcatgggccatccactggaagttggactggcactacgacatttactgttcctgctggagtactgcatggtgactgggtatgactggtgggatatcttgctccatgtacagccctctatggttcagtctctggtggagaagctgcacgaagagtatactagacagaccgccgcattacaacaggttctgtcaacaaggatcctcgccatgaaggctagtctgtgcaaactgtccccctgcacagtgacacgtgtctgtgattaccacactaaactgttcctgatcgccatctccagcacgttgaagtctctgctgcgtcctcacttcctcaatacccccgataagtcgcccggtgaccggttaacagagatttgcaccaaaattaccgatgtggacattgataaggttatgattaatctcaagaccgaggaatttgttttggatatgaatacactacaggcattacagcagcttctgcaatgggtgggagatttcgtgctctatctgttggcctcactgcccaaccagccctgccccacatccgaaccttgtcccacatctgaaccctgtcctaccagcgaacccagcccaacctccgagccttctccaacatag

SEQ ID NO: 156493 - DNA, 1614 bp, Artificial Sequence
  derived and/or modified sequence
atgtgtgatttacggagacccgcagcaggcggaatgatggatctggcctacgtttgtgagtgggagaagtggagtaagtcaacacactgcccatcagttcccctcgcttgcgcctggtcctgtcgaaatctgattgcctttaccatggatcttaggagcgatgatcaggacttaacgagaatgatacacatccttgatacagagcatccttgggatctgcactccattccatcggagcatcacgaggcaataacctgcctcgaatgggaccagagcggctcccggctgctgtctgcggatgcagatggccagatcaaatgttggtctatggctgaccatcttgcgaactcttgggagtccagcgttggatccttggttgaaggggatcctattgtcgccctttcctggctccataacggcgtcaagctggcgctgcatgtggagaaaagcggcgcttcatccttcggtgaaaaattctctagggtcaagttcagtcccagccttaccctgtttggaggaaaacccatggagggctggatagctgtaactgtgtcgggcttagtaacagtgagcctcctcaaaccaagcggacaggtgctgacctccactgagagcctttgccgactgcgagggcgagtggcgctcgccgatatcgccttcaccggaggtggcaacattgtcgttgcgactgctgacggaagctccgcgtctcccgtgcaattttacaaagtgtgcgtgagcgttgtatcggaaaagtgccggattgacaccgagatactcccttctcttttcatgcggtgcacaactgacctgaataggaaagacaagttccccgcaatcactcacttaaaatttctcgccagagacatgtcagaacaggttttgctctgtgcttctagtcagacaagttccatcgtcgagtgctggagcttacgcaaggaaggcctaccggtcaataatatattccaacaaattagtccggttgtgggggacaagcaacccaccatcctaaagtggagaattctgagtgctacgaacgatctcgatagagttagtgctgtggcgctgcccaaactcccaatctcactcaccaacacggatttgaaagtggcgtcagatacccagttttaccccggattaggtttagctctggcattccacgacggctcggtgcacatcgtccacaggttgagtctccagactatggctgtgttctattcaagtgcggctcctcggcctgtagatgaacctgctatgaagcggcctcggaccgccggacccgcagtgcatctcaaggccatgcagctctcctggacctcacttgcgctggtgggaatcgattcacatgggaaagtactgagtactagaatcctcgccatgaaggcatccctctgtaaactgtccccatgcactgtgaccagggtgtgcgactatcacaccaaattgtttctcattgcaattagtagcacactcaaatctctgctgaggcctcacttcctgaacacaccagataaatctcctggggataggctgactgagatctgcaccaagatcaccgacgtggatatcgacaaagtgatgattaatcttaagactgaagagttcgtcttatag

SEQ ID NO: 156494 - DNA, 1389 bp, Artificial Sequence
  derived and/or modified sequence
atgtgcgatctcaggaggccagccgcaggaggcatgatggatcttgcttacgtgtgcgaatgggagaagtggtcaaagtcaacccactgcccctcagtccctttggcttgtgcctggtcatgccggaacctcatcgcttttactatggatctacggagcgacgatcaagacctcacaagaatgatccatattttggatacggaacatccctgggatttgcacagtataccctcagagcaccatgaggcgataacctgcttggagtgggaccagtctggctcccgattgctcagcgccgacgctgatgggcagattaagtgctggtcaatggctgaccacttagctaacagttgggaatccagcgttgggtctctggtcgagggggaccccatagtcgcactgtcttggcttcataacggagtaaagcttgccctgcatgtagaaaaagttctgctctgtgccagtagccagacgtcttccattgtggagtgctggtccctccgaaaagaggggcttcccgtgaataacattttccagcagatcagcccagtggtcggagataaacagcctacgattctaaagtggcgaatcctctctgccactaatgacctggaccgagtgtctgccgtggctcttcctaagcttccaatcagccttaccaacactgatctcaaagtcgcatccgacactcaattttaccccggactggggctggctctcgcgtttcatgatggatcagtccatatagtgcaccggctctcgcttcagactatggcggtgttctattcaagtgccgcacccagacctgtggatgagcccgctatgaagcggcctaggacagccggacctgcagtgcacctcaaggcaatgcaactgtcatggacctctctggccctggtcggcatcgactcccatggaaaattaagcgtattgcggctctcgccctcgatgggccatccactggaagtcggactggccttgagacatctgttgtttcttctggaatattgcatggtgaccggctacgactggtgggatattttgctgcacgtgcaacctagcatggtgcagtcactagtggaaaaactgcacgaagagtacactaggcagaccgcagcgcttcagcaggttttgtccactcggatcctcgctatgaaggctagcctgtgcaaattatccccatgtacagtgactcgggtctgcgattatcacacgaagttgtttctgatcgccatttcttcaactctgaagtcccttctcaggccgcactttcttaatacaccagacaagagtcccggagatcggctgaccgagatctgtaccaagataacggatgtggacatcgataaggttatgatcaacctcaagactgaggaatttgtgctttag

SEQ ID NO: 156495 - DNA, 1098 bp, Artificial Sequence
  derived and/or modified sequence
atgtgtgacctgcgtagaccggctgcgggaggtatgatggatctcgcgtatgtatgtgagtgggagaagtggtcaaagagcacccactgcccaagcgttcccctcgcctgtgcttggagctgcagaaatctcatcgcattcaccatggacctgcggtccgacgatcaggacctgacacgtatgatccatatacttgacacagagcacccatgggacctccacagcatacccagtgaacatcacgaggccatcacttgtctggagtgggatcaaagtgggagcagacttctctccgctgacgcagacggccagatcaagtgctggtctatggcagaccacctggctaatagttgggaaagttctgttggttccttggtagaaggtgacccaatagtggcgctctcctggttgcataacggtctcgccttagcattccatgatggcagcgtccatattgtccacaggctctccctgcagacgatggctgtattctacagctcagccgcacctcgacctgttgatgagccggcaatgaaaaggccgaggacagcagggccagccgtgcacttgaaagcaatgcagctgagttggacttctctcgccctggtcggcatcgattctcatggaaagctctcagtgctacgtctgtccccaagcatgggacatccattagaggtgggcctggctttgcgccatttgctgttcctactggagtattgtatggtgactggctacgactggtgggatattctgttacacgtgcagccgtccatggtccagtccctggtcgaaaaattgcacgaggagtatacacgccagaccgccgctctccaacaggtgctctcgacgaggatcctggcaatgaaggcttccttatgtaaacttagcccgtgcaccgtgacacgcgtgtgtgattaccataccaagttattcctcattgctatctcctcgaccctgaagagcttgttacgtcctcactttctcaacacccctgacaagtcccccggtgaccggctcaccgagatctgtactaagattactgacgtagacatcgataaagtcatgatcaacctgaaaacggaggagttcgtgctttag

SEQ ID NO: 156496 - DNA, 1104 bp, Artificial Sequence
  derived and/or modified sequence
atgtgtgacctgcgacgccctgccgctggcggtatgatggacctggcttatgtgtgtgaatgggaaaaatggagcaagagcacccactgtccttccgtgcctctcgcttgcgcctggtcatgcagaaatctgatcgcctttacaatggatctccgtagcgacgaccaagacctcacacgaatgatccatatcttggacacagagcatccatgggacttgcatagtatcccatctgaacaccacgaggctattacctgcttagagtgggatcagagcggctctcgacttctttcggcagacgctgatggccagatcaagtgttggtcaatggctgatcacctggctaactcatgggagagctctgtgggctccctggttgagggcgacccaattgtggctctatcctggctacacaacggggtgcgcttagccctcgcttttcacgacggaagcgttcacatcgtccaccggttgtctcttcagaccatggcagtgttttactccagtgctgctcctaggccagtggacgagcctgcaatgaaaaggcctaggaccgccggacccgctgttcatctaaaggccatgcagctctcttggacttccctggctctagttggaatagactcccacggaaagctgtctgtgttgcgactgagcccgtccatgggccaccctttagaggtaggtttagccctcagacacctgctgttcctcttggagtattgtatggttaccggttacgactggtgggacattcttctgcacgtgcagccttctatggttcaatccttggttgaaaaacttcatgaagagtacacccgacagaccgctgctctgcagcaagtactttctaccagaattctggctatgaaggcatctctgtgcaagctcagtccttgtacagtgacaagggtttgtgattaccacacaaagctgttcctcatcgcgatttcatcgactcttaagagtctcctgaggccccattttctgaatacccctgacaaatctcccggagataggctgaccgagatctgtaccaagattaccgacgtggatatagacaaagttatgattaacctgaagactgaagaattcgttctctag

SEQ ID NO: 156497 - DNA, 2256 bp, Artificial Sequence
  derived and/or modified sequence
atgtgcgacctgagaagacccgccgccggcggcatgatggacctggcctacgtgtgcgagtgggagaagtggagcaagagcacccactgccccagcgtgcccctggcctgcgcctggagctgcagaaacctgatcgccttcaccatggacctgagaagcgacgaccaggacctgaccagaatgatccacatcctggacaccgagcacccctgggacctgcacagcatccccagcgagcaccacgaggccatcacctgcctggagtgggaccagagcggcagcagactgctgagcgccgacgccgacggccagatcaagtgctggagcatggccgaccacctggccaacagctgggagagcagcgtgggcagcctggtggagggcgaccccatcgtggccctgagctggctgcacaacggcgtgaagctggccctgcacgtggagaagagcggcgccagcagcttcggcgagaagttcagcagagtgaagttcagccccagcctgaccctgttcggcggcaagcccatggagggctggatcgccgtgaccgtgagcggcctggtgaccgtgagcctgctgaagcccagcggccaggtgctgaccagcaccgagagcctgtgcagactgagaggcagagtggccctggccgacatcgccttcaccggcggcggcaacatcgtggtggccaccgccgacggcagcagcgccagccccgtgcagttctacaaggtgtgcgtgagcgtggtgagcgagaagtgcagaatcgacaccgagatcctgcccagcctgttcatgagatgcaccaccgacctgaacagaaaggacaagttccccgccatcacccacctgaagttcctggccagagacatgagcgagcaggtgctgctgtgcgccagcagccagaccagcagcatcgtggagtgctggagcctgagaaaggagggcctgcccgtgaacaacatcttccagcagatcagccccgtggtgggcgacaagcagcccaccatcctgaagtggagaatcctgagcgccaccaacgacctggacagagtgagcgccgtggccctgcccaagctgcccatcagcctgaccaacaccgacctgaaggtggccagcgacacccagttctaccccggcctgggcctggccctggccttccacgacggcagcgtgcacatcgtgcacagactgagcctgcagaccatggccgtgttctacagcagcgccgcccccagacccgtggacgagcccgccatgaagagacccagaaccgccggccccgccgtgcacctgaaggccatgcagctgagctggaccagcctggccctggtgggcatcgacagccacggcaagctgagcgtgctgagactgagccccagcatgggccaccccctggaggtgggcctggccctgagacacctgctgttcctgctggagtactgcatggtgaccggctacgactggtgggacatcctgctgcacgtgcagcccagcatggtgcagagcctggtggagaagctgcacgaggagtacaccagacagaccgccgccctgcagcaggtgctgagcaccagaatcctggccatgaaggccagcctgtgcaagctgagcccctgcaccgtgaccagagtgtgcgactaccacaccaagctgttcctgatcgccatcagcagcaccctgaagagcctgctgagaccccacttcctgaacacccccgacaagagccccggcgacagactgaccgagatctgcaccaagatcaccgacgtggacatcgacaaggtgatgatcaacctgaagaccgaggagttcgtgctggacatgaacaccctgcaggccctgcagcagctgctgcagtgggtgggcgacttcgtgctgtacctgctggccagcctgcccaaccaggtggccatgagagcccagagagccagcagaaccagaagatggtggatgaacgccgcctgctgccccgccagctgcctgagccccgcctggaccggctgccagcccgccaccgcctggctggccgcctgcagccccagcagccccttcgtgtgcagcctggccggcagacccagatgcctggccgtgctgcccccctgcagcagcaccgccagccccggcccccaggccagccccagaagcaccacctgcggcggctgcaccctggccctggcccccagaagaaacgccagacccgcccccggcgccgccgtgagcccctgcagcagcagacccaccgagcccagaagatag

SEQ ID NO: 156498 - DNA, 2583 bp, Artificial Sequence
  derived and/or modified sequence
atgtgcgacctgagaagacccgccgccggcggcatgatggacctggcctacgtgtgcgagtgggagaagtggagcaagagcacccactgccccagcgtgcccctggcctgcgcctggagctgcagaaacctgatcgccttcaccatggacctgagaagcgacgaccaggacctgaccagaatgatccacatcctggacaccgagcacccctgggacctgcacagcatccccagcgagcaccacgaggccatcacctgcctggagtgggaccagagcggcagcagactgctgagcgccgacgccgacggccagatcaagtgctggagcatggccgaccacctggccaacagctgggagagcagcgtgggcagcctggtggagggcgaccccatcgtggccctgagctggctgcacaacggcgtgaagctggccctgcacgtggagaagagcggcgccagcagcttcggcgagaagttcagcagagtgaagttcagccccagcctgaccctgttcggcggcaagcccatggagggctggatcgccgtgaccgtgagcggcctggtgaccgtgagcctgctgaagcccagcggccaggtgctgaccagcaccgagagcctgtgcagactgagaggcagagtggccctggccgacatcgccttcaccggcggcggcaacatcgtggtggccaccgccgacggcagcagcgccagccccgtgcagttctacaaggtgtgcgtgagcgtggtgagcgagaagtgcagaatcgacaccgagatcctgcccagcctgttcatgagatgcaccaccgacctgaacagaaaggacaagttccccgccatcacccacctgaagttcctggccagagacatgagcgagcaggtgctgctgtgcgccagcagccagaccagcagcatcgtggagtgctggagcctgagaaaggagggcctgcccgtgaacaacatcttccagcagatcagccccgtggtgggcgacaagcagcccaccatcctgaagtggagaatcctgagcgccaccaacgacctggacagagtgagcgccgtggccctgcccaagctgcccatcagcctgaccaacaccgacctgaaggtggccagcgacacccagttctaccccggcctgggcctggccctggccttccacgacggcagcgtgcacatcgtgcacagactgagcctgcagaccatggccgtgttctacagcagcgccgcccccagacccgtggacgagcccgccatgaagagacccagaaccgccggccccgccgtgcacctgaaggccatgcagctgagctggaccagcctggccctggtgggcatcgacagccacggcaagctgagcgtgctgagactgagccccagcatgggccaccccctggaggtgggcctggccctgagacacctgctgttcctgctggagtactgcatggtgaccggctacgactggtgggacatcctgctgcacgtgcagcccagcatggtgcagagcctggtggagaagctgcacgaggagtacaccagacagaccgccgccctgcagcaggtgctgagcaccagaatcctggccatgaaggccagcctgtgcaagctgagcccctgcaccgtgaccagagtgtgcgactaccacaccaagctgttcctgatcgccatcagcagcaccctgaagagcctgctgagaccccacttcctgaacacccccgacaagagccccggcgacagactgaccgagatctgcaccaagatcaccgacgtggacatcgacaaggtgatgatcaacctgaagaccgaggagttcgtgctggacatgaacaccctgcaggccctgcagcagctgctgcagtgggtgggcgacttcgtgctgtacctgctggccagcctgcccaaccagggcagcctgctgagacccggccacagcttcctgagagacggcaccagcctgggcatgctgagagagctgatggtggtgatcagaatctggggcctgctgaagcccagctgcctgcccgtgtacaccgccaccagcgacacccaggacagcatgagcctgctgttcagactgctgaccaagctgtggatctgcttccccagcaccggcccctgcagcgtgtgggtgctgctgggctggcagcccctgcccggcagagacgagggccccgccagcgagcccgacgaggccctggtggacgagtgctgcctgctgcccagccagctgctgatccccagcctggactggctgcccgccagcgacggcctggtgagcagactgcagcccaagcagcccctgagactgcagttcggcagagcccccaccctgcccggcagcgccgccaccctgcagctggacggcctggccagagcccccggccagcccaagatcgaccacctgagaagactgcacctgggcgcctgccccaccgaggagtgcaaggcctgcaccagatgcggctgcgtgaccatgctgaagagccccaacagaaccaccgccgtgaagcagtgggagcagagatggatcaagaactgcctgtgcggcggcctgtggtggagagtgcccctgagctacccctag

SEQ ID NO: 156499 - DNA, 2634 bp, Artificial Sequence
  derived and/or modified sequence
atgtgcgacctgagaagacccgccgccggcggcatgatggacctggcctacgtgtgcgagtgggagaagtggagcaagagcacccactgccccagcgtgcccctggcctgcgcctggagctgcagaaacctgatcgccttcaccatggacctgagaagcgacgaccaggacctgaccagaatgatccacatcctggacaccgagcacccctgggacctgcacagcatccccagcgagcaccacgaggccatcacctgcctggagtgggaccagagcggcagcagactgctgagcgccgacgccgacggccagatcaagtgctggagcatggccgaccacctggccaacagctgggagagcagcgtgggcagcctggtggagggcgaccccatcgtggccctgagctggctgcacaacggcgtgaagctggccctgcacgtggagaagagcggcgccagcagcttcggcgagaagttcagcagagtgaagttcagccccagcctgaccctgttcggcggcaagcccatggagggctggatcgccgtgaccgtgagcggcctggtgaccgtgagcctgctgaagcccagcggccaggtgctgaccagcaccgagagcctgtgcagactgagaggcagagtggccctggccgacatcgccttcaccggcggcggcaacatcgtggtggccaccgccgacggcagcagcgccagccccgtgcagttctacaaggtgtgcgtgagcgtggtgagcgagaagtgcagaatcgacaccgagatcctgcccagcctgttcatgagatgcaccaccgacctgaacagaaaggacaagttccccgccatcacccacctgaagttcctggccagagacatgagcgagcaggtgctgctgtgcgccagcagccagaccagcagcatcgtggagtgctggagcctgagaaaggagggcctgcccgtgaacaacatcttccagcagatcagccccgtggtgggcgacaagcagcccaccatcctgaagtggagaatcctgagcgccaccaacgacctggacagagtgagcgccgtggccctgcccaagctgcccatcagcctgaccaacaccgacctgaaggtggccagcgacacccagttctaccccggcctgggcctggccctggccttccacgacggcagcgtgcacatcgtgcacagactgagcctgcagaccatggccgtgttctacagcagcgccgcccccagacccgtggacgagcccgccatgaagagacccagaaccgccggccccgccgtgcacctgaaggccatgcagctgagctggaccagcctggccctggtgggcatcgacagccacggcaagctgagcgtgctgagactgagccccagcatgggccaccccctggaggtgggcctggccctgagacacctgctgttcctgctggagtactgcatggtgaccggctacgactggtgggacatcctgctgcacgtgcagcccagcatggtgcagagcctggtggagaagctgcacgaggagtacaccagacagaccgccgccctgcagcaggtgctgagcaccagaatcctggccatgaaggccagcctgtgcaagctgagcccctgcaccgtgaccagagtgtgcgactaccacaccaagctgttcctgatcgccatcagcagcaccctgaagagcctgctgagaccccacttcctgaacacccccgacaagagccccggcgacagactgaccgagatctgcaccaagatcaccgacgtggacatcgacaaggtgatgatcaacctgaagaccgaggagttcgtgctggacatgaacaccctgcaggccctgcagcagctgctgcagtgggtgggcgacttcgtgctgtacctgctggccagcctgcccaaccagggcagcctgctgagacccggccacagcttcctgagagacggcaccagcctgggcatgctgagagagctgatggtggtgatcagaatctggggcctgctgaagcccagctgcctgcccgtgtacaccgccaccagcgacacccaggacagcatgagcctgctgttcagactgctgaccaagctgtggatctgctgcagagacgagggccccgccagcgagcccgacgaggccctggtggacgagtgctgcctgctgcccagccagctgctgatccccagcctggactggctgcccgccagcgacggcctggtgagcagactgcagcccaagcagcccctgagactgcagttcggcagagcccccaccctgcccggcagcgccgccaccctgcagctggacggcctggccagagcccccggccagcccaagatcgaccacctgagaagactgcacctgggcgcctgccccaccgaggagtgcaaggcctgcaccagatgcggctgcgtgaccatgctgaagagccccaacagaaccaccgccgtgaagcagtgggagcagagatggatcaagaactgcctggccgtggagggcagaggccccgacgcctgcgtgaccagcagagccagcgaggaggcccccgccttcgtgcagctgggcccccagagcacccaccacagccccagaacccccagaagcctggaccacctgcaccccgaggacagaccctag

SEQ ID NO: 156500 - DNA, 2526 bp, Artificial Sequence
  derived and/or modified sequence
atgtgcgacctgagaagacccgccgccggcggcatgatggacctggcctacgtgtgcgagtgggagaagtggagcaagagcacccactgccccagcgtgcccctggcctgcgcctggagctgcagaaacctgatcgccttcaccatggacctgagaagcgacgaccaggacctgaccagaatgatccacatcctggacaccgagcacccctgggacctgcacagcatccccagcgagcaccacgaggccatcacctgcctggagtgggaccagagcggcagcagactgctgagcgccgacgccgacggccagatcaagtgctggagcatggccgaccacctggccaacagctgggagagcagcgtgggcagcctggtggagggcgaccccatcgtggccctgagctggctgcacaacggcgtgaagctggccctgcacgtggagaagagcggcgccagcagcttcggcgagaagttcagcagagtgaagttcagccccagcctgaccctgttcggcggcaagcccatggagggctggatcgccgtgaccgtgagcggcctggtgaccgtgagcctgctgaagcccagcggccaggtgctgaccagcaccgagagcctgtgcagactgagaggcagagtggccctggccgacatcgccttcaccggcggcggcaacatcgtggtggccaccgccgacggcagcagcgccagccccgtgcagttctacaaggtgtgcgtgagcgtggtgagcgagaagtgcagaatcgacaccgagatcctgcccagcctgttcatgagatgcaccaccgacctgaacagaaaggacaagttccccgccatcacccacctgaagttcctggccagagacatgagcgagcaggtgctgctgtgcgccagcagccagaccagcagcatcgtggagtgctggagcctgagaaaggagggcctgcccgtgaacaacatcttccagcagatcagccccgtggtgggcgacaagcagcccaccatcctgaagtggagaatcctgagcgccaccaacgacctggacagagtgagcgccgtggccctgcccaagctgcccatcagcctgaccaacaccgacctgaaggtggccagcgacacccagttctaccccggcctgggcctggccctggccttccacgacggcagcgtgcacatcgtgcacagactgagcctgcagaccatggccgtgttctacagcagcgccgcccccagacccgtggacgagcccgccatgaagagacccagaaccgccggccccgccgtgcacctgaaggccatgcagctgagctggaccagcctggccctggtgggcatcgacagccacggcaagctgagcgtgctgagactgagccccagcatgggccaccccctggaggtgggcctggccctgagacacctgctgttcctgctggagtactgcatggtgaccggctacgactggtgggacatcctgctgcacgtgcagcccagcatggtgcagagcctggtggagaagctgcacgaggagtacaccagacagaccgccgccctgcagcaggtgctgagcaccagaatcctggccatgaaggccagcctgtgcaagctgagcccctgcaccgtgaccagagtgtgcgactaccacaccaagctgttcctgatcgccatcagcagcaccctgaagagcctgctgagaccccacttcctgaacacccccgacaagagccccggcgacagactgaccgagatctgcaccaagatcaccgacgtggacatcgacaaggtgatgatcaacctgaagaccgaggagttcgtgctggacatgaacaccctgcaggccctgcagcagctgctgcagtgggtgggcgacttcgtgctgtacctgctggccagcctgcccaaccagggcagcctgctgagacccggccacagcttcctgagagacggcaccagcctgggcatgctgagagagctgatggtggtgatcagaatctggggcctgctgaagcccagctgcctgcccgtgtacaccgccaccagcgacacccaggacagcatgagcctgctgttcagactgctgaccaagctgtggatctgctgcagagacgagggccccgccagcgagcccgacgaggccctggtggacgagtgctgcctgctgcccagccagctgctgatccccagcctggactggctgcccgccagcgacggcctggtgagcagactgcagcccaagcagcccctgagactgcagttcggcagagcccccaccctgcccggcagcgccgccaccctgcagctggacggcctggccagagcccccggccagcccaagatcgaccacctgagaagactgcacctgggcgcctgccccaccgaggagtgcaaggcctgcaccagatgcggctgcgtgaccatgctgaagagccccaacagaaccaccgccgtgaagcagtgggagcagagatggatcaagaactgcctgtgcggcggcctgtggtggagagtgcccctgagctacccctag

SEQ ID NO: 156501 - DNA, 1992 bp, Artificial Sequence
  derived and/or modified sequence
atgtgcgacctgagaagacccgccgccggcggcatgatggacctggcctacgtgtgcgagtgggagaagtggagcaagagcacccactgccccagcgtgcccctggcctgcgcctggagctgcagaaacctgatcgccttcaccatggacctgagaagcgacgaccaggacctgaccagaatgatccacatcctggacaccgagcacccctgggacctgcacagcatccccagcgagcaccacgaggccatcacctgcctggagtgggaccagagcggcagcagactgctgagcgccgacgccgacggccagatcaagtgctggagcatggccgaccacctggccaacagctgggagagcagcgtgggcagcctggtggagggcgaccccatcgtggccctgagctggctgcacaacggcgtgaagctggccctgcacgtggagaagagcggcgccagcagcttcggcgagaagttcagcagagtgaagttcagccccagcctgaccctgttcggcggcaagcccatggagggctggatcgccgtgaccgtgagcggcctggtgaccgtgagcctgctgaagcccagcggccaggtgctgaccagcaccgagagcctgtgcagactgagaggcagagtggccctggccgacatcgccttcaccggcggcggcaacatcgtggtggccaccgccgacggcagcagcgccagccccgtgcagttctacaaggtgtgcgtgagcgtggtgagcgagaagtgcagaatcgacaccgagatcctgcccagcctgttcatgagatgcaccaccgacctgaacagaaaggacaagttccccgccatcacccacctgaagttcctggccagagacatgagcgagcaggtgctgctgtgcgccagcagccagaccagcagcatcgtggagtgctggagcctgagaaaggagggcctgcccgtgaacaacatcttccagcagatcagccccgtggtgggcgacaagcagcccaccatcctgaagtggagaatcctgagcgccaccaacgacctggacagagtgagcgccgtggccctgcccaagctgcccatcagcctgaccaacaccgacctgaaggtggccagcgacacccagttctaccccggcctgggcctggccctggccttccacgacggcagcgtgcacatcgtgcacagactgagcctgcagaccatggccgtgttctacagcagcgccgcccccagacccgtggacgagcccgccatgaagagacccagaaccgccggccccgccgtgcacctgaaggccatgcagctgagctggaccagcctggccctggtgggcatcgacagccacggcaagctgagcgtgctgagactgagccccagcatgggccaccccctggaggtgggcctggccctgagacacctgctgttcctgctggagtactgcatggtgaccggctacgactggtgggacatcctgctgcacgtgcagcccagcatggtgcagagcctggtggagaagctgcacgaggagtacaccagacagaccgccgccctgcagcaggtgctgagcaccagaatcctggccatgaaggccagcctgtgcaagctgagcccctgcaccgtgaccagagtgtgcgactaccacaccaagctgttcctgatcgccatcagcagcaccctgaagagcctgctgagaccccacttcctgaacacccccgacaagagccccggcgacagactgaccgagatctgcaccaagatcaccgacgtggacatcgacaaggtgatgatcaacctgaagaccgaggagttcgtgctggacatgaacaccctgcaggccctgcagcagctgctgcagtgggtgggcgacttcgtgctgtacctgctggccagcctgcccaaccagccctgccccaccagcgagccctgccccaccagcgagccctgccccaccagcgagcccagccccaccagcgagcccagccccacctag

SEQ ID NO: 156502 - DNA, 1614 bp, Artificial Sequence
  derived and/or modified sequence
atgtgcgacctgagaagacccgccgccggcggcatgatggacctggcctacgtgtgcgagtgggagaagtggagcaagagcacccactgccccagcgtgcccctggcctgcgcctggagctgcagaaacctgatcgccttcaccatggacctgagaagcgacgaccaggacctgaccagaatgatccacatcctggacaccgagcacccctgggacctgcacagcatccccagcgagcaccacgaggccatcacctgcctggagtgggaccagagcggcagcagactgctgagcgccgacgccgacggccagatcaagtgctggagcatggccgaccacctggccaacagctgggagagcagcgtgggcagcctggtggagggcgaccccatcgtggccctgagctggctgcacaacggcgtgaagctggccctgcacgtggagaagagcggcgccagcagcttcggcgagaagttcagcagagtgaagttcagccccagcctgaccctgttcggcggcaagcccatggagggctggatcgccgtgaccgtgagcggcctggtgaccgtgagcctgctgaagcccagcggccaggtgctgaccagcaccgagagcctgtgcagactgagaggcagagtggccctggccgacatcgccttcaccggcggcggcaacatcgtggtggccaccgccgacggcagcagcgccagccccgtgcagttctacaaggtgtgcgtgagcgtggtgagcgagaagtgcagaatcgacaccgagatcctgcccagcctgttcatgagatgcaccaccgacctgaacagaaaggacaagttccccgccatcacccacctgaagttcctggccagagacatgagcgagcaggtgctgctgtgcgccagcagccagaccagcagcatcgtggagtgctggagcctgagaaaggagggcctgcccgtgaacaacatcttccagcagatcagccccgtggtgggcgacaagcagcccaccatcctgaagtggagaatcctgagcgccaccaacgacctggacagagtgagcgccgtggccctgcccaagctgcccatcagcctgaccaacaccgacctgaaggtggccagcgacacccagttctaccccggcctgggcctggccctggccttccacgacggcagcgtgcacatcgtgcacagactgagcctgcagaccatggccgtgttctacagcagcgccgcccccagacccgtggacgagcccgccatgaagagacccagaaccgccggccccgccgtgcacctgaaggccatgcagctgagctggaccagcctggccctggtgggcatcgacagccacggcaaggtgctgagcaccagaatcctggccatgaaggccagcctgtgcaagctgagcccctgcaccgtgaccagagtgtgcgactaccacaccaagctgttcctgatcgccatcagcagcaccctgaagagcctgctgagaccccacttcctgaacacccccgacaagagccccggcgacagactgaccgagatctgcaccaagatcaccgacgtggacatcgacaaggtgatgatcaacctgaagaccgaggagttcgtgctgtag

SEQ ID NO: 156503 - DNA, 1389 bp, Artificial Sequence
  derived and/or modified sequence
atgtgcgacctgagaagacccgccgccggcggcatgatggacctggcctacgtgtgcgagtgggagaagtggagcaagagcacccactgccccagcgtgcccctggcctgcgcctggagctgcagaaacctgatcgccttcaccatggacctgagaagcgacgaccaggacctgaccagaatgatccacatcctggacaccgagcacccctgggacctgcacagcatccccagcgagcaccacgaggccatcacctgcctggagtgggaccagagcggcagcagactgctgagcgccgacgccgacggccagatcaagtgctggagcatggccgaccacctggccaacagctgggagagcagcgtgggcagcctggtggagggcgaccccatcgtggccctgagctggctgcacaacggcgtgaagctggccctgcacgtggagaaggtgctgctgtgcgccagcagccagaccagcagcatcgtggagtgctggagcctgagaaaggagggcctgcccgtgaacaacatcttccagcagatcagccccgtggtgggcgacaagcagcccaccatcctgaagtggagaatcctgagcgccaccaacgacctggacagagtgagcgccgtggccctgcccaagctgcccatcagcctgaccaacaccgacctgaaggtggccagcgacacccagttctaccccggcctgggcctggccctggccttccacgacggcagcgtgcacatcgtgcacagactgagcctgcagaccatggccgtgttctacagcagcgccgcccccagacccgtggacgagcccgccatgaagagacccagaaccgccggccccgccgtgcacctgaaggccatgcagctgagctggaccagcctggccctggtgggcatcgacagccacggcaagctgagcgtgctgagactgagccccagcatgggccaccccctggaggtgggcctggccctgagacacctgctgttcctgctggagtactgcatggtgaccggctacgactggtgggacatcctgctgcacgtgcagcccagcatggtgcagagcctggtggagaagctgcacgaggagtacaccagacagaccgccgccctgcagcaggtgctgagcaccagaatcctggccatgaaggccagcctgtgcaagctgagcccctgcaccgtgaccagagtgtgcgactaccacaccaagctgttcctgatcgccatcagcagcaccctgaagagcctgctgagaccccacttcctgaacacccccgacaagagccccggcgacagactgaccgagatctgcaccaagatcaccgacgtggacatcgacaaggtgatgatcaacctgaagaccgaggagttcgtgctgtag

SEQ ID NO: 156504 - DNA, 1098 bp, Artificial Sequence
  derived and/or modified sequence
atgtgcgacctgagaagacccgccgccggcggcatgatggacctggcctacgtgtgcgagtgggagaagtggagcaagagcacccactgccccagcgtgcccctggcctgcgcctggagctgcagaaacctgatcgccttcaccatggacctgagaagcgacgaccaggacctgaccagaatgatccacatcctggacaccgagcacccctgggacctgcacagcatccccagcgagcaccacgaggccatcacctgcctggagtgggaccagagcggcagcagactgctgagcgccgacgccgacggccagatcaagtgctggagcatggccgaccacctggccaacagctgggagagcagcgtgggcagcctggtggagggcgaccccatcgtggccctgagctggctgcacaacggcctggccctggccttccacgacggcagcgtgcacatcgtgcacagactgagcctgcagaccatggccgtgttctacagcagcgccgcccccagacccgtggacgagcccgccatgaagagacccagaaccgccggccccgccgtgcacctgaaggccatgcagctgagctggaccagcctggccctggtgggcatcgacagccacggcaagctgagcgtgctgagactgagccccagcatgggccaccccctggaggtgggcctggccctgagacacctgctgttcctgctggagtactgcatggtgaccggctacgactggtgggacatcctgctgcacgtgcagcccagcatggtgcagagcctggtggagaagctgcacgaggagtacaccagacagaccgccgccctgcagcaggtgctgagcaccagaatcctggccatgaaggccagcctgtgcaagctgagcccctgcaccgtgaccagagtgtgcgactaccacaccaagctgttcctgatcgccatcagcagcaccctgaagagcctgctgagaccccacttcctgaacacccccgacaagagccccggcgacagactgaccgagatctgcaccaagatcaccgacgtggacatcgacaaggtgatgatcaacctgaagaccgaggagttcgtgctgtag

SEQ ID NO: 156505 - DNA, 1104 bp, Artificial Sequence
  derived and/or modified sequence
atgtgcgacctgagaagacccgccgccggcggcatgatggacctggcctacgtgtgcgagtgggagaagtggagcaagagcacccactgccccagcgtgcccctggcctgcgcctggagctgcagaaacctgatcgccttcaccatggacctgagaagcgacgaccaggacctgaccagaatgatccacatcctggacaccgagcacccctgggacctgcacagcatccccagcgagcaccacgaggccatcacctgcctggagtgggaccagagcggcagcagactgctgagcgccgacgccgacggccagatcaagtgctggagcatggccgaccacctggccaacagctgggagagcagcgtgggcagcctggtggagggcgaccccatcgtggccctgagctggctgcacaacggcgtgagactggccctggccttccacgacggcagcgtgcacatcgtgcacagactgagcctgcagaccatggccgtgttctacagcagcgccgcccccagacccgtggacgagcccgccatgaagagacccagaaccgccggccccgccgtgcacctgaaggccatgcagctgagctggaccagcctggccctggtgggcatcgacagccacggcaagctgagcgtgctgagactgagccccagcatgggccaccccctggaggtgggcctggccctgagacacctgctgttcctgctggagtactgcatggtgaccggctacgactggtgggacatcctgctgcacgtgcagcccagcatggtgcagagcctggtggagaagctgcacgaggagtacaccagacagaccgccgccctgcagcaggtgctgagcaccagaatcctggccatgaaggccagcctgtgcaagctgagcccctgcaccgtgaccagagtgtgcgactaccacaccaagctgttcctgatcgccatcagcagcaccctgaagagcctgctgagaccccacttcctgaacacccccgacaagagccccggcgacagactgaccgagatctgcaccaagatcaccgacgtggacatcgacaaggtgatgatcaacctgaagaccgaggagttcgtgctgtag

SEQ ID NO: 156506 - protein, 956 aa, Artificial Sequence
  derived and/or modified sequence
MLEELECGAPGARGAATAMDCKDRPAFPVKKLIQARLPFKRLNLVPKGKADDMSDDQGTSVQSKSPDLEASLDTLENNCHVGSDIDFRPKLVNGKGPLDNFLRNRIETSIGQSTVIIDLTEDSNEQPDSLVDHNKLNSEASPSREAINGQREDTGDQQGLLKAIQNDKLAFPGETLSDIPCKTEEEGVGCGGAGRRGDSQECSPRSCPELTSGPRMCPRKEQDSWSEAGGILFKGKVPMVVLQDILAVRPPQIKSLPATPQGKNMTPESEVLESFPEEDSVLSHSSLSSPSSTSSPEGPPAPPKQHSSTSPFPTSTPLRRITKKFVKGSTEKNKLRLQRDQERLGKQLKLRAEREEKEKLKEEAKRAKEEAKKKKEEEKELKEKERREKREKDEKEKAEKQRLKEERRKERQEALEAKLEEKRKKEEEKRLREEEKRIKAEKAEITRFFQKPKTPQAPKTLAGSCGKFAPFEIKEHMVLAPRRRTAFHPDLCSQLDQLLQQQSGEFSFLKDLKGRQPLRSGPTHVSTRNADIFNSDVVIVERGKGDGVPERRKFGRMKLLQFCENHRPAYWGTWNKKTALIRARDPWAQDTKLLDYEVDSDEEWEEEEPGESLSHSEGDDDDDMGEDEDEDDGFFVPHGYLSEDEGVTEECADPENHKVRQKLKAKEWDEFLAKGKRFRVLQPVKIGCVWAADRDCAGDDLKVLQQFAACFLETLPAQEEQTPKASKRERRDEQILAQLLPLLHGNVNGSKVIIREFQEHCRRGLLSNHTGSPRSPSTTYLHTPTPSEDAAIPSKSRLKRLISENSVYEKRPDFRMCWYVHPQVLQSFQQEHLPVPCQWSYVTSVPSAPKEDSGSVPSTGPSQGTPISLKRKSAGSMCITQFMKKRRHDGQIGAEDMDGFQADTEEEEEEEGDCMIVDVPDAAEVQAPCGAASGAGGGVGVDTGKATLTSSPLGAS

SEQ ID NO: 156507 - protein, 583 aa, Artificial Sequence
  derived and/or modified sequence
MAARRRRSTGGGRARALNESKRVNNGNTAPEDSSPAKKTRRCQRQESKKMPVAGGKANKDRTEDKQDGMPGRSWASKRVSESVKALLLKGKAPVDPECTAKVGKAHVYCEGNDVYDVMLNQTNLQFNNNKYYLIQLLEDDAQRNFSVWMRWGRVGKMGQHSLVACSGNLNKAKEIFQKKFLDKTKNNWEDREKFEKVPGKYDMLQMDYATNTQDEEETKKEESLKSPLKPESQLDLRVQELIKLICNVQAMEEMMMEMKYNTKKAPLGKLTVAQIKAGYQSLKKIEDCIRAGQHGRALMEACNEFYTRIPHDFGLRTPPLIRTQKELSEKIQLLEALGDIEIAIKLVKTELQSPEHPLDQHYRNLHCALRPLDHESYEFKVISQYLQSTHAPTHSDYTMTLLDLFEVEKDGEKEAFREDLHNRMLLWHGSRMSNWVGILSHGLRIAPPEAPITGYMFGKGIYFADMSSKSANYCFASRLKNTGLLLLSEVALGQCNELLEANPKAEGLLQGKHSTKGLGKMAPSSAHFVTLNGSTVPLGPASDTGILNPDGYTLNYNEYIVYNPNQVRMRYLLKVQFNFLQLW

SEQ ID NO: 156508 - DNA, 1752 bp, Artificial Sequence
  derived and/or modified sequence
atggccgccagaagaagaagaagcaccggcggcggcagagccagagccctgaacgagagcaagagagtgaacaacggcaacaccgcccccgaggacagcagccccgccaagaagaccagaagatgccagagacaggagagcaagaagatgcccgtggccggcggcaaggccaacaaggacagaaccgaggacaagcaggacggcatgcccggcagaagctgggccagcaagagagtgagcgagagcgtgaaggccctgctgctgaagggcaaggcccccgtggaccccgagtgcaccgccaaggtgggcaaggcccacgtgtactgcgagggcaacgacgtgtacgacgtgatgctgaaccagaccaacctgcagttcaacaacaacaagtactacctgatccagctgctggaggacgacgcccagagaaacttcagcgtgtggatgagatggggcagagtgggcaagatgggccagcacagcctggtggcctgcagcggcaacctgaacaaggccaaggagatcttccagaagaagttcctggacaagaccaagaacaactgggaggacagagagaagttcgagaaggtgcccggcaagtacgacatgctgcagatggactacgccaccaacacccaggacgaggaggagaccaagaaggaggagagcctgaagagccccctgaagcccgagagccagctggacctgagagtgcaggagctgatcaagctgatctgcaacgtgcaggccatggaggagatgatgatggagatgaagtacaacaccaagaaggcccccctgggcaagctgaccgtggcccagatcaaggccggctaccagagcctgaagaagatcgaggactgcatcagagccggccagcacggcagagccctgatggaggcctgcaacgagttctacaccagaatcccccacgacttcggcctgagaaccccccccctgatcagaacccagaaggagctgagcgagaagatccagctgctggaggccctgggcgacatcgagatcgccatcaagctggtgaagaccgagctgcagagccccgagcaccccctggaccagcactacagaaacctgcactgcgccctgagacccctggaccacgagagctacgagttcaaggtgatcagccagtacctgcagagcacccacgcccccacccacagcgactacaccatgaccctgctggacctgttcgaggtggagaaggacggcgagaaggaggccttcagagaggacctgcacaacagaatgctgctgtggcacggcagcagaatgagcaactgggtgggcatcctgagccacggcctgagaatcgccccccccgaggcccccatcaccggctacatgttcggcaagggcatctacttcgccgacatgagcagcaagagcgccaactactgcttcgccagcagactgaagaacaccggcctgctgctgctgagcgaggtggccctgggccagtgcaacgagctgctggaggccaaccccaaggccgagggcctgctgcagggcaagcacagcaccaagggcctgggcaagatggcccccagcagcgcccacttcgtgaccctgaacggcagcaccgtgcccctgggccccgccagcgacaccggcatcctgaaccccgacggctacaccctgaactacaacgagtacatcgtgtacaaccccaaccaggtgagaatgagatacctgctgaaggtgcagttcaacttcctgcagctgtggtag

SEQ ID NO: 156509 - DNA, 1752 bp, Artificial Sequence
  derived and/or modified sequence
atggcagctaggcggcggcgaagcacgggggggggacgtgctagagccctcaatgaaagtaagagagtaaacaacggtaataccgctccagaggattccagccccgctaaaaagacaagaagatgccagcgtcaggagtctaagaagatgcctgtcgccggcggcaaggccaacaaagatcgaaccgaggataaacaggacggaatgcctggcaggtcttgggccagtaaacgggtctcagagtcagtgaaagccctgcttcttaagggaaaggccccggtcgatcctgaatgtacagcgaaagtcgggaaagcccacgtctattgcgaggggaacgacgtttatgacgtcatgctgaatcagactaacctgcaattcaataacaataaatactacctgatccaactcctggaggacgacgcacagaggaactttagtgtgtggatgagatggggaagggtgggcaaaatgggacagcatagcctggtggcatgctccggcaatttgaataaggctaaggaaatttttcagaagaaatttcttgacaagactaagaacaactgggaggaccgcgagaagtttgaaaaagttcccggtaaatatgacatgctccagatggattatgcgactaatacacaggacgaagaggaaaccaaaaaagaggaatccctcaaaagcccactgaaacctgagtctcagttggatctccgggtccaggaactcattaaactgatttgcaacgtccaggctatggaagagatgatgatggagatgaaatataatacaaagaaggcgcccttagggaaattgaccgtggcccagatcaaagccggctaccaaagcttgaagaagatcgaggattgcatccgtgccgggcaacacggtagggcactgatggaagcctgtaatgaattttacacgcgtatccctcacgattttgggctgcggacaccacccctgattcggacacagaaggaactctcagagaagattcagcttctggaggctctaggcgacatagaaattgctatcaagctggttaagacagaactgcagagccccgagcacccgctcgatcagcattataggaatctccattgtgcattgagacctcttgatcacgaaagttacgagtttaaggtaataagtcaatatctgcagtccacgcatgccccaacccactccgactatacaatgactctgctagacctttttgaggtggagaaggacggggagaaggaagcatttcgggaggacctgcacaatagaatgctcctgtggcatggttctagaatgagcaactgggtcggcattctcagtcatggtctgagaatcgctccaccagaggccccaatcacgggatatatgttcgggaagggaatttatttcgccgacatgtccagtaagtctgccaattattgcttcgcatccaggctgaaaaatacaggtctgctgctgttgagcgaggtcgctctcggccagtgtaatgagctgctggaagctaaccccaaagcagagggcctcctacagggcaagcattccactaaaggattaggcaaaatggctccaagtagcgcacacttcgtcaccttgaatggtagcacggtgccactgggccctgcctcagataccggcatcctgaatcccgacggctatacccttaattacaacgaatatattgtgtacaatccaaaccaagtaagaatgcgatatttactcaaggttcagttcaattttctccaattgtggtag

SEQ ID NO: 156510 - DNA, 1752 bp, Artificial Sequence
  derived and/or modified sequence
atggccgccaggagaagaagaagcactggaggcggccgggcccgggccctgaatgaaagcaagagggtgaacaatggaaacacagcccctgaggacagcagccctgccaagaagacccggcgctgccagaggcaggagagcaagaagatgcctgtggccggcggcaaggccaacaaggacagaacagaggacaagcaggacggcatgcctggccgctcctgggccagcaagagggtgtctgagagcgtgaaggccctgctgctgaagggcaaggcccctgtggaccctgaatgtacagccaaggtgggcaaggcccacgtgtactgtgagggcaatgatgtgtatgatgtgatgctgaaccagaccaacctgcagttcaacaacaacaagtactacctgatccagctgctggaggatgatgcccagaggaacttctctgtgtggatgcgctggggccgggtgggcaagatgggccagcacagcctggtggcctgcagcggcaacctgaacaaggccaaggagatcttccagaagaagttcctggacaagaccaagaacaactgggaggaccgggagaagtttgagaaggtgcctgggaagtatgacatgctgcagatggactatgccaccaacacccaggatgaggaggagaccaagaaggaggagagcctgaagagccccctgaagccagagagccagctggacctgcgggtgcaggagctgatcaagctgatctgcaatgtgcaggccatggaggagatgatgatggagatgaagtacaacaccaagaaggcccccctgggcaagctgactgtggcccagatcaaggccggctaccagagcctgaagaagattgaggactgcatccgggccggccagcacggccgggccctgatggaggcctgcaatgagttctacacccgcatcccccatgactttggcctgcggaccccacccctcatccgcacccagaaggagctgtctgagaagatccagctgctggaggccctgggggacatcgagatcgccatcaagctggtgaagacagagctgcagagccctgagcaccccctggaccagcactacagaaacctgcactgtgccctgcggcccctggaccacgagagctatgagttcaaggtgatcagccagtacctgcagagcacccacgcccccacccacagcgactacaccatgaccctgctggacctgtttgaggtggagaaggatggagagaaggaggccttccgggaggacctgcacaacaggatgctgctgtggcacggcagcaggatgagcaactgggtgggcatcctgagccacggcctgagaattgcccctcctgaggcccccatcaccggctacatgtttgggaagggcatctactttgctgacatgagcagcaagagcgccaactactgctttgccagccggctgaagaacacaggcctgctgctgctgtctgaggtggccctgggccagtgcaatgagctgctggaggccaaccccaaggccgagggcctgctgcagggcaagcacagcaccaagggcctgggcaagatggcccccagcagcgcccactttgtgaccctgaatggcagcacagtgcccctgggccctgccagtgacaccggcatcctgaacccagatggctacaccctgaactacaatgagtacatcgtgtacaaccccaaccaggtgaggatgagatacctgctgaaggtgcagttcaacttcctgcagctgtggtag

SEQ ID NO: 156511 - DNA, 1752 bp, Artificial Sequence
  derived and/or modified sequence
atggccgcccggcggcggcggagcaccggcggcggccgggcccgggctctgaacgaatctaagagagtgaacaacggaaatactgcacccgaggattctagtccagcaaaaaaaacacgccgttgccagcggcaggagagtaaaaagatgcccgtggctggcgggaaagctaataaggacagaactgaagataagcaggatgggatgcccgggcgctcctgggcctcaaaaagagtgtccgagagtgtgaaggccctgcttctgaagggtaaagcccctgtcgacccagagtgtacagctaaggtgggcaaggcccacgtctactgtgaagggaacgatgtctacgatgtcatgctgaatcagactaacctccagttcaacaacaacaagtattacctgatacagctccttgaggacgatgcccaaaggaacttctccgtttggatgaggtggggtcgggtaggtaagatgggacagcattcccttgtggcttgtagtgggaacttgaataaggccaaggagatctttcagaaaaagttcctcgataagacgaagaacaattgggaggacagggagaagtttgagaaagttccagggaagtacgatatgttgcagatggactacgctaccaatacacaggacgaggaagagacaaagaaggaggaatccctgaagtcccctctgaaaccagagagccaacttgaccttagggtgcaggagttgattaagctcatatgtaacgtccaggctatggaggagatgatgatggaaatgaagtacaacacgaagaaagcaccattaggtaaattgacagtggctcagattaaagccggctatcagagtctgaagaagatcgaggactgcatcagggccgggcagcacggacgtgcccttatggaagcatgtaatgaattttacacccgtattccgcacgacttcggacttcgtaccccccctctaattcggacacaaaaggagttgagtgaaaagatccagctgcttgaagcactgggggacatcgagatcgcaatcaagcttgttaaaaccgagctccaaagccccgagcaccctctggaccagcactatcgaaacttacactgcgcgcttcggcccctcgaccatgagtcttacgagtttaaagtgatcagccagtacctccaatcaactcacgctcctacccactctgactacacaatgacactgttggatttgtttgaggtggagaaagacggcgaaaaggaggcattcagggaagacctacataataggatgctgctctggcacggatcacggatgagcaattgggttggcattctgagtcacggcctgcgtatcgcccctcctgaggccccgatcaccggctacatgttcgggaaaggcatctactttgccgacatgtccagtaagtcagctaattattgttttgccagcagacttaaaaacaccggtctccttctcctgtcggaggtcgccctcggacaatgcaatgagctgttggaagctaaccccaaagccgagggcctgctgcagggaaagcattcaacaaaggggcttggaaaaatggccccctcctccgctcattttgtaacactgaatggcagcaccgttccgctggggcccgcctcagacactggaatcctcaatcccgacgggtatactctcaattataacgaatacattgtttacaaccccaaccaagtccggatgcgctacttacttaaggtgcaatttaactttcttcagctgtggtag

SEQ ID NO: 156512 - DNA, 1752 bp, Artificial Sequence
  derived and/or modified sequence
atggcagcacgccgtcggaggtccacaggcggaggtagggctcgggcattgaacgaatccaagagagtcaacaatggcaataccgcccctgaggattccagcccggcaaaaaagacccgccgttgtcaaagacaggagtccaagaagatgccagtggccggaggcaaggcaaataaagaccggacggaagacaagcaggacggcatgcccggaagatcctgggcctctaaacgcgtgagtgagagcgttaaggccctgcttttaaaagggaaagcaccagtggatcccgaatgtacagccaaagtgggtaaggcccatgtttattgcgaaggtaatgatgtgtatgatgttatgctgaatcagaccaacctgcagttcaacaacaataaatactatctgattcagctgctagaagacgatgcccagcgaaacttctcggtgtggatgaggtggggccgtgtggggaagatggggcaacactcccttgttgcctgcagcggcaacctgaacaaagctaaagagatcttccagaagaaatttctggacaaaaccaagaacaactgggaggacagagagaagttcgagaaggtgccgggtaagtatgacatgctgcaaatggactacgctaccaacacacaggatgaagaagagacgaagaaggaagagagcctgaaatctccccttaaaccagaaagccagttagatctccgagtgcaagagctcataaagctgatatgcaacgtccaggctatggaagagatgatgatggaaatgaagtacaatacaaaaaaggccccacttgggaaacttacggtcgctcagattaaggccggatatcagagcttaaaaaagatcgaggattgtattagagcagggcagcacggcagagccctgatggaggcctgcaacgaattctatacccgcattccccatgatttcggattgcggacaccaccgttgatccgaacacagaaagaactaagtgaaaagatccagctcctcgaggctctaggtgacattgagattgcgatcaagctcgttaagaccgagcttcagtcccccgagcatccccttgaccagcactatcgcaacctgcactgcgcacttaggccactggaccatgagtcttatgagtttaaggttatcagccagtatttgcagagcactcatgcccctactcattccgactacaccatgacactgctggatctcttcgaagtcgaaaaggatggcgagaaagaagccttcagagaggacctgcacaaccggatgcttttgtggcacgggtctcgcatgagcaactgggtggggatcctgagccacggactgcgaattgctccacccgaagctcctattaccggctatatgtttggcaagggtatctactttgcggatatgagcagcaaatccgcaaactattgctttgccagtcgcctgaagaataccggactgctcctgctgtctgaagtggctctcgggcagtgcaatgagctcctggaggcaaaccccaaggccgagggcctgcttcagggcaaacactccaccaaaggcctgggcaaaatggctccctcctcagctcactttgtaacgctgaacgggtccacagttcccctcgggccagcatcagatacaggcattctgaaccccgacggctatactctcaactacaatgaatatatcgtgtataacccgaaccaagtgagaatgcggtatctcttgaaagtgcagttcaattttctgcaactgtggtag

SEQ ID NO: 156513 - DNA, 1886 bp, Artificial Sequence
  derived and/or modified sequence
ggttgatgacgtcagcgttcgaattccatggcggcgcggcggcgacggagcaccggcggcggcagggcgagagcattaaatgaaagcaaaagagttaataatggcaacacggctccagaagactcttcccctgccaagaaaactcgtagatgccagagacaggagtcgaaaaagatgcctgtggctggaggaaaagctaataaggacaggacagaagacaagcaagatggtatgccaggaaggtcatgggccagcaaaagggtctctgaatctgtgaaggccttgctgttaaagggcaaagctcctgtggacccagagtgtacagccaaggtggggaaggctcatgtgtattgtgaaggaaatgatgtctatgatgtcatgctaaatcagaccaatctccagttcaacaacaacaagtactatctgattcagctattagaagatgatgcccagaggaacttcagtgtttggatgagatggggccgagttgggaaaatgggacagcacagcctggtggcttgttcaggcaatctcaacaaggccaaggaaatctttcagaagaaattccttgacaaaacgaaaaacaattgggaagatcgagaaaagtttgagaaggtgcctggaaaatatgatatgctacagatggactatgccaccaatactcaggatgaagaggaaacaaagaaagaggaatctcttaaatctcccttgaagccagagtcacagctagatcttcgggtacaggagttaataaagttgatctgtaatgttcaggccatggaagaaatgatgatggaaatgaagtataataccaagaaagccccacttgggaagctgacagtggcacaaatcaaggcaggttaccagtctcttaagaagattgaggattgtattcgggctggccagcatggacgagctctcatggaagcatgcaatgaattctacaccaggattccgcatgactttggactccgtactcctccactaatccggacacagaaggaactgtcagaaaaaatacaattactagaggctttgggagacattgaaattgctattaagctggtgaaaacagagctacaaagcccagaacacccattggaccaacactatagaaacctacattgtgccttgcgcccccttgaccatgaaagttatgagttcaaagtgatttcccagtacctacaatctacccatgctcccacacacagcgactataccatgaccttgctggatttgtttgaagtggagaaggatggtgagaaagaagccttcagagaggaccttcataacaggatgcttctatggcatggttccaggatgagtaactgggtgggaatcttgagccatgggcttcgaattgccccacctgaagctcccatcacaggttacatgtttgggaaaggaatctactttgctgacatgtcttccaagagtgccaattactgctttgcctctcgcctaaagaatacaggactgctgctcttatcagaggtagctctaggtcagtgtaatgaactactagaggccaatcctaaggccgaaggattgcttcaaggtaaacatagcaccaaggggctgggcaagatggctcccagttctgcccacttcgtcaccctgaatgggagtacagtgccattaggaccagcaagtgacacaggaattctgaatccagatggttataccctcaactacaatgaatatattgtatataaccccaaccaggtccgtatgcggtaccttttaaaggttcagtttaatttccttcagctgtggtgaatgttgatattaaataaaccagagatctgatcttcaagcaagaaaataagcagtgttgtacttgtgaattttgtgatattttatgtaataaaaactgtacaggtcta

SEQ ID NO: 156514 - protein, 332 aa, Artificial Sequence
  derived and/or modified sequence
MAPKPKPWVQTEGPEKKKGRQAGREEDPFRSTAEALKAIPAEKRIIRVDPTCPLSSNPGTQVYEDYNCTLNQTNIENNNNKFYIIQLLQDSNRFFTCWNHWGRVGEVGQSKINHFTRLEDAKKDFEKKFREKTKNNWAERDHFVSHPGKYTLIEVQAEDEAQEAVVKVDRGPVRTVTKRVQPCSLDPATQKLITNIFSKEMFKNTMALMDLDVKKMPLGKLSKQQIARGFEALEALEEALKGPTDGGQSLEELSSHFYTVIPHNFGHSQPPPINSPELLQAKKDMLLVLADIELAQALQAVSEQEKTVEEVPHPLDRDYQLLKCQLQLLDSG

SEQ ID NO: 156515 - DNA, 1602 bp, Artificial Sequence
  derived and/or modified sequence
atggcccccaagcccaagccctgggtgcagaccgagggccccgagaagaagaagggcagacaggccggcagagaggaggaccccttcagaagcaccgccgaggccctgaaggccatccccgccgagaagagaatcatcagagtggaccccacctgccccctgagcagcaaccccggcacccaggtgtacgaggactacaactgcaccctgaaccagaccaacatcgagaacaacaacaacaagttctacatcatccagctgctgcaggacagcaacagattcttcacctgctggaaccactggggcagagtgggcgaggtgggccagagcaagatcaaccacttcaccagactggaggacgccaagaaggacttcgagaagaagttcagagagaagaccaagaacaactgggccgagagagaccacttcgtgagccaccccggcaagtacaccctgatcgaggtgcaggccgaggacgaggcccaggaggccgtggtgaaggtggacagaggccccgtgagaaccgtgaccaagagagtgcagccctgcagcctggaccccgccacccagaagctgatcaccaacatcttcagcaaggagatgttcaagaacaccatggccctgatggacctggacgtgaagaagatgcccctgggcaagctgagcaagcagcagatcgccagaggcttcgaggccctggaggccctggaggaggccctgaagggccccaccgacggcggccagagcctggaggagctgagcagccacttctacaccgtgatcccccacaacttcggccacagccagcccccccccatcaacagccccgagctgctgcaggccaagaaggacatgctgctggtgctggccgacatcgagctggcccaggccctgcaggccgtgagcgagcaggagaagaccgtggaggaggtgccccaccccctggacagagactaccagctgctgaagtgccagctgcagctgctggacagcggcgcccccgagtacaaggtgatccagacctacctggagcagaccggcagcaaccacagatgccccaccctgcagcacatctggaaggtgaaccaggagggcgaggaggacagattccaggcccacagcaagctgggcaacagaaagctgctgtggcacggcaccaacatggccgtggtggccgccatcctgaccagcggcctgagaatcatgccccacagcggcggcagagtgggcaagggcatctacttcgccagcgagaacagcaagagcgccggctacgtgatcggcatgaagtgcggcgcccaccacgtgggctacatgttcctgggcgaggtggccctgggcagagagcaccacatcaacaccgacaaccccagcctgaagagccccccccccggcttcgacagcgtgatcgccagaggccacaccgagcccgaccccacccaggacaccgagctggagctggacggccagcaggtggtggtgccccagggccagcccgtgccctgccccgagttcagcagcagcaccttcagccagagcgagtacctgatctaccaggagagccagtgcagactgagatacctgctggaggtgcacctgtag

SEQ ID NO: 156516 - DNA, 999 bp, Artificial Sequence
  derived and/or modified sequence
atggcccccaagcccaagccctgggtgcagaccgagggccccgagaagaagaagggcagacaggccggcagagaggaggaccccttcagaagcaccgccgaggccctgaaggccatccccgccgagaagagaatcatcagagtggaccccacctgccccctgagcagcaaccccggcacccaggtgtacgaggactacaactgcaccctgaaccagaccaacatcgagaacaacaacaacaagttctacatcatccagctgctgcaggacagcaacagattcttcacctgctggaaccactggggcagagtgggcgaggtgggccagagcaagatcaaccacttcaccagactggaggacgccaagaaggacttcgagaagaagttcagagagaagaccaagaacaactgggccgagagagaccacttcgtgagccaccccggcaagtacaccctgatcgaggtgcaggccgaggacgaggcccaggaggccgtggtgaaggtggacagaggccccgtgagaaccgtgaccaagagagtgcagccctgcagcctggaccccgccacccagaagctgatcaccaacatcttcagcaaggagatgttcaagaacaccatggccctgatggacctggacgtgaagaagatgcccctgggcaagctgagcaagcagcagatcgccagaggcttcgaggccctggaggccctggaggaggccctgaagggccccaccgacggcggccagagcctggaggagctgagcagccacttctacaccgtgatcccccacaacttcggccacagccagcccccccccatcaacagccccgagctgctgcaggccaagaaggacatgctgctggtgctggccgacatcgagctggcccaggccctgcaggccgtgagcgagcaggagaagaccgtggaggaggtgccccaccccctggacagagactaccagctgctgaagtgccagctgcagctgctggacagcggctag

SEQ ID NO: 156517 - DNA, 1602 bp, Artificial Sequence
  derived and/or modified sequence
atggcgccgaaaccgaagccctgggtgcagactgagggacctgagaagaagaagggcagacaggcaggccgagaggaggatcctttccgttccaccgctgaggccctgaaggcgatccccgctgagaagcgtatcatccgtgtggatcccacgtgccctttgtcaagcaaccccggaacccaggtgtacgaggactataactgtactctgaaccagactaatattgaaaataataacaacaaattctatatcatccaactgttacaagacagtaacaggtttttcacctgctggaatcactgggggcgagtcggtgaggttggtcagtcaaagatcaatcacttcacccgactggaagacgctaagaaggatttcgagaaaaagtttcgagaaaagaccaagaacaactgggccgagcgggatcactttgtgagccatcccgggaaatataccctgatcgaggtgcaggctgaggacgaggctcaagaagccgtagtcaaagtcgatcgggggccagtgcgtactgtgaccaagcgcgtgcaaccttgttcgctcgatcccgcgacccagaaactgattaccaatatcttttccaaggagatgttcaagaatacaatggccttaatggatctagacgtgaaaaaaatgccactggggaagctgtcaaaacagcagatagcacgtggatttgaagctcttgaggctctggaggaggcactgaagggtccgacggacggtggacagtctctagaggagctctcaagccacttctacaccgtgatacctcacaattttggacacagtcaacccccacctatcaattccccagaattgcttcaggcgaaaaaggatatgttgctcgtcctggctgatatagagctggctcaggctctgcaggccgttagcgaacaggagaaaacagtggaggaagtccctcacccactggacagagattatcaactccttaagtgccagctgcagctgctcgactcaggagcacccgagtacaaggttattcagacatatctcgaacagactggcagtaaccaccggtgtccaactttacagcacatatggaaagtgaaccaggagggtgaagaggatcggttccaggcccatagcaaactcggcaaccggaagctactatggcacggcaccaatatggccgttgttgccgccattctcacctccggcctccgcattatgcctcacagcggcggccgggttggcaaaggaatctacttcgcgtcagagaacagcaaatcagccggatatgtcattggcatgaaatgcggtgcccatcacgtcggctatatgttcctgggggaggttgctctcgggagggaacaccacatcaacacagacaatccctctctgaaaagccctcccccaggcttcgactcagtgatcgcacgtgggcacaccgagccagaccccactcaggacacggagctggagctggatgggcagcaagtggtggttccccaaggtcagcccgttccatgcccagagttcagcagtagcacattttcccaatcagagtacctgatttatcaggagagccagtgcagactccgataccttttagaagtgcatctctag

SEQ ID NO: 156518 - DNA, 1602 bp, Artificial Sequence
  derived and/or modified sequence
atggcaccaaaacctaagccgtgggtgcagacagagggcccagagaaaaagaaaggcagacaggccgggcgggaggaagatccattccgctcaacggctgaagccctcaaagctattcccgctgagaagcgaatcatccgtgtcgatcccacgtgcccactaagcagcaatccaggtacccaggtgtatgaagattataattgcactctcaaccaaaccaacatcgaaaataataacaataaattctatataatccagctgctgcaagatagtaaccggttctttacttgttggaatcactgggggcgcgtgggtgaagttggacagtctaaaatcaaccactttacaaggctagaggatgccaagaaggacttcgagaaaaagttcagagagaagactaagaacaactgggcagagcgagaccacttcgttagccacccaggtaagtacacgctgattgaagtgcaagctgaggacgaggctcaggaggcagtggtgaaggtggaccgaggccctgtacgcactgtgacaaaaagggtgcagccgtgtagcctcgatcctgctactcaaaagctgattacaaatattttctccaaggagatgtttaagaatacaatggcccttatggatctggacgtcaaaaagatgcctttgggcaagctgagcaagcagcaaattgcgagaggcttcgaggctctagaagccctggaagaggccttgaaggggcccacagacggtggacagtccctggaagagctgtcaagtcatttctacacggtcatcccacacaacttcgggcatagccagcccccccccataaattctcccgagctgctgcaggccaaaaaagacatgctgctggtccttgcggatatcgaactagcacaggccctgcaggcagtatctgagcaggagaagactgtcgaagaggtgccacaccctctggaccgtgactatcagctgctgaagtgtcagttgcagttgctggattccggtgcacctgaatacaaagtgatccagacttatcttgaacagaccgggtcaaaccacaggtgtcccactttgcagcatatctggaaagttaaccaggaaggtgaagaggaccgtttccaagcccactcaaagctgggtaaccgaaaacttctgtggcatgggaccaacatggcagtcgttgccgccatccttacgagtggcctccgaattatgccacactcaggcggccgcgtgggcaagggaatatattttgcttccgaaaatagcaagtcagcgggctacgttattggcatgaagtgtggcgcccaccatgttggctacatgttcctcggcgaggtagccctcggaagggagcatcatatcaatacagacaatcccagcttgaagtctccaccaccggggttcgacagcgtgatcgctagaggacatacagaacctgaccctacccaggacactgagctcgagctcgacggccaacaggtcgtggtgccccagggtcagcccgtgccgtgcccagaattctcctcttcgactttcagccaaagtgaatacctcatttaccaagagtcgcaatgccgcttaaggtacctcttagaagtccacttgtag

SEQ ID NO: 156519 - DNA, 999 bp, Artificial Sequence
  derived and/or modified sequence
atggcaccaaaacccaaaccatgggtgcagaccgagggaccagagaaaaagaagggtcggcaggcgggaagggaagaggatcccttcaggagcactgcagaagcattgaaggccataccagcagaaaaaagaattattagggtggaccccacctgccccctgtcttccaatccaggtactcaggtgtacgaggactacaactgcacacttaatcagactaatatagaaaacaacaataacaaattctacattatccagctgctccaggactcaaatcgattctttacatgctggaatcactggggcagggtaggggaggttggacagagtaaaataaaccatttcacccgccttgaagatgcaaaaaaagatttcgagaaaaaattccgagagaagaccaagaataattgggcagaaagggatcattttgtgtctcacccaggcaagtatacactgatcgaggtgcaggccgaagatgaagcccaggaggcggtggtaaaggttgatcgcgggcccgtgagaacagtcaccaagagggttcagccgtgctccctggacccagctacacagaagctcattaccaatattttttccaaggaaatgttcaaaaatactatggctttaatggatttggacgttaaaaagatgcctctggggaaactgtccaagcagcaaattgctcgaggctttgaagctctggaggcactggaagaggctctgaaggggccgactgacgggggccagagtctggaagaactctcgtcccatttctataccgtgattccccacaactttggtcattcacaacctccccccatcaactcgccggaactccttcaggcaaagaaagacatgctcctcgtgctggctgacattgagttggctcaggcgctccaggcggtaagcgaacaggagaaaactgtcgaggaggtgccccatcccctggatagggactaccagctattgaagtgccagctgcagctcctggacagcggctag

SEQ ID NO: 156520 - DNA, 1602 bp, Artificial Sequence
  derived and/or modified sequence
atggcccccaagcccaagccctgggtgcagacagagggccctgagaagaagaagggccggcaggccggccgggaggaggaccccttccgcagcacagctgaggccctgaaggccatcccagctgagaagaggatcatccgggtggaccccacctgccccctgagcagcaaccctggcacccaggtgtatgaggactacaactgcaccctgaaccagaccaacatcgagaacaacaacaacaagttctacatcatccagctgctgcaggacagcaaccgcttcttcacctgctggaaccactggggccgggtgggggaggtgggccagagcaagatcaaccacttcacccggctggaggatgccaagaaggactttgagaagaagttccgggagaagaccaagaacaactgggccgagcgggaccactttgtgagccaccctgggaagtacaccctgattgaggtgcaggccgaggatgaggcccaggaggccgtggtgaaggtggaccggggccctgtgaggacagtgaccaagagggtgcagccctgcagcctggaccctgccacccagaagctgatcaccaacatcttcagcaaggagatgttcaagaacaccatggccctgatggacctggatgtgaagaagatgcccctgggcaagctgagcaagcagcagatcgcccggggctttgaggccctggaggccctggaggaggccctgaagggccccacagatggcggccagagcctggaggagctgagcagccacttctacaccgtcatcccccacaactttggccacagccagcccccacccatcaacagccctgagctgctgcaggccaagaaggacatgctgctggtgctggccgacatcgagctggcccaggccctgcaggccgtgtctgagcaggagaagacagtggaggaggtgccccaccccctggaccgggactaccagctgctgaagtgccagctgcagctgctggacagcggggcccctgagtacaaggtgatccagacctacctggagcagacaggcagcaaccaccgctgccccaccctgcagcacatctggaaggtgaaccaggagggggaggaggaccgcttccaggcccacagcaagctgggcaacaggaagctgctgtggcacggcaccaacatggctgtggtggccgccatcctgaccagcggcctgcgcatcatgccccacagcggcggccgggtgggcaagggcatctactttgccagcgagaacagcaagtctgctggctacgtgattggcatgaagtgtggggcccaccacgtgggctacatgttcctgggggaggtggccctgggccgggagcaccacatcaacacagacaaccccagcctgaagagccccccacctggctttgacagcgtcatcgcccggggccacacagagccagaccccacccaggacacagagctggagctggatggccagcaggtggtggtgccccagggccagcctgtgccctgcccagagttcagcagcagcaccttcagccagagcgagtacctgatctaccaggagagccagtgccgcctgcgctacctgctggaggtgcacctgtag

SEQ ID NO: 156521 - DNA, 999 bp, Artificial Sequence
  derived and/or modified sequence
atggcccccaagcccaagccctgggtgcagacagagggccctgagaagaagaagggccggcaggccggccgggaggaggaccccttccgcagcacagctgaggccctgaaggccatcccagctgagaagaggatcatccgggtggaccccacctgccccctgagcagcaaccctggcacccaggtgtatgaggactacaactgcaccctgaaccagaccaacatcgagaacaacaacaacaagttctacatcatccagctgctgcaggacagcaaccgcttcttcacctgctggaaccactggggccgggtgggggaggtgggccagagcaagatcaaccacttcacccggctggaggatgccaagaaggactttgagaagaagttccgggagaagaccaagaacaactgggccgagcgggaccactttgtgagccaccctgggaagtacaccctgattgaggtgcaggccgaggatgaggcccaggaggccgtggtgaaggtggaccggggccctgtgaggacagtgaccaagagggtgcagccctgcagcctggaccctgccacccagaagctgatcaccaacatcttcagcaaggagatgttcaagaacaccatggccctgatggacctggatgtgaagaagatgcccctgggcaagctgagcaagcagcagatcgcccggggctttgaggccctggaggccctggaggaggccctgaagggccccacagatggcggccagagcctggaggagctgagcagccacttctacaccgtcatcccccacaactttggccacagccagcccccacccatcaacagccctgagctgctgcaggccaagaaggacatgctgctggtgctggccgacatcgagctggcccaggccctgcaggccgtgtctgagcaggagaagacagtggaggaggtgccccaccccctggaccgggactaccagctgctgaagtgccagctgcagctgctggacagcggctag

SEQ ID NO: 156522 - DNA, 1602 bp, Artificial Sequence
  derived and/or modified sequence
atggcccccaagcccaagccctgggtgcagaccgagggccccgagaagaagaagggtcgacaggcgggcagggaggaagacccttttaggagcacagctgaggccctcaaagccatccccgccgagaagaggattatcagagttgaccctacatgtccactgtccagtaatcccgggacccaggtgtatgaggattacaattgcacactgaaccaaaccaacatagaaaataacaataacaaattctacataattcagctcctgcaggattccaatagattcttcacctgttggaaccactggggcagagtaggagaagttggccaaagcaaaatcaaccattttacaagactggaggatgctaagaaggacttcgagaaaaagttccgagagaagacgaaaaataactgggcggagagagatcatttcgtttctcacccaggtaagtacactctcattgaggtgcaggccgaagacgaggcccaggaggcggtcgtgaaggtggaccggggccctgtgcgaacagtcacaaagagggtccaaccttgttctctggaccccgcaacacagaagctcatcacaaacattttttctaaggagatgtttaagaacacaatggccctgatggacctcgatgtcaaaaagatgccattagggaaactttcaaagcaacaaatcgctcggggatttgaggcactcgaagccctggaggaggcgctgaaaggaccaaccgacggaggacagagtttggaagagctctctagtcatttctatacagtgatcccccacaactttgggcacagccagcctccgccaatcaacagccccgagctcctccaggctaagaaagatatgctcttggttctggccgatattgagttggcccaggccttgcaagcggtctccgaacaggagaaaactgtggaagaggttcctcatccgctggatagagactaccagcttctcaaatgtcagctacagttgctggatagtggcgcacccgagtacaaggtgatccagacatacctggaacagaccggaagcaaccacaggtgtcctactctccagcatatctggaaagtcaatcaagaaggggaagaagaccggttccaagctcactccaaacttggcaatcgcaaactactctggcatggcacaaatatggccgtggtagctgccattttgacgtccggactaaggataatgccccattccgggggccgcgttggaaagggcatctatttcgccagcgaaaactccaagagcgccgggtacgtaatcggcatgaagtgcggtgcccaccacgttggatacatgttcctgggggaggtggccctcggtagagagcatcatatcaacacagacaatcccagcctaaagagcccccctcctgggttcgatagcgtgatcgcgcggggacatactgaacccgaccctacacaggacaccgagctcgagttagatggccagcaagtggtggtcccacaaggccaacccgtcccctgcccagaattctcaagtagcacattttcccagtccgagtatttgatctatcaggagtcacaatgtagattgaggtatctcctcgaggtccacctatag

SEQ ID NO: 156523 - DNA, 1602 bp, Artificial Sequence
  derived and/or modified sequence
atggcccccaagcccaagccctgggtgcagaccgagggccccgagaaaaaaaaggggcgtcaggcggggcgcgaggaggatccgttccggtctacggccgaggcacttaaggccatacccgccgaaaagcggattattcgcgtcgaccccacatgccccttatcaagcaatcctggtacccaggtatacgaggactataactgtacgctgaaccagaccaacattgagaataacaataataagttttacattatccagctcttgcaagatagcaaccggtttttcacttgctggaaccactgggggagagtaggcgaagtgggtcagtcaaagatcaatcactttacccgactggaagacgcaaaaaaagattttgaaaagaaattccgggaaaaaacaaagaataactgggccgagcgcgaccacttcgtcagccatcccggaaagtacacgctcatcgaggtgcaagctgaggatgaggctcaggaggcagttgtgaaggtcgataggggacccgtcagaaccgtgaccaagagggtccagccctgttcccttgatcccgcaactcagaaactcataaccaatatcttttcaaaggagatgtttaagaacacaatggcgctcatggatctagacgtgaaaaagatgcccctgggcaaactctccaagcagcagattgcgaggggcttcgaggccctggaagccctggaggaggccctcaagggccccacggacggaggccagtcgctggaagagttgtcttcacacttttacactgtcataccacacaattttggccattcccaacctcctccaattaattctccggaattacttcaggcgaaaaaagatatgcttctcgttcttgccgatatagaactggcccaggctctgcaggccgtgtccgaacaggaaaaaacagtagaagaagtcccgcaccctctagatcgcgactaccagttactaaagtgtcagcttcagctgttagattctggcgcccctgagtacaaggtaatccaaacatatcttgagcagactggttccaaccacaggtgccccacccttcagcatatctggaaagttaaccaggagggagaggaggacaggtttcaggctcactctaagctcggcaatcgtaagttgctctggcatggcaccaatatggctgtggtggccgctattctgacatccggactcaggattatgcctcactctggcggacgggtcgggaagggcatctactttgcttccgaaaactccaaatccgcaggctatgtcatcggaatgaaatgtggggcccaccacgtcggatacatgttcttaggagaagtcgctctgggacgtgagcaccacatcaatacagacaacccttcactcaaaagtcctccacccggctttgactcggtgattgcccgaggtcatactgagcccgaccccacccaggacacagagctggagttagatggtcagcaggtggtagttcctcagggacagcctgtgccgtgcccagagttctcctcatcaaccttctcccagtctgagtacttgatatatcaggaaagtcaatgtcggctgagatacctgttggaagtgcatctgtag

SEQ ID NO: 156524 - DNA, 999 bp, Artificial Sequence
  derived and/or modified sequence
atggcccccaagcccaagccctgggtgcagaccgagggccccgagaaaaaaaaaggaaggcaggctggaagggaggaggatcccttcaggtcgaccgcagaggcactgaaagcaatcccagctgagaaaaggattatacgcgtggacccaacctgccccctgagttccaaccctgggacccaggtttacgaagattataattgcaccttgaaccaaaccaatatcgagaacaataataacaaattctacatcatccagctgctccaggacagcaatcggtttttcacgtgttggaatcactgggggcgggtgggcgaggtcggtcagagcaagatcaaccacttcacacggctggaggacgccaagaaagactttgaaaagaaatttagggagaagaccaagaacaattgggccgaacgcgatcactttgtttcccacccaggtaagtataccctcatcgaagtccaggcagaagatgaagcacaagaagcagtcgtgaaagtcgacagaggtccggtgcgaacagtgaccaaaagggtgcaaccatgctccctggaccccgctactcagaaattgattactaacatcttttctaaagagatgtttaagaatactatggctctgatggaccttgatgtgaagaaaatgcctctgggaaaactttccaaacagcagatcgcacgaggcttcgaggcactggaggcacttgaagaggcactaaaaggcccgacagatggcggacagtctctggaggaattatctagtcatttctacacggtgatccctcataactttggccactcgcaaccacccccaatcaattctcctgaactcctccaggccaagaaagatatgctcctggtcttagctgacatcgagctggctcaggcattgcaggcagtcagcgaacaggagaagaccgtcgaagaagtgccgcatcccctggatcgagactatcagctactgaagtgccagcttcagttacttgattccgggtag

SEQ ID NO: 156525 - DNA, 1602 bp, Artificial Sequence
  derived and/or modified sequence
atggcgccaaagcctaagccatgggtccagactgagggaccggagaagaagaaaggtcgccaagctgggcgtgaggaggatccattcagaagtacagcagaggcattgaaagcaatcccggcagagaagaggataatacgagtggaccctacgtgtccgttaagcagcaaccccggtacacaggtgtatgaagattacaattgcactttgaaccagaccaatattgaaaacaacaacaataagttttatataattcagttgcttcaggattcaaaccggtttttcacctgctggaaccattggggtagagtaggagaagtgggccagagcaaaataaatcactttactcgcctagaggatgcaaagaaggatttcgagaaaaaatttagggagaagacaaagaataattgggcagagagggaccacttcgtcagccaccccggaaagtatacactgatagaagtgcaagcagaggacgaagcacaggaggcggttgtcaaagtggaccgagggccagtgaggacagtcacaaaacgggtgcaaccatgctccctggacccagctacccagaaactaattaccaacatattctcaaaggagatgttcaaaaacacaatggctttgatggatctggacgttaagaagatgcccctgggtaaactgagtaagcagcaaatagcaagagggttcgaagcccttgaagccctggaggaggcactcaagggccctaccgacggaggtcagtcattggaggaactgagctctcacttttacactgttattcctcacaactttggtcactctcagcctccacccattaatagtcccgagttgttacaagctaagaaagatatgctcctggttcttgccgatatcgaattggcccaagcactccaagcggtgtccgagcaggaaaaaaccgtggaagaagtcccgcacccgctagatcgcgattatcagctactgaaatgccagctgcagctccttgatagcggggcacctgagtacaaagtaatccagacatacttagaacagactggttcaaaccacagatgccctacgttgcagcacatctggaaggtcaaccaggaaggggaagaagatcggttccaggcacatagtaagctaggaaataggaagcttctttggcacggcaccaatatggccgttgtcgccgctatcttgacaagcggcctaaggatcatgccccactcggggggacgggtcggtaagggaatctactttgcatcagagaactccaagtccgcaggctacgtgattggaatgaagtgcggcgcacaccatgtgggctatatgttccttggcgaggtggcactaggcagagagcatcacatcaacactgacaacccaagcttaaaatccccgcctcctggcttcgacagcgtcatcgcacgcggacacacagagcctgacccaacccaggacaccgaattggagttggatggccaacaagtggttgtacctcagggccaaccagttccttgtcccgagttttctagttctaccttctctcagagcgaatatctgatctaccaggaatcgcagtgtcggctgagatacttactcgaggtgcatctgtag

SEQ ID NO: 156526 - DNA, 1602 bp, Artificial Sequence
  derived and/or modified sequence
atggcaccaaagcccaaaccatgggtacagacggaaggcccagaaaagaagaagggcagacaggctggcagagaggaagatccttttcgctcaacagccgaggcacttaaggctatcccagcagagaagaggatcattagagtcgatcctacctgtcccctgtcgagtaatccagggacccaagtgtacgaggactataactgtactttgaaccagaccaacatcgagaataacaataacaagttttacatcatacagcttttgcaagactctaatagattcttcacatgctggaatcattggggaagagttggcgaagtaggacagtcaaaaattaaccactttaccaggctcgaggacgctaagaaagactttgagaaaaaatttagagaaaaaacgaaaaacaactgggcagagagggatcattttgtgagccatcctgggaaatacacgctgattgaagtacaggcggaagacgaggcacaggaagcggtggtcaaggtggatcggggaccagtccgaaccgtgaccaaacgagtgcagccttgcagcttggaccctgctacccagaagctgattaccaacattttttcaaaagaaatgttcaagaacactatggcccttatggatctcgacgtgaagaagatgcccctcggaaagttgtccaaacagcagattgctagaggattcgaggccttggaggcgctagaagaggccctcaagggcccaacagatgggggacaatctctggaggagttgtcatcccacttctacaccgtcattcctcacaatttcggtcacagccagccacctcccataaatagtcctgagttgctgcaggccaaaaaggatatgcttctggtgttggcagacatcgagctggctcaggccctgcaagccgtgtccgagcaggaaaagaccgtggaggaagtcccccaccccctggatcgcgactaccagctgctcaagtgccaacttcagttgttagattctggtgcccctgagtataaggtgattcagacttacctcgaacagacagggtctaatcatcgctgcccaacccttcagcacatatggaaagtgaaccaggaaggggaagaagataggtttcaggcacattccaaactcggcaaccggaaactcctttggcatgggacgaacatggccgtggtagccgcaattctgacctcgggcttgcggatcatgcctcattccggtggaagggtggggaaaggcatctactttgcctcagaaaacagcaagagcgctgggtacgtgattgggatgaagtgtggagcacaccacgttggctatatgtttttaggtgaggttgccctcggacgagaacatcacatcaataccgacaatccttcattaaaatctcccccaccaggtttcgacagtgtcatcgccaggggccacaccgagcccgaccccacccaggacaccgagttggagctcgatggtcaacaggttgtggtgcctcagggccaacctgtgccctgtcctgagttcagcagtagcactttcagccagagcgaatacctgatctaccaggagtcccaatgtcgcctgcgatacttgctggaggttcacctgtag

SEQ ID NO: 156527 - DNA, 999 bp, Artificial Sequence
  derived and/or modified sequence
atggcccctaagcctaagccttgggtccagaccgagggtccagaaaaaaagaaaggccgtcaggctggtcgggaagaggatccgtttaggagcactgccgaggctctgaaagctattccagctgagaaacgcataatcagggttgatcctacgtgtccgctttccagcaaccctggcacccaggtttacgaggactacaattgtactctcaatcagacaaatatagagaacaataacaataagttttatataatccagttgcttcaggactctaatcgtttcttcacttgttggaatcactggggaagggtgggtgaggtgggccagtccaagattaaccatttcacgcgcctggaggacgccaagaaagattttgagaagaagttccgcgagaagacaaaaaataactgggcagaacgcgaccacttcgtcagtcatccaggaaagtatacccttatcgaggtgcaggcagaggatgaggcgcaggaggctgttgtcaaggtggacaggggccctgtgaggacagtcacaaaacgtgtgcaaccctgctccctggaccctgccacccagaagctcatcacgaacatctttagcaaggaaatgtttaaaaatactatggccctgatggacctggacgtaaaaaagatgcctctgggcaagctgagtaagcagcaaatcgctcgtggattcgaggctctcgaggcccttgaagaggctctaaaggggccaaccgatggcggtcagtctcttgaagagttgtcaagccatttttataccgtgattccccacaacttcggacacagccaaccacctcctatcaacagccctgagttgctccaagctaagaaggatatgctccttgtactggccgacattgagctagctcaggctttgcaggcggtttcagagcaggagaaaaccgtcgaggaagtacctcatcccctggacagagattaccagctattgaaatgtcagctccagctgcttgactctggttag

SEQ ID NO: 156528 - DNA, 446 bp, Artificial Sequence
  derived and/or modified sequence
agaaggctgcaaggagtcctgtgggaggccctggggtcttattagttgaaggaaacaaatcatcatacctttaatactggctccaatttgcccctttcatgagtagtcttggagagataattgctaatctggaatggacatacttcttgatcttggttggcatttttcaaactgtgatgaagacactttttatagccctgttcagaatacagaaggagacctactcttctttgatcacaatctaaagacagacagaggacatgtggaaagatctgtcatggattaaatataaacaaaaatgaagcaagaaacaaaactagtctttcaatgaaaagctgaagatgctgaagaagaaatgcaaaatcatttcacaagaaaaacaaaatcagaccaggatcacttggcgtaccatcctagcaaaatatatcttcttggagttgccctga

SEQ ID NO: 156529 - protein, 399 aa, Artificial Sequence
  derived and/or modified sequence
MCVQNCGPSFQSLIVKKEFVKENLVKLLNPRYNLPLDIQNRILNFIKTWSQGFPGGVDVSEVKEVYLDLVKKGVQFPPSEAEAETARQETAQISSNPPTSVPTAPALSSVIAPKNSTVTLVPEQIGKLHSELDMVKMNVRVMSAILMENTPGSENHEDIELLQKLYKTGREMQERIMDLLVVVENEDVTVELIQVNEDLNNAILGYERFTRNQQRILEQNKNQKEATNTTSEPSAPSQDLLDLSPSPRMPRATLGELNTMNNQLSGLNFSLPSSDVTNNLKPSLHPQMNLLALENTEIPPFAQRTSQNLTSSHAYDNFLEHSNSVFLQPVSLQTIAAAPSNQSLPPLPSNHPAMTKSDLQPPNYYEVMEFDPLAPAVTTEAIYEEIDAHQHKGAQNDGD

SEQ ID NO: 156530 - protein, 476 aa, Artificial Sequence
  derived and/or modified sequence
MAFGKSHRDPYATSVGHLIEKATFAGVQTEDWGQFMHICDIINTTQDGPKDAVKALKKRISKNYNHKEIQLTLSLIDMCVQNCGPSFQSLIVKKEFVKENLVKLLNPRYNLPLDIQNRILNFIKTWSQGFPGGVDVSEVKEVYLDLVKKGVQFPPSEAEAETARQETAQISSNPPTSVPTAPALSSVIAPKNSTVTLVPEQIGKLHSELDMVKMNVRVMSAILMENTPGSENHEDIELLQKLYKTGREMQERIMDLLVVVENEDVTVELIQVNEDLNNAILGYERFTRNQQRILEQNKNQKEATNTTSEPSAPSQDLLDLSPSPRMPRATLGELNTMNNQLSGLNFSLPSSDVTNNLKPSLHPQMNLLALENTEIPPFAQRTSQNLTSSHAYDNFLEHSNSVFLQPVSLQTIAAAPSNQSLPPLPSNHPAMTKSDLQPPNYYEVMEFDPLAPAVTTEAIYEEIDAHQHKGAQNDGD

SEQ ID NO: 156531 - protein, 364 aa, Artificial Sequence
  derived and/or modified sequence
MCVQNCGPSFQSLIVKKEFVKENLVKLLNPRYNLPLDIQNRILNFIKTWSQGFPGGVDVSEVKEVYLDLVKKGVQFPPSEAEAETARQEIGKLHSELDMVKMNVRVMSAILMENTPGSENHEDIELLQKLYKTGREMQERIMDLLVVVENEDVTVELIQVNEDLNNAILGYERFTRNQQRILEQNKNQKEATNTTSEPSAPSQDLLDLSPSPRMPRATLGELNTMNNQLSGLNFSLPSSDVTNNLKPSLHPQMNLLALENTEIPPFAQRTSQNLTSSHAYDNFLEHSNSVFLQPVSLQTIAAAPSNQSLPPLPSNHPAMTKSDLQPPNYYEVMEFDPLAPAVTTEAIYEEIDAHQHKGAQNDGD

SEQ ID NO: 156532 - DNA, 1431 bp, Artificial Sequence
  derived and/or modified sequence
atggccttcggcaagagccacagagacccctacgccaccagcgtgggccacctgatcgagaaggccaccttcgccggcgtgcagaccgaggactggggccagttcatgcacatctgcgacatcatcaacaccacccaggacggccccaaggacgccgtgaaggccctgaagaagagaatcagcaagaactacaaccacaaggagatccagctgaccctgagcctgatcgacatgtgcgtgcagaactgcggccccagcttccagagcctgatcgtgaagaaggagttcgtgaaggagaacctggtgaagctgctgaaccccagatacaacctgcccctggacatccagaacagaatcctgaacttcatcaagacctggagccagggcttccccggcggcgtggacgtgagcgaggtgaaggaggtgtacctggacctggtgaagaagggcgtgcagttcccccccagcgaggccgaggccgagaccgccagacaggagaccgcccagatcagcagcaacccccccaccagcgtgcccaccgcccccgccctgagcagcgtgatcgcccccaagaacagcaccgtgaccctggtgcccgagcagatcggcaagctgcacagcgagctggacatggtgaagatgaacgtgagagtgatgagcgccatcctgatggagaacacccccggcagcgagaaccacgaggacatcgagctgctgcagaagctgtacaagaccggcagagagatgcaggagagaatcatggacctgctggtggtggtggagaacgaggacgtgaccgtggagctgatccaggtgaacgaggacctgaacaacgccatcctgggctacgagagattcaccagaaaccagcagagaatcctggagcagaacaagaaccagaaggaggccaccaacaccaccagcgagcccagcgcccccagccaggacctgctggacctgagccccagccccagaatgcccagagccaccctgggcgagctgaacaccatgaacaaccagctgagcggcctgaacttcagcctgcccagcagcgacgtgaccaacaacctgaagcccagcctgcacccccagatgaacctgctggccctggagaacaccgagatcccccccttcgcccagagaaccagccagaacctgaccagcagccacgcctacgacaacttcctggagcacagcaacagcgtgttcctgcagcccgtgagcctgcagaccatcgccgccgcccccagcaaccagagcctgccccccctgcccagcaaccaccccgccatgaccaagagcgacctgcagccccccaactactacgaggtgatggagttcgaccccctggcccccgccgtgaccaccgaggccatctacgaggagatcgacgcccaccagcacaagggcgcccagaacgacggcgactag

SEQ ID NO: 156533 - DNA, 1431 bp, Artificial Sequence
  derived and/or modified sequence
atggctttcggcaaatcgcaccgcgacccttacgccacttcagtggggcatctgatagaaaaggcaacattcgccggcgtgcagactgaagactggggccagtttatgcacatttgtgacatcatcaatactacccaggatggccccaaggacgccgtgaaggcactgaaaaagaggatcagtaagaattacaaccacaaagaaatccagttaacgttatctctgatcgatatgtgcgtacagaactgcggacctagcttccagagtctaatcgtgaagaaggaatttgtgaaagagaatttagtcaaactgctaaacccacgctacaaccttccgcttgacattcagaaccgcattctcaacttcatcaagacttggtctcaaggattccccggcggagtggatgtgtccgaagtcaaggaagtttatctcgatcttgtcaagaaaggcgtccagtttcctccatcggaggctgaagcagagacagcaaggcaggagactgctcagataagttcaaaccccccaacctcagtgcctaccgctcccgcattgtcttcggtgattgcgccgaagaattccacggtcacattggtacccgaacagatcggtaaactccattccgaactggacatggtgaaaatgaacgtcagagtaatgagcgcaatcctaatggagaatacccctggatcggaaaaccacgaagatatagaacttctgcaaaagctgtataagacagggcgcgagatgcaagagcgcattatggatctccttgtcgtcgtggaaaatgaggacgtgaccgttgagctgatccaagtgaacgaggacctcaataatgcaatccttggatacgaaagattcacaaggaaccaacagaggattcttgagcaaaacaagaaccagaaagaggccacaaacaccacctcagagcccagcgctcccagccaggacctgctggacttgtcaccttccccgaggatgccaagagctacactgggtgaactcaatactatgaacaaccagctgtcaggtctgaatttctcgcttcccagcagtgacgtcaccaacaatctcaaaccttccctgcacccccagatgaacctcctggccttagaaaacacagaaatccctccttttgcacagaggacctcacaaaacctcacctcctcgcatgcatacgacaactttctagagcactctaactccgtgtttctgcagcctgtctcgcttcagacgatagctgcagctccctcaaatcagagtttgcccccgttgccctccaatcacccagccatgacaaagagcgatctgcagcctccaaactactatgaggttatggaatttgaccccctcgctcctgctgtgacgactgaggcgatctatgaagaaatcgacgcccatcagcacaaaggcgcacagaacgatggtgattag

SEQ ID NO: 156534 - DNA, 1431 bp, Artificial Sequence
  derived and/or modified sequence
atggctttcggaaagtcccatcgagatccctatgctacttcagtgggacacctcatcgagaaggcaacttttgcgggagtgcagacagaagattggggacagttcatgcacatatgcgatatcataaatactacgcaggatgggcccaaagatgcggttaaagctttgaaaaaacgcatttctaaaaattacaaccataaggagatccagctgacgttgagtctaattgatatgtgtgtccagaactgtggcccttcctttcaatcactgattgttaagaaggagtttgtcaaagagaatttggttaagctccttaatccgcgttacaatctgcctctagacatacagaataggattttgaactttattaaaacgtggagtcaaggctttcctggaggggtggacgtgagcgaggtcaaggaggtgtacttggacctagtgaagaagggggtgcagttcccccctagtgaagcggaagcggaaacggctcgccaggaaactgctcagatttcgtctaacccgcccacatctgtgccaacagcccccgccctatcatcagtaatcgcccctaagaattccacggttacattagttcccgaacagatcgggaagctgcactcagagcttgacatggtcaagatgaacgttcgcgtgatgagcgctatcctgatggagaacacaccagggagcgagaaccatgaagatattgagctcctgcagaaactgtacaagactggccgggaaatgcaggagcggatcatggacttgctggtggtggtcgaaaatgaggacgtcactgtggagcttatccaggtgaacgaggacttaaataatgcaatccttggctacgaaagattcacaaggaaccagcagaggatcctggaacagaataagaatcagaaggaggctactaatacgacttctgagcccagcgccccttcccaggacctcttagacctgtcaccctctcctcggatgccccgagccacactgggtgaactcaataccatgaataaccagctgtccggtctcaacttctcactacccagctcagacgtcacgaacaacctgaaacccagcctccacccccagatgaatctcctggccctcgaaaacactgaaatacctcccttcgcccagaggacctcacagaacctcactagctcacacgcgtacgacaatttcttagagcactcgaactcagtgttcctccagcctgtcagcttgcagaccatcgcggccgctcccagcaaccagtctctgccacccctcccttcaaaccaccccgccatgaccaaatccgacctgcagcctcctaactactacgaagtgatggaatttgacccgctggcacccgcagtgacgaccgaggctatctacgaggaaattgatgcccaccaacataagggagctcagaacgacggggattag

SEQ ID NO: 156535 - DNA, 1431 bp, Artificial Sequence
  derived and/or modified sequence
atggccttcggcaagagccaccgggacccctatgccacctctgtgggccacctgattgagaaggccacctttgctggggtgcagacagaggactggggccagttcatgcacatctgtgacatcatcaacaccacccaggacggccccaaggatgctgtgaaggccctgaagaagaggatcagcaagaactacaaccacaaggagatccagctgaccctgagcctgattgacatgtgtgtgcagaactgtggccccagcttccagagcctgattgtgaagaaggagtttgtgaaggagaacctggtgaagctgctgaacccccgctacaacctgcccctggacatccagaaccgcatcctgaacttcatcaagacctggagccagggcttccctggaggagtggatgtgtctgaggtgaaggaggtgtacctggacctggtgaagaagggcgtgcagttcccccccagcgaggccgaggccgagacagcccggcaggagacagcccagatcagcagcaacccccccacctctgtgcccacagccccagccctgagcagcgtcatcgcccccaagaacagcacagtgaccctggtgcctgagcagatcggcaagctgcacagcgagctggacatggtgaagatgaatgtgcgggtgatgtctgccatcctgatggagaacaccccaggctctgaaaatcatgaggacatcgagctgctgcagaagctgtacaagacaggccgggagatgcaggagcgcatcatggacctgctggtggtggtggagaatgaagatgtgacagtggagctgatccaggtgaatgaagacctgaacaatgccatcctgggctatgagcgcttcaccaggaaccagcagaggatcctggagcagaacaagaaccagaaggaggccaccaacaccaccagcgagcccagcgcccccagccaggacctgctggacctgagccccagccccaggatgccccgggccaccctgggggagctgaacaccatgaacaaccagctgagcggcctgaacttcagcctgcccagcagtgatgtgaccaacaacctgaagcccagcctgcacccccagatgaacctgctggccctggagaacacagagatccccccatttgcccagaggaccagccagaacctgaccagcagccacgcctatgacaacttcctggagcacagcaacagcgtcttcctgcagcctgtgtccctgcagaccatcgccgccgcccccagcaaccagagcctgccccccctgcccagcaaccacccagccatgaccaagagtgacctgcagccccccaactactatgaggtgatggagtttgaccccctggccccagctgtgaccacagaggccatctatgaggagattgatgcccaccagcacaagggggcccagaatgatggagactag

SEQ ID NO: 156536 - DNA, 1431 bp, Artificial Sequence
  derived and/or modified sequence
atggccttcggcaagagccaccgggacccctacgccaccagcgtgggtcacctcattgagaaggccacgtttgcgggggtccagactgaggactggggccagtttatgcacatttgcgacatcataaacacaactcaggacggtcccaaggatgctgttaaggctctcaagaaaaggatttctaagaactacaatcacaaagagattcagctaacactgtccctgatcgatatgtgtgtgcagaactgtggtcctagtttccagtcgctaatcgtcaagaaggaatttgttaaagagaatctcgtgaagctgttaaatccacgttataacctgcctttagatatccaaaaccggattcttaattttatcaagacttggagccaggggttcccaggcggtgtcgatgtttcggaagtgaaggaagtgtacttggatctggtaaaaaaaggagtgcaatttccaccctcagaagcggaagcagagactgccaggcaggagaccgcccagatttcctccaatccacctacgagcgtccccaccgcaccagccttgtcatcggtcattgctcccaaaaacagcaccgttaccttggtacctgaacagattggcaaactccactccgagttggatatggtaaagatgaacgtcagggttatgagcgccatactgatggagaatactcccgggtcagaaaatcacgaggacatcgagcttctgcaaaaactgtacaagactgggcgcgaaatgcaggaacggatcatggatttgctggtggtagtggagaacgaagatgtaacagtggagttgattcaggtaaatgaggatctgaacaatgctatcctcggttacgagaggtttacccgaaatcagcaaaggatcttagagcagaacaagaatcaaaaagaggcaaccaacaccacatccgagccgagcgctccatcacaggacctccttgacttaagcccctcacccaggatgccaagggcaactttgggggagctaaacactatgaataatcagctgtctggcttgaacttttcccttccaagcagtgacgtgacaaataacctcaaacctagcctccacccgcagatgaacttgctggccctggagaacactgagatcccgccatttgctcagagaacaagccagaatttgacttcctcccacgcgtacgacaatttcctggaacactccaattcagtgttcttacagccagttagcttgcaaacgatcgcggccgctccctccaatcaatctctgccccccctaccttcgaaccatcccgccatgacaaaatcagatctgcagcctcctaattattatgaggttatggaattcgaccctctcgctccagcggtcactaccgaggcaatctacgaagaaatagacgcccaccagcataagggcgcacagaatgatggagattag

SEQ ID NO: 156537 - DNA, 1431 bp, Artificial Sequence
  derived and/or modified sequence
atggccttcggcaagagccaccgggacccctacgccaccagcgtgggacatctgatagaaaaggctacgtttgcaggggtccaaaccgaggattggggccaattcatgcatatatgtgacattatcaacaccactcaagatggtccgaaggacgccgtgaaggccctgaaaaaacgcatttccaagaattataaccacaaagaaattcagcttacgctttctttgattgacatgtgcgtgcagaattgtggaccctcatttcagtcactgattgtcaaaaaagaattcgtgaaggagaacctagtaaaactactcaaccctaggtataaccttccgcttgacatccaaaataggatcctgaattttattaagacctggtctcaggggttccccggaggagtggatgtatcggaggtgaaggaagtatatctcgacttggtgaaaaaaggcgtccagtttcctccttctgaagctgaggccgagaccgcccgccaggagaccgcacagatcagctctaatccacctacatcggttcctactgcaccagccttatctagcgtgatcgcacccaaaaattcgaccgtgactctcgtaccagagcagatcggaaagctccactcagaactggatatggtgaagatgaatgtacgcgtgatgagcgcaatcttgatggaaaatacccccggcagtgaaaatcacgaggacattgagcttctgcaaaagctgtacaaaaccggacgcgaaatgcaggaacgcattatggacctgttggtagtggtcgaaaacgaagatgtcaccgtggagttgatccaggttaatgaagatcttaacaacgctattctcggctatgagcgtttcacccgtaatcagcagcgcatcttggaacagaataaaaatcagaaggaagccacaaatactacctctgagccttctgccccctcacaggacttactggatttgagtcctagtcccaggatgcccagagcaacactgggcgagctgaacacaatgaataaccagctctccgggttgaacttttcactaccgagctccgacgtcaccaacaaccttaagccgtctctgcatccccaaatgaatttgttggccctggagaacaccgaaatccctccgtttgcccagaggacatcccaaaacctgaccagttcccatgcatatgacaacttcctggaacactctaatagtgtgttcttacagcccgtgtcgttgcagactatcgcagcagctccatccaaccagagcttgccgcctctgccctcaaaccaccctgcaatgacaaaatccgatttacagcctccgaactattacgaggtaatggagtttgaccctctcgctcccgccgttaccaccgaagccatttatgaggaaatcgacgcccaccagcataagggagcccagaacgatggcgactag

SEQ ID NO: 156538 - DNA, 1431 bp, Artificial Sequence
  derived and/or modified sequence
atggccttcggcaagagccacagagacccgtacgcaacgagcgtaggtcatctgatcgagaaagcaacttttgctggtgtgcaaactgaagattggggtcagtttatgcacatatgtgacatcatcaacacgacgcaggatggacctaaagatgcggtgaaagctctgaagaagcggatctcaaagaactacaaccataaggaaattcagttgaccctgtcgctgatcgacatgtgcgtgcagaactgtggaccgtcatttcagagcttaatcgttaagaaagagttcgttaaggaaaacctggtgaagttgttgaaccctcggtacaatctgcccctcgatatccagaatcgcatattaaatttcatcaagacttggagtcagggcttcccgggaggagtggacgtatcggaggtgaaggaggtatatctcgatctcgttaaaaaaggcgttcagttcccaccctcggaagccgaggccgaaaccgctagacaagagaccgctcagattagctcaaatccccctacctcagtgcccaccgcccctgctctgagctctgtgatagcaccgaaaaattcaaccgtgacactagtgcctgaacagattggcaagctgcactctgaactcgacatggtgaagatgaacgtgcgggtgatgagcgcgatcctgatggaaaatactcccggatcagagaaccacgaggatatagagctcctgcagaaactgtacaagacaggtagagagatgcaagagcgaattatggacttgctggtcgtcgtggaaaatgaagacgtgaccgtggaactgattcaagtcaatgaggatttgaacaatgctattcttgggtatgagcgctttactcggaatcagcagcggatcctggagcaaaataagaaccaaaaggaggccaccaatacaacttcggaacctagtgccccatcgcaagacctgctagatctgtccccctcaccccgaatgccaagggcaacccttggagagttaaacactatgaataaccaactatctggactgaatttttcactgccaagctcagatgtgacaaacaatctcaagcctagtttacatccccagatgaatttgctcgccctggaaaacacagagatcccgccattcgcacagaggacttctcaaaatctaacatcctctcacgcttatgacaactttctggagcactctaactctgtgttccttcagccagtcagcctgcagacaatcgccgcagcaccaagtaaccagtcactgccaccactgcccagtaatcatcctgcaatgacaaaatcagacctccagcccccaaattattatgaggtcatggaatttgacccgttggccccagccgtgaccaccgaagccatctatgaagagatcgacgcacatcagcataaaggagcgcagaacgacggagactag

SEQ ID NO: 156539 - DNA, 1431 bp, Artificial Sequence
  derived and/or modified sequence
atggcctttggcaaatcacatagggatccttatgctacttctgtgggccacctgattgagaaggcgacctttgccggagtgcagacggaggattggggacagttcatgcacatttgcgatattattaacactacccaggacggccctaaagacgctgtgaaggctttaaaaaaaaggatctccaagaattacaatcacaaagaaattcagctaaccctgtcactcatcgatatgtgtgtgcagaattgtggcccttcgttccagtcactgatcgtcaaaaaggaatttgtgaaagaaaaccttgtcaaactcctcaacccgaggtacaacctgcccctggatattcagaacaggatactgaactttattaaaacttggtcccagggattccctggtggggtggatgtgagcgaagtgaaagaggtttatctggatctggtgaagaagggagttcaatttcctcccagcgaagctgaagcagaaacagctaggcaagaaaccgcccagatatcgagtaatccccctactagcgtccctaccgccccagccctgtcaagcgttatcgcgccaaaaaatagcactgttaccctggtccccgagcagattggcaagttgcacagcgagttggacatggtgaagatgaatgttcgcgtgatgtccgcaattctaatggagaacacaccgggatccgagaatcatgaagacatcgagctgcttcagaagctgtacaagaccggccgtgaaatgcaggagagaataatggatctgcttgttgtggtggaaaacgaagacgtcaccgtcgagctcattcaggtgaatgaagacctgaacaatgccatccttggctatgagcgctttactaggaaccagcagcgcatcctggagcaaaataagaaccaaaaagaggctacaaacaccacctccgagccaagcgccccatcccaagacctcctggacctgtccccgagccccaggatgccccgagccacccttggggaactcaacacaatgaacaaccaactgtcaggactgaactttagcctgcccagcagcgatgtcactaacaatctgaagcccagcctacacccccaaatgaacttgctggctctcgagaacaccgaaattcctccttttgctcagagaacctctcagaatctaacctcctcccacgcctatgacaacttcctagagcacagcaactctgtatttttgcagcccgtgagccttcagacaattgcggcagctccttccaatcaatcgctgccaccattacctagtaatcacccagcaatgacaaagtcggatttgcaaccgcctaattactatgaagtgatggagtttgaccccctcgctccggctgtgacaaccgaggcaatatatgaagaaatcgacgcacaccagcacaaaggcgcacagaacgacggtgattag

SEQ ID NO: 156540 - DNA, 1849 bp, Artificial Sequence
  derived and/or modified sequence
cctctggcgctaccatggcgtttggcaagagtcaccgggatccctacgcgacctccgtgggccacctcataggccaaaagatgcagtgaaagctttgaagaaaaggatttccaaaaactacaatcataaagaaatccaacttaccttgtcacttattgacatgtgtgtgcagaactgtggtccaagtttccagtctctgattgtgaagaaggaatttgttaaagagaatttagttaagctactgaatcccagatacaacttgccattagacattcagaatagaatcttgaatttcattaagacttggtcacagggcttcccaggaggtgtggatgtaagcgaagtcaaagaagtatacctcgacctggttaagaaaggcgttcagtttcctccctcagaagcagaggctgaaacagcaagacaagagactgctcaaatctcatcaaatcctccaacatctgtccctactgcaccagctctttcttctgtaattgctccaaagaactcgactgttacattggtcccagaacagattggaaaactgcacagtgaattggatatggtgaaaatgaatgtgcgagtgatgtccgccatattgatggagaatactcctgggtctgaaaaccatgaagacatagagcttctgcagaaactctataaaacaggtcgggagatgcaggagaggatcatggacctgcttgtggtggtggagaacgaagatgtaactgttgagctaattcaggtgaatgaggatttgaataatgctatccttggatatgagaggtttactagaaaccaacaaaggattttggagcaaaataagaaccagaaggaagccaccaatactaccagtgagccttctgccccatctcaagatctcctcgacctaagtcccagtccccggatgcctagggccactctgggagaactcaacaccatgaataatcaactttcaggcttaaatttcagccttccaagttctgatgtaacaaacaacttaaaacccagtcttcatccacagatgaacttgctagccttggagaatacagagatacccccgtttgcccaaaggaccagccaaaacctcacctcaagccacgcatatgataattttctggaacattcaaattcagtgtttctacagccagttagtctacaaaccattgcagcagcaccatcaaaccagagtctgccacctttgcccagcaatcatccagcgatgacaaaaagtgatctccagccacctaattactacgaggtaatggagtttgatcccttagctcctgctgtcactacagaagctatttatgaagaaattgatgctcaccagcacaaaggagctcaaaatgatggtgactgagaagaaagtggatgatcagctcactaccacatcaaaggtgccaactctctaaaacgtagactctgtgcagctttgaagcctggaagacaatacctaccaacatgtcaaagccatggtggcacatttctgctataatgaagattaaatagaataacagttccaggataacactgattcctgacaacagcgtgagatttcaacagaacttgtttggaacaaatactcacttaaaacttcagcagaagaaaaattacttagtccttaggccaaccaatttaactgcagtgtcatgtttcacaggccttcctacatttagaaatcgtcacacagctgtgataagagtagattattttactatgaaataattctgaatagatgaaagcataaaatgtgagaaactgaatgtattattcaggaagaatactgagtgccttcatttaactaaagttgaatgtaaaagtcaatttgcacttctttataatcctctgg

SEQ ID NO: 156541 - DNA, 2340 bp, Artificial Sequence
  derived and/or modified sequence
cagctcctcacgctcggtgcccgcgccccgcagcggcagcgcagaacgcaccgcctctgccagagcccgggaagcgctcgggcgaagaggaggagccaagggtaccgagcgggtggagtcgggagccggagagcggtggaggcggatttcctgggcccggccctctggcgctaccatggcgtttggcaagagtcaccgggatccctacgcgacctccgtgggccacctcatagaaaaggctacatttgctggagttcagactgaagattggggccagttcatgcacatctgtgacataattaacactacccaggatgggccaaaagatgcagtgaaagctttgaagaaaaggatttccaaaaactacaatcataaagaaatccaacttaccttgtcacttattgacatgtgtgtgcagaactgtggtccaagtttccagtctctgattgtgaagaaggaatttgttaaagagaatttagttaagctactgaatcccagatacaacttgccattagacattcagaatagaatcttgaatttcattaagacttggtcacagggcttcccaggaggtgtggatgtaagcgaagtcaaagaagtatacctcgacctggttaagaaaggcgttcagtttcctccctcagaagcagaggctgaaacagcaagacaagagactgctcaaatctcatcaaatcctccaacatctgtccctactgcaccagctctttcttctgtaattgctccaaagaactcgactgttacattggtcccagaacagattggaaaactgcacagtgaattggatatggtgaaaatgaatgtgcgagtgatgtccgccatattgatggagaatactcctgggtctgaaaaccatgaagacatagagcttctgcagaaactctataaaacaggtcgggagatgcaggagaggatcatggacctgcttgtggtggtggagaacgaagatgtaactgttgagctaattcaggtgaatgaggatttgaataatgctatccttggatatgagaggtttactagaaaccaacaaaggattttggagcaaaataagaaccagaaggaagccaccaatactaccagtgagccttctgccccatctcaagatctcctcgacctaagtcccagtccccggatgcctagggccactctgggagaactcaacaccatgaataatcaactttcaggcttaaatttcagccttccaagttctgatgtaacaaacaacttaaaacccagtcttcatccacagatgaacttgctagccttggagaatacagagatacccccgtttgcccaaaggaccagccaaaacctcacctcaagccacgcatatgataattttctggaacattcaaattcagtgtttctacagccagttagtctacaaaccattgcagcagcaccatcaaaccagagtctgccacctttgcccagcaatcatccagcgatgacaaaaagtgatctccagccacctaattactacgaggtaatggagtttgatcccttagctcctgctgtcactacagaagctatttatgaagaaattgatgctcaccagcacaaaggagctcaaaatgatggtgactgagaagaaagtggatgatcagctcactaccacatcaaaggtgccaactctctaaaacgtagactctgtgcagctttgaagcctggaagacaatacctaccaacatgtcaaagccatggtggcacatttctgctataatgaagattaaatagaataacagttccaggataacactgattcctgacaacagcgtgagatttcaacagaacttgtttggaacaaatactcacttaaaacttcagcagaagaaaaattacttagtccttaggccaaccaatttaactgcagtgtcatgtttcacaggccttcctacatttagaaatcgtcacacagctgtgataagagtagattattttactatgaaataattctgaatagatgaaagcataaaatgtgagaaactgaatgtattattcaggaagaatactgagtgccttcatttaactaaagttgaatgtaaaagtcaatttgcacttctttataatcctctggtttagaattataaattgttaaaaccttgataattgtcatttaattatatttcaggtgtcctgaacaggtcactagactctacattgggcagcctttaaatatgattctttgtaatgctaaatagcctttttttctctttttactgcaacttaatatttctatttagaacacagaaaatgaaaatatttagaataagttgtacatttgatgacaaataaatcactattaaaacaatttaatacttt

SEQ ID NO: 156542 - DNA, 1522 bp, Artificial Sequence
  derived and/or modified sequence
ctctggcgctaccatggcgtttggcaagagtcaccgggatccctacgcgacctccgtgggccacctcatagcttattgacatgtgtgtgcagaactgtggtccaagtttccagtctctgattgtgaagaaggaatttgttaaagagaatttagttaagctactgaatcccagatacaacttgccattagacattcagaatagaatcttgaatttcattaagacttggtcacagggcttcccaggaggtgtggatgtaagcgaagtcaaagaagtatacctcgacctggttaagaaaggcgttcagtttcctccctcagaagcagaggctgaaacagcaagacaagagactgctcaaatctcatcaaatcctccaacatctgtccctactgcaccagctctttcttctgtaattgctccaaagaactcgactgttacattggtcccagaacagattggaaaactgcacagtgaattggatatggtgaaaatgaatgtgcgagtgatgtccgccatattgatggagaatactcctgggtctgaaaaccatgaagacatagagcttctgcagaaactctataaaacaggtcgggagatgcaggagaggatcatggacctgcttgtggtggtggagaacgaagatgtaactgttgagctaattcaggtgaatgaggatttgaataatgctatccttggatatgagaggtttactagaaaccaacaaaggattttggagcaaaataagaaccagaaggaagccaccaatactaccagtgagccttctgccccatctcaagatctcctcgacctaagtcccagtccccggatgcctagggccactctgggagaactcaacaccatgaataatcaactttcaggcttaaatttcagccttccaagttctgatgtaacaaacaacttaaaacccagtcttcatccacagatgaacttgctagccttggagaatacagagatacccccgtttgcccaaaggaccagccaaaacctcacctcaagccacgcatatgataattttctggaacattcaaattcagtgtttctacagccagttagtctacaaaccattgcagcagcaccatcaaaccagagtctgccacctttgcccagcaatcatccagcgatgacaaaaagtgatctccagccacctaattactacgaggtaatggagtttgatcccttagctcctgctgtcactacagaagctatttatgaagaaattgatgctcaccagcacaaaggagctcaaaatgatggtgactgagaagaaagtggatgatcagctcactaccacatcaaaggtgccaactctctaaaacgtagactctgtgcagctttgaagcctggaagacaatacctaccaacatgtcaaagccatggtggcacatttctgctataatgaagattaaatagaataacagttccaggataacactgattcctgacaacagcgtgagatttcaacagaacttgtttggaacaaatactcacttaaaacttcagcag

SEQ ID NO: 156543 - DNA, 1526 bp, Artificial Sequence
  derived and/or modified sequence
ccctctggcgctaccatggcgtttggcaagagtcaccgggatccctacgcgacctccgtgggccacctcatagaaaaggctacatttgctggagttcagactgaagattggggccagttcatgcacatctgtgacataattaacactacccaggatggcttattgacatgtgtgtgcagaactgtggtccaagtttccagtctctgattgtgaagaaggaatttgttaaagagaatttagttaagctactgaatcccagatacaacttgccattagacattcagaatagaatcttgaatttcattaagacttggtcacagggcttcccaggaggtgtggatgtaagcgaagtcaaagaagtatacctcgacctggttaagaaaggcgttcagtttcctccctcagaagcagaggctgaaacagcaagacaagagattggaaaactgcacagtgaattggatatggtgaaaatgaatgtgcgagtgatgtccgccatattgatggagaatactcctgggtctgaaaaccatgaagacatagagcttctgcagaaactctataaaacaggtcgggagatgcaggagaggatcatggacctgcttgtggtggtggagaacgaagatgtaactgttgagctaattcaggtgaatgaggatttgaataatgctatccttggatatgagaggtttactagaaaccaacaaaggattttggagcaaaataagaaccagaaggaagccaccaatactaccagtgagccttctgccccatctcaagatctcctcgacctaagtcccagtccccggatgcctagggccactctgggagaactcaacaccatgaataatcaactttcaggcttaaatttcagccttccaagttctgatgtaacaaacaacttaaaacccagtcttcatccacagatgaacttgctagccttggagaatacagagatacccccgtttgcccaaaggaccagccaaaacctcacctcaagccacgcatatgataattttctggaacattcaaattcagtgtttctacagccagttagtctacaaaccattgcagcagcaccatcaaaccagagtctgccacctttgcccagcaatcatccagcgatgacaaaaagtgatctccagccacctaattactacgaggtaatggagtttgatcccttagctcctgctgtcactacagaagctatttatgaagaaattgatgctcaccagcacaaaggagctcaaaatgatggtgactgagaagaaagtggatgatcagctcactaccacatcaaaggtgccaactctctaaaacgtagactctgtgcagctttgaagcctggaagacaatacctaccaacatgtcaaagccatggtggcacatttctgctataatgaagattaaatagaataacagttccaggataacactgattcctgacaacagcgtgagatttcaacagaacttgtttggaacaaatactcacttaaaacttcagcagaagaaaaattacttagtcctta

SEQ ID NO: 156544 - DNA, 2500 bp, Artificial Sequence
  derived and/or modified sequence
aaaagcccacctgggatccgagcgggcggccgcgccactctcgcaggctccatacacccgccactacccgcctgtaccacctgcagccggcagcgcagcctcctcgcgggtcccgcagggcgcgctgcaggtgcgctgggcgtcccgaagccccgccctcgcgtccctgccccgcgcccagctcctcacgctcggtgcccgcgccccgcagcggcagcgcagaacgcaccgcctctgccagagcccgggaagcgctcgggcgaagaggaggagccaagggtaccgagcgggtggagtcgggagccggagagcggtggaggcggatttcctgggcccggccctctggcgctaccatggcgtttggcaagagtcaccgggatccctacgcgacctccgtgggccacctcatagaaaaggctacatttgctggagttcagactgaagattggggccagttcatgcacatctgtgacataattaacactacccaggatgggccaaaagatgcagtgaaagctttgaagaaaaggatttccaaaaactacaatcataaagaaatccaacttaccttgtcacttattgacatgtgtgtgcagaactgtggtccaagtttccagtctctgattgtgaagaaggaatttgttaaagagaatttagttaagctactgaatcccagatacaacttgccattagacattcagaatagaatcttgaatttcattaagacttggtcacagggcttcccaggaggtgtggatgtaagcgaagtcaaagaagtatacctcgacctggttaagaaaggcgttcagtttcctccctcagaagcagaggctgaaacagcaagacaagagactgctcaaatctcatcaaatcctccaacatctgtccctactgcaccagctctttcttctgtaattgctccaaagaactcgactgttacattggtcccagaacagattggaaaactgcacagtgaattggatatggtgaaaatgaatgtgcgagtgatgtccgccatattgatggagaatactcctgggtctgaaaaccatgaagacatagagcttctgcagaaactctataaaacaggtcgggagatgcaggagaggatcatggacctgcttgtggtggtggagaacgaagatgtaactgttgagctaattcaggtgaatgaggatttgaataatgctatccttggatatgagaggtttactagaaaccaacaaaggattttggagcaaaataagaaccagaaggaagccaccaatactaccagtgagccttctgccccatctcaagatctcctcgacctaagtcccagtccccggatgcctagggccactctgggagaactcaacaccatgaataatcaactttcaggcttaaatttcagccttccaagttctgatgtaacaaacaacttaaaacccagtcttcatccacagatgaacttgctagccttggagaatacagagatacccccgtttgcccaaaggaccagccaaaacctcacctcaagccacgcatatgataattttctggaacattcaaattcagtgtttctacagccagttagtctacaaaccattgcagcagcaccatcaaaccagagtctgccacctttgcccagcaatcatccagcgatgacaaaaagtgatctccagccacctaattactacgaggtaatggagtttgatcccttagctcctgctgtcactacagaagctatttatgaagaaattgatgctcaccagcacaaaggagctcaaaatgatggtgactgagaagaaagtggatgatcagctcactaccacatcaaaggtgccaactctctaaaacgtagactctgtgcagctttgaagcctggaagacaatacctaccaacatgtcaaagccatggtggcacatttctgctataatgaagattaaatagaataacagttccaggataacactgattcctgacaacagcgtgagatttcaacagaacttgtttggaacaaatactcacttaaaacttcagcagaagaaaaattacttagtccttaggccaaccaatttaactgcagtgtcatgtttcacaggccttcctacatttagaaatcgtcacacagctgtgataagagtagattattttactatgaaataattctgaatagatgaaagcataaaatgtgagaaactgaatgtattattcaggaagaatactgagtgccttcatttaactaaagttgaatgtaaaagtcaatttgcacttctttataatcctctggtttagaattataaattgttaaaaccttgataattgtcatttaattatatttcaggtgtcctgaacaggtcactagactctacattgggcagcctttaaatatgattctttgtaatgctaaatagcctttttttctctttttactgcaacttaatatttctatttagaacacagaaaatgaaaatatttagaataagttgtacatttgatgacaaataaatcactatt

SEQ ID NO: 156545 - protein, 454 aa, Artificial Sequence
  derived and/or modified sequence
MAPCRARTGPSTWRSATSSTRRRKGARRHLSALQVLETCVKNCGHRFHVLVASQDFVESVLVRTILPKNNPPTIVHDKVLNLIQSWADAFRSSPDLTGVVTIYEDLRRKGLEFPMTDLDMLSPIHTPQRTVFNSETQSGQDSVGTDSSQQEDSGQHAAPLPAPPILSGDTPIAPTPEQIGKLRSELEMVSGNVRVMSEMLTELVPTQAEPADLELLQELNRTCRAMQQRVLELIPQIANEQLTEELLIVNDNLNNVFLRHERFERFRTGQTTKAPSEAEPAADLIDMGPDPAATGNLSSQLAGMNLGSSSVRAGLQSLEASGRLEDEFDMFALTRGSSLADQRKEVKYEAPQATDGLAGALDARQQSTGAIPVTQACLMEDIEQWLSTDVGNDAEEPKGVTSEEFDKFLEERAKAADRLPNLSSPSAEGPPGPPSGPAPRKKTQEKDDDMLFAL

SEQ ID NO: 156546 - protein, 492 aa, Artificial Sequence
  derived and/or modified sequence
MDFLLGNPFSSPVGQRIEKATDGSLQSEDWALNMEICDIINETEEGPKDALRAVKKRIVGNKNFHEVMLALTVLETCVKNCGHRFHVLVASQDFVESVLVRTILPKNNPPTIVHDKVLNLIQSWADAFRSSPDLTGVVTIYEDLRRKGLEFPMTDLDMLSPIHTPQRTVFNSETQSGQDSVGTDSSQQEDSGQHAAPLPAPPILSGDTPIAPTPEQIGKLRSELEMVSGNVRVMSEMLTELVPTQAEPADLELLQELNRTCRAMQQRVLELIPQIANEQLTEELLIVNDNLNNVFLRHERFERFRTGQTTKAPSEAEPAADLIDMGPDPAATGNLSSQLAGMNLGSSSVRAGLQSLEASGRLEDEFDMFALTRGSSLADQRKEVKYEAPQATDGLAGALDARQQSTGAIPVTQACLMEDIEQWLSTDVGNDAEEPKGVTSEEFDKFLEERAKAADRLPNLSSPSAEGPPGPPSGPAPRKKTQEKDDDMLFAL

SEQ ID NO: 156547 - protein, 501 aa, Artificial Sequence
  derived and/or modified sequence
MDFLLGNPFSSPVGQRIEKATDGSLQSEDWALNMEICDIINETEEGPKDALRAVKKRIVGNKNFHEVMLAHSARRHLSALQVLETCVKNCGHRFHVLVASQDFVESVLVRTILPKNNPPTIVHDKVLNLIQSWADAFRSSPDLTGVVTIYEDLRRKGLEFPMTDLDMLSPIHTPQRTVFNSETQSGQDSVGTDSSQQEDSGQHAAPLPAPPILSGDTPIAPTPEQIGKLRSELEMVSGNVRVMSEMLTELVPTQAEPADLELLQELNRTCRAMQQRVLELIPQIANEQLTEELLIVNDNLNNVFLRHERFERFRTGQTTKAPSEAEPAADLIDMGPDPAATGNLSSQLAGMNLGSSSVRAGLQSLEASGRLEDEFDMFALTRGSSLADQRKEVKYEAPQATDGLAGALDARQQSTGAIPVTQACLMEDIEQWLSTDVGNDAEEPKGVTSEEFDKFLEERAKAADRLPNLSSPSAEGPPGPPSGPAPRKKTQEKDDDMLFAL

SEQ ID NO: 156548 - protein, 335 aa, Artificial Sequence
  derived and/or modified sequence
MDFLLGNPFSSPVGQRIEKATDGSLQSEDWALNMEICDIINETEEGPKDALRAVKKRIVGNKNFHEVLETCVKNCGHRFHVLVASQDFVESVLVRTILPKNNPPTIVHDKVLNLIQSWADAFRSSPDLTGVVTIYEDLRRKGLEFPMTDLDMLSPIHTPQRTVFNSETQSGQDSVGTDSSQQEDSGQHAAPLPAPPILSGDTPIAPTPEQIGKLRSELEMVSGNVRVMSEMLTELVPTQAEPADLELLQELNRTCRAMQQRVLELIPQIANEQLTEELLIVNDNLNNVFLRHERFERFRTGQTTKAPSEAEPAADLIDMGPDPAATGNLSSQLAG

SEQ ID NO: 156549 - DNA, 1365 bp, Artificial Sequence
  derived and/or modified sequence
atggccccctgcagagccagaaccggccccagcacctggagaagcgccaccagcagcaccagaagaagaaagggcgccagaagacacctgagcgccctgcaggtgctggagacctgcgtgaagaactgcggccacagattccacgtgctggtggccagccaggacttcgtggagagcgtgctggtgagaaccatcctgcccaagaacaacccccccaccatcgtgcacgacaaggtgctgaacctgatccagagctgggccgacgccttcagaagcagccccgacctgaccggcgtggtgaccatctacgaggacctgagaagaaagggcctggagttccccatgaccgacctggacatgctgagccccatccacaccccccagagaaccgtgttcaacagcgagacccagagcggccaggacagcgtgggcaccgacagcagccagcaggaggacagcggccagcacgccgcccccctgcccgccccccccatcctgagcggcgacacccccatcgcccccacccccgagcagatcggcaagctgagaagcgagctggagatggtgagcggcaacgtgagagtgatgagcgagatgctgaccgagctggtgcccacccaggccgagcccgccgacctggagctgctgcaggagctgaacagaacctgcagagccatgcagcagagagtgctggagctgatcccccagatcgccaacgagcagctgaccgaggagctgctgatcgtgaacgacaacctgaacaacgtgttcctgagacacgagagattcgagagattcagaaccggccagaccaccaaggcccccagcgaggccgagcccgccgccgacctgatcgacatgggccccgaccccgccgccaccggcaacctgagcagccagctggccggcatgaacctgggcagcagcagcgtgagagccggcctgcagagcctggaggccagcggcagactggaggacgagttcgacatgttcgccctgaccagaggcagcagcctggccgaccagagaaaggaggtgaagtacgaggccccccaggccaccgacggcctggccggcgccctggacgccagacagcagagcaccggcgccatccccgtgacccaggcctgcctgatggaggacatcgagcagtggctgagcaccgacgtgggcaacgacgccgaggagcccaagggcgtgaccagcgaggagttcgacaagttcctggaggagagagccaaggccgccgacagactgcccaacctgagcagccccagcgccgagggcccccccggcccccccagcggccccgcccccagaaagaagacccaggagaaggacgacgacatgctgttcgccctgtag

SEQ ID NO: 156550 - DNA, 1479 bp, Artificial Sequence
  derived and/or modified sequence
atggacttcctgctgggcaaccccttcagcagccccgtgggccagagaatcgagaaggccaccgacggcagcctgcagagcgaggactgggccctgaacatggagatctgcgacatcatcaacgagaccgaggagggccccaaggacgccctgagagccgtgaagaagagaatcgtgggcaacaagaacttccacgaggtgatgctggccctgaccgtgctggagacctgcgtgaagaactgcggccacagattccacgtgctggtggccagccaggacttcgtggagagcgtgctggtgagaaccatcctgcccaagaacaacccccccaccatcgtgcacgacaaggtgctgaacctgatccagagctgggccgacgccttcagaagcagccccgacctgaccggcgtggtgaccatctacgaggacctgagaagaaagggcctggagttccccatgaccgacctggacatgctgagccccatccacaccccccagagaaccgtgttcaacagcgagacccagagcggccaggacagcgtgggcaccgacagcagccagcaggaggacagcggccagcacgccgcccccctgcccgccccccccatcctgagcggcgacacccccatcgcccccacccccgagcagatcggcaagctgagaagcgagctggagatggtgagcggcaacgtgagagtgatgagcgagatgctgaccgagctggtgcccacccaggccgagcccgccgacctggagctgctgcaggagctgaacagaacctgcagagccatgcagcagagagtgctggagctgatcccccagatcgccaacgagcagctgaccgaggagctgctgatcgtgaacgacaacctgaacaacgtgttcctgagacacgagagattcgagagattcagaaccggccagaccaccaaggcccccagcgaggccgagcccgccgccgacctgatcgacatgggccccgaccccgccgccaccggcaacctgagcagccagctggccggcatgaacctgggcagcagcagcgtgagagccggcctgcagagcctggaggccagcggcagactggaggacgagttcgacatgttcgccctgaccagaggcagcagcctggccgaccagagaaaggaggtgaagtacgaggccccccaggccaccgacggcctggccggcgccctggacgccagacagcagagcaccggcgccatccccgtgacccaggcctgcctgatggaggacatcgagcagtggctgagcaccgacgtgggcaacgacgccgaggagcccaagggcgtgaccagcgaggagttcgacaagttcctggaggagagagccaaggccgccgacagactgcccaacctgagcagccccagcgccgagggcccccccggcccccccagcggccccgcccccagaaagaagacccaggagaaggacgacgacatgctgttcgccctgtag

SEQ ID NO: 156551 - DNA, 1506 bp, Artificial Sequence
  derived and/or modified sequence
atggacttcctgctgggcaaccccttcagcagccccgtgggccagagaatcgagaaggccaccgacggcagcctgcagagcgaggactgggccctgaacatggagatctgcgacatcatcaacgagaccgaggagggccccaaggacgccctgagagccgtgaagaagagaatcgtgggcaacaagaacttccacgaggtgatgctggcccacagcgccagaagacacctgagcgccctgcaggtgctggagacctgcgtgaagaactgcggccacagattccacgtgctggtggccagccaggacttcgtggagagcgtgctggtgagaaccatcctgcccaagaacaacccccccaccatcgtgcacgacaaggtgctgaacctgatccagagctgggccgacgccttcagaagcagccccgacctgaccggcgtggtgaccatctacgaggacctgagaagaaagggcctggagttccccatgaccgacctggacatgctgagccccatccacaccccccagagaaccgtgttcaacagcgagacccagagcggccaggacagcgtgggcaccgacagcagccagcaggaggacagcggccagcacgccgcccccctgcccgccccccccatcctgagcggcgacacccccatcgcccccacccccgagcagatcggcaagctgagaagcgagctggagatggtgagcggcaacgtgagagtgatgagcgagatgctgaccgagctggtgcccacccaggccgagcccgccgacctggagctgctgcaggagctgaacagaacctgcagagccatgcagcagagagtgctggagctgatcccccagatcgccaacgagcagctgaccgaggagctgctgatcgtgaacgacaacctgaacaacgtgttcctgagacacgagagattcgagagattcagaaccggccagaccaccaaggcccccagcgaggccgagcccgccgccgacctgatcgacatgggccccgaccccgccgccaccggcaacctgagcagccagctggccggcatgaacctgggcagcagcagcgtgagagccggcctgcagagcctggaggccagcggcagactggaggacgagttcgacatgttcgccctgaccagaggcagcagcctggccgaccagagaaaggaggtgaagtacgaggccccccaggccaccgacggcctggccggcgccctggacgccagacagcagagcaccggcgccatccccgtgacccaggcctgcctgatggaggacatcgagcagtggctgagcaccgacgtgggcaacgacgccgaggagcccaagggcgtgaccagcgaggagttcgacaagttcctggaggagagagccaaggccgccgacagactgcccaacctgagcagccccagcgccgagggcccccccggcccccccagcggccccgcccccagaaagaagacccaggagaaggacgacgacatgctgttcgccctgtag

SEQ ID NO: 156552 - DNA, 1365 bp, Artificial Sequence
  derived and/or modified sequence
atggccccttgccgagcccggaccgggccaagcacatggaggtctgcaacttcctcaactaggaggcggaagggcgcaaggagacacctatcagccctccaggtgctggagacctgcgtaaagaattgtgggcaccggtttcacgtgctggttgcctcacaggatttcgtggagtccgtcctggtgcggaccattctgcctaagaacaacccacccacaattgtgcacgataaagtactgaatctgattcagagctgggcagacgcatttcgttcaagcccagacctcacaggcgtggttacaatttacgaggaccttagaagaaagggtctggaatttcctatgactgatttggacatgctgagccccatccatacccctcaacggacagtgtttaactccgaaacacagagtggccaggactccgtaggtacagattcttctcaacaggaggattcgggccagcacgccgccccattaccagcccctccaatcctctccggagacactcctatagcccccactccagagcagatcggcaagctccggagcgaacttgaaatggtgtccggtaatgttagggtgatgtccgagatgttgaccgagctggtgcccacccaggccgaacctgccgatcttgagttgttacaggaacttaacaggacctgcagggctatgcagcagcgcgtactagagctcattcctcagatcgccaacgagcaactcaccgaagagctcctgatcgtcaatgataatttgaataacgtttttctcagacacgagcggtttgagcggttccgaactggtcaaacgactaaggcacccagtgaggcggaaccagcagccgatctgatagacatgggtcccgaccccgcagccaccgggaacctgtcatctcagctagctgggatgaaccttggttctagttctgttagggcaggtctgcagtccctggaggcatctggccggcttgaggacgaattcgatatgttcgcattgacacgaggaagttccctcgcagatcagcgaaaagaggtcaaatacgaggcaccacaggctacagacggcctggccggagccctggatgctaggcaacagagcaccggagcaattccggtcacccaagcttgcctcatggaagacatagaacagtggctgagtactgatgtcgggaatgatgcagaagagcctaaaggagtcacaagcgaggagtttgataaattcttggaagaacgtgctaaagctgccgatcggctcccaaatcttagctccccttcggccgaaggtccccctggccccccctccggtccagctcctaggaagaaaacccaggaaaaggatgacgatatgctgttcgcactgtag

SEQ ID NO: 156553 - DNA, 1479 bp, Artificial Sequence
  derived and/or modified sequence
atggacttcttgctggggaaccctttcagttctcctgtggggcaacggatcgaaaaagcaacggacggcagtctccagtctgaagactgggccctgaacatggaaatctgcgacatcattaatgaaactgaggagggtcccaaagacgcactccgcgcagttaagaaacgcatcgtaggcaacaaaaacttccacgaagtcatgctggctctcacagtactcgagacctgtgtgaaaaattgcggccatcgctttcacgtgctggtggccagccaggatttcgtcgaatccgtgctagtgaggaccatcctgccaaagaataatccacccacgattgttcacgataaagtcctgaacttgatccagtcatgggccgacgccttccgatcctccccagatttgaccggggttgtaacaatctacgaagatcttcggcgcaaggggctagaatttcccatgacagatttggatatgctttcccctatacacaccccacaacgtaccgtgtttaattcagagacgcagagcggtcaagattctgtgggcaccgattccagccagcaggaagatagtggccagcacgccgccccactacctgctcccccgatattgtctggtgacacaccaatcgcacccacccctgaacagatcggcaaactgcgcagtgagctggaaatggtgtccggcaatgttcgagtgatgagcgagatgctgactgagttggtgcccacccaggctgagcctgccgaccttgaactgctgcaggagcttaacagaacttgccgggcaatgcagcagagagtcctcgaattgatacctcagatcgccaatgagcaacttaccgaggagctgctgattgtaaatgataatttgaacaatgttttcctccgacatgagaggttcgagaggttcaggactgggcagacgactaaggcccccagcgaggccgaacccgcagcagatcttattgatatggggcctgatccagcagccacaggcaatcttagctcacaactcgcaggaatgaatctgggaagttcgtctgtacgagctggtctgcagagtctcgaagcatcaggtagactggaagatgaatttgatatgtttgccctcaccaggggcagctctttagctgaccaacgaaaagaggtcaagtatgaggcgccccaagctactgacggcctggccggcgcactcgacgcaaggcaacagtctaccggggctatccccgtgacccaagcatgtcttatggaggatatcgaacagtggctgtccaccgacgtgggaaacgacgctgaggaaccgaagggcgtcacgagcgaggagttcgataaattcttagaggagagagcgaaagccgcggatcgcctgcccaatctctcatccccaagcgccgagggtcctccaggacccccaagcggacccgctcctcgcaaaaagacccaggaaaaggacgacgatatgctgttcgcactctag

SEQ ID NO: 156554 - DNA, 1506 bp, Artificial Sequence
  derived and/or modified sequence
atggacttcctactcgggaacccattctcgagccccgtggggcagagaatcgaaaaggcaacagacggaagcttgcaaagtgaagactgggccctgaatatggagatctgtgacatcatcaatgaaaccgaggagggccctaaggacgcgctgagagcggtgaagaagaggatcgttggtaataaaaattttcatgaagttatgctagcccactcagcaaggagacatctctcggcccttcaggtattagagacttgcgtcaagaactgcggtcatagattccacgtgctggtggccagccaggatttcgtcgagtcggtgctagtccggacaattctgccaaagaacaacccacccaccatcgtccacgacaaagtgctcaatctgattcagtcttgggctgatgccttcagatcaagtcctgatctcaccggggtcgtgacaatctacgaggacttgcgccgcaaagggttggagtttcccatgaccgacctggatatgctgagccccatacacacgccccagcgtactgtctttaatagtgagacacagtccggtcaggactccgtggggacagactcttcacagcaggaggattctggccagcacgccgctccactgcccgcgcctcctattcttagcggggatacaccaatcgcacctaccccagagcagatcgggaagctcagaagcgagctagagatggtaagtggcaatgttagggtcatgtccgagatgctaacggagcttgttcccacccaggccgaaccagctgatctggagctactccaagaactgaatcggacatgtcgggctatgcagcagcgagtcttggagctcattccacaaattgcgaatgagcagctgacagaggaactgctgattgttaatgacaatctcaataacgttttcctacgtcatgagcgcttcgagcgcttccgtaccggccagacaaccaaggcccccagcgaagccgagccggcagccgatctaattgacatgggcccagaccctgccgcgactgggaatctgtcttcacaactggcaggaatgaacctgggatcgtcatcagttcgggccggcctccagtccctggaagcctccggacgattggaagatgaattcgatatgttcgcactcacgcgaggaagcagccttgccgatcagagaaaggaggtaaaatacgaagcgccacaagcaacagatggcttagcgggcgccctggacgccagacagcagtctactggagcaatcccggtcacacaggcttgccttatggaggatatcgagcagtggctttctacggatgtgggtaatgacgccgaggagcccaaaggcgttacgagcgaagagtttgacaaatttcttgaggaacgggccaaagcggccgaccgtctgcctaatctttcttccccctctgctgaaggcccccctggcccaccatctggcccagcacctagaaagaagacccaagaaaaagacgatgacatgctgttcgccctgtag

SEQ ID NO: 156555 - DNA, 1365 bp, Artificial Sequence
  derived and/or modified sequence
atggccccctgccgggccaggacaggccccagcacctggaggtctgccaccagcagcaccaggaggaggaagggggcccggcggcacctgagcgccctgcaggtgctggagacctgtgtgaagaactgtggccaccgcttccacgtgctggtggccagccaggactttgtggagagcgtgctggtgaggaccatcctgcccaagaacaacccccccaccatcgtgcatgacaaggtgctgaacctgatccagagctgggcagatgccttccgcagcagcccagacctgactggagtggtgaccatctatgaggacctgcggaggaagggcctggagttccccatgacagacctggacatgctgagccccatccacaccccccagaggacagtgttcaacagcgagacccagagcggccaggacagcgtgggcacagacagcagccagcaggaggacagcggccagcacgccgcccccctgcctgccccacccatcctgagcggggacacccccatcgcccccaccccagagcagatcggcaagctgcggtctgagctggagatggtgtctggaaatgtgcgggtgatgtctgagatgctgacagagctggtgcccacccaggccgagcctgctgacctggagctgctgcaggagctgaacagaacctgccgggccatgcagcagagggtgctggagctgatcccccagatcgccaatgagcagctgacagaggagctgctgattgtgaatgacaacctgaacaacgtgttcctgcggcatgaaagatttgagcgcttcagaacaggccagaccaccaaggcccccagcgaggccgagcctgctgctgacctgattgacatgggccctgaccctgctgccaccggcaacctgagcagccagctggccggcatgaacctgggcagcagctctgtgcgggccggcctgcagagcctggaggccagcggccgcctggaggatgaatttgacatgtttgccctgacccggggcagcagcctggccgaccagaggaaggaggtgaagtatgaggccccccaggccacagatggcctggccggggccctggatgcccggcagcagagcactggagccatccctgtgacccaggcctgcctgatggaggacatcgagcagtggctgagcacagatgtgggcaatgatgctgaggagcccaagggcgtgaccagcgaggagtttgacaagttcctggaggagcgggccaaggctgctgaccggctgcccaacctgagcagccccagcgctgagggccccccaggccccccatctggccctgcccccaggaagaagacccaggagaaggatgatgacatgctgtttgccctgtag

SEQ ID NO: 156556 - DNA, 1479 bp, Artificial Sequence
  derived and/or modified sequence
atggacttcctgctgggcaaccccttcagcagccctgtgggccagagaattgagaaggccacagatggcagcctgcagagcgaggactgggccctgaacatggagatctgtgacatcatcaatgaaacagaggagggccccaaggatgccctgcgggctgtgaagaagagaattgtgggcaacaagaacttccacgaggtgatgctggccctgactgtgctggagacctgtgtgaagaactgtggccaccgcttccacgtgctggtggccagccaggactttgtggagagcgtgctggtgaggaccatcctgcccaagaacaacccccccaccatcgtgcatgacaaggtgctgaacctgatccagagctgggcagatgccttccgcagcagcccagacctgactggagtggtgaccatctatgaggacctgcggaggaagggcctggagttccccatgacagacctggacatgctgagccccatccacaccccccagaggacagtgttcaacagcgagacccagagcggccaggacagcgtgggcacagacagcagccagcaggaggacagcggccagcacgccgcccccctgcctgccccacccatcctgagcggggacacccccatcgcccccaccccagagcagatcggcaagctgcggtctgagctggagatggtgtctggaaatgtgcgggtgatgtctgagatgctgacagagctggtgcccacccaggccgagcctgctgacctggagctgctgcaggagctgaacagaacctgccgggccatgcagcagagggtgctggagctgatcccccagatcgccaatgagcagctgacagaggagctgctgattgtgaatgacaacctgaacaacgtgttcctgcggcatgaaagatttgagcgcttcagaacaggccagaccaccaaggcccccagcgaggccgagcctgctgctgacctgattgacatgggccctgaccctgctgccaccggcaacctgagcagccagctggccggcatgaacctgggcagcagctctgtgcgggccggcctgcagagcctggaggccagcggccgcctggaggatgaatttgacatgtttgccctgacccggggcagcagcctggccgaccagaggaaggaggtgaagtatgaggccccccaggccacagatggcctggccggggccctggatgcccggcagcagagcactggagccatccctgtgacccaggcctgcctgatggaggacatcgagcagtggctgagcacagatgtgggcaatgatgctgaggagcccaagggcgtgaccagcgaggagtttgacaagttcctggaggagcgggccaaggctgctgaccggctgcccaacctgagcagccccagcgctgagggccccccaggccccccatctggccctgcccccaggaagaagacccaggagaaggatgatgacatgctgtttgccctgtag

SEQ ID NO: 156557 - DNA, 1506 bp, Artificial Sequence
  derived and/or modified sequence
atggacttcctgctgggcaaccccttcagcagccctgtgggccagagaattgagaaggccacagatggcagcctgcagagcgaggactgggccctgaacatggagatctgtgacatcatcaatgaaacagaggagggccccaaggatgccctgcgggctgtgaagaagagaattgtgggcaacaagaacttccacgaggtgatgctggcccacagcgcccggcggcacctgagcgccctgcaggtgctggagacctgtgtgaagaactgtggccaccgcttccacgtgctggtggccagccaggactttgtggagagcgtgctggtgaggaccatcctgcccaagaacaacccccccaccatcgtgcatgacaaggtgctgaacctgatccagagctgggcagatgccttccgcagcagcccagacctgactggagtggtgaccatctatgaggacctgcggaggaagggcctggagttccccatgacagacctggacatgctgagccccatccacaccccccagaggacagtgttcaacagcgagacccagagcggccaggacagcgtgggcacagacagcagccagcaggaggacagcggccagcacgccgcccccctgcctgccccacccatcctgagcggggacacccccatcgcccccaccccagagcagatcggcaagctgcggtctgagctggagatggtgtctggaaatgtgcgggtgatgtctgagatgctgacagagctggtgcccacccaggccgagcctgctgacctggagctgctgcaggagctgaacagaacctgccgggccatgcagcagagggtgctggagctgatcccccagatcgccaatgagcagctgacagaggagctgctgattgtgaatgacaacctgaacaacgtgttcctgcggcatgaaagatttgagcgcttcagaacaggccagaccaccaaggcccccagcgaggccgagcctgctgctgacctgattgacatgggccctgaccctgctgccactggaaacctgagcagccagctggccggcatgaacctgggcagcagctctgtgcgggccggcctgcagagcctggaggccagcggccgcctggaggatgaatttgacatgtttgccctgacccggggcagcagcctggccgaccagaggaaggaggtgaagtatgaggccccccaggccacagatggcctggccggggccctggatgcccggcagcagagcactggagccatccctgtgacccaggcctgcctgatggaggacatcgagcagtggctgagcacagatgtgggcaatgatgctgaggagcccaagggcgtgaccagcgaggagtttgacaagttcctggaggagcgggccaaggctgctgaccggctgcccaacctgagcagccccagcgctgagggccccccaggcccccccagcggccctgcccccaggaagaagacccaggagaaggatgatgacatgctgtttgccctgtag

SEQ ID NO: 156558 - DNA, 1365 bp, Artificial Sequence
  derived and/or modified sequence
atggccccctgccgggcccggaccggccccagcacctggcggagcgcaactagctcaacgagacggagaaaaggcgctagacggcatctgtccgctctccaggtattggaaacctgtgtgaagaattgcggacatagattccatgtgctagtggccagccaagactttgttgagtctgtgctggtgaggacaattttaccaaagaataacccaccaactattgtccatgataaagtgctgaacctcattcaaagctgggccgatgcctttaggtctagccccgacctgacaggagtggtaaccatctacgaggaccttcgtcggaaaggcttagagtttcccatgacagatctggacatgttgagtcccattcacactcctcagcggacagtattcaattctgaaactcagagcggccaggattcagtgggcacagactccagtcagcaagaggattctggacagcacgccgctcctctgcccgcacctcctattttgagcggggatacgccaatcgccccaacacccgaacagatcggtaaactgcgttctgagctggaaatggtgtctggaaacgtccgcgttatgagcgaaatgctgacagaactggtcccaactcaagcagagcctgcagacctcgagcttttgcaggagcttaaccgaacttgtcgggcaatgcagcagagagtactggagctcataccccagattgctaacgagcagctcactgaggaactgctcatcgtcaatgacaacctgaacaatgtgttcctcaggcacgaaagatttgagaggttccgcaccggtcaaacaaccaaagcgcctagtgaagccgaacccgcagccgatctgatagacatgggacctgatcccgctgcaacaggaaatctctcaagccagctggccggaatgaacctcgggagtagctccgtgcgagcagggttacagtcactggaagcgagcggacggctggaggatgaattcgatatgttcgccctcactcgaggatccagcctcgccgatcagaggaaggaggtgaaatacgaagccccccaggccaccgacggtttggcaggagctctggacgcaagacagcagagcaccggcgccatccccgtgacccaagcctgtttgatggaagatattgagcagtggttgtccacagatgtgggaaacgatgcagaagagcctaaaggcgtaactagcgaagaattcgacaagtttctagaggaaagagctaaagcagccgaccgcctgccaaacctgagttcgcctagcgcagaaggacctcctggtccacccagcggtcccgcccctcgaaagaagacccaggagaaggacgacgacatgttgttcgctttgtag

SEQ ID NO: 156559 - DNA, 1479 bp, Artificial Sequence
  derived and/or modified sequence
atggacttcctgctgggcaaccccttcagcagccccgtgggccagcggatcgagaaagccacggacgggtctttacaatccgaagactgggcactcaacatggaaatttgtgacatcatcaacgaaactgaggaggggcctaaagatgctctcagggccgttaagaaaaggatcgtgggaaataaaaactttcacgaagttatgctggccctgactgtgctggagacctgcgtgaagaattgtggacacagattccatgtgctcgtggccagccaagacttcgtggaaagcgtcttggtacgcacaattttacccaagaataatcctcccactatagttcatgacaaggtcctcaaccttatccagtcttgggccgatgcctttaggagcagcccagacttaaccggagttgtgaccatatacgaagacctgagacggaaaggtctagagttcccgatgactgatctagacatgctgtcccctattcacacccctcagcgaacagtgttcaactccgaaacacaatccggccaggattctgtgggtaccgactcgtcccagcaagaggattcgggacagcacgcggcccctctgcctgctcctccaatactctccggagacacgcctatcgcaccgaccccggaacagatcggtaagcttaggagcgagctcgagatggtttccggcaacgtccgcgtgatgtccgagatgttaactgaactggttccgacgcaggccgagccggcagatctcgaactgttgcaggagttgaacaggacttgcagagctatgcagcagcgcgttctcgagctaattccacagatcgccaatgaacagctgacagaggaacttctgatcgtgaacgacaacctcaataacgtctttctccgccacgaaaggtttgagcgatttaggactggtcagacaacaaaggccccctccgaggctgagccggctgcggacctcattgacatgggacctgacccagctgccaccggcaacttgtctagccagctggccggcatgaatcttggctcaagcagcgttcgagcaggtctccagagcctggaagcttccggccggctggaggacgaatttgatatgttcgccttaactcgcggaagctccttagccgaccagagaaaggaagtgaagtacgaagccccacaagcgaccgatggcctcgctggagccctggacgccaggcagcagtcgaccggcgctataccggttacgcaggcttgtctcatggaggacattgagcaatggctttctacagacgtcggcaatgatgccgaggagccaaagggtgtgacatctgaagaattcgataagttcctggaggagcgggcaaaggctgccgataggttgccaaatctgtccagtccctctgcagagggcccccctggtcctcccagcggaccggccccccgcaaaaagacacaggagaaagacgacgacatgctttttgctctctag

SEQ ID NO: 156560 - DNA, 1506 bp, Artificial Sequence
  derived and/or modified sequence
atggacttcctgctgggcaaccccttcagcagccccgtgggccagagaatcgaaaaggcaacggatggctcattacagagcgaggactgggcgctgaacatggaaatctgtgatattattaacgaaacagaagaaggacctaaggacgccctgcgcgccgtgaaaaagcgtatcgtggggaataaaaactttcatgaagtgatgttagcccactctgcccggagacacctaagtgctctccaagtgctggagacctgtgtgaaaaactgcggccacaggtttcacgtgttggttgccagccaggactttgtggagtccgtcttagtgcgcacaatcctaccaaagaataacccccctacgattgtgcacgacaaggtactgaatcttatacagtcgtgggccgacgcatttcggagcagtcccgaccttaccggcgtggtcaccatttacgaagatttgagaaggaagggcttggagtttcctatgaccgacctagacatgcttagccctattcatactccacagcgcactgtgtttaacagtgagacacaaagcggtcaggactctgtggggactgatagttcccagcaggaagatagcgggcaacatgcggcccctttaccggcacctcccattctgagtggagatactcccattgccccaacacctgagcaaatcggtaaactgcgctccgagctagaaatggtttctggtaacgtgagagtgatgtccgaaatgctgacagagctcgtgcctacccaggcagagccggccgacctcgagctgctacaggaactgaatcgaacctgcagggccatgcagcagcgcgtgctcgagttgataccacagattgctaacgagcagctcaccgaggaactgcttatagttaatgataacctgaacaacgtatttctgcgccacgagagatttgaaagattccgtaccggccagacaacaaaggccccgtcggaggcagaaccagctgccgacctcatagatatgggccctgatccagctgccactggaaacctgtcatctcagctggccggaatgaacctcggctcgagctccgtccgcgcgggcctgcagagcctcgaagcttctgggagacttgaagatgaatttgatatgttcgctctcactcgtgggtccagtttagctgatcagcgaaaggaagtgaaatatgaggccccacaagccacagacgggttggctggagctctcgacgctcggcagcagagcacgggagctatacctgtcacacaagcctgcctcatggaggatatcgaacagtggctctccaccgacgtggggaacgatgccgaggaacctaaaggcgtcacctctgaggagtttgataaatttctggaggaaagggcaaaagccgcggaccggcttcctaacctctctagccccagcgccgaaggtcccccagggccaccttccgggcccgcgccacgaaaaaaaactcaggagaaagacgacgatatgcttttcgcgctgtag

SEQ ID NO: 156561 - DNA, 1365 bp, Artificial Sequence
  derived and/or modified sequence
atggcaccctgccgggctcgtacgggtccctccacttggcgtagtgctactagtagcacgcgacgcaggaaaggggctagaaggcatctgtctgcgctgcaggtcctggagacctgcgtgaaaaattgtggccatagatttcatgtccttgtggccagtcaggacttcgttgagtccgtgctcgtccggacaatcctgccaaagaacaatcctccaacgattgtgcacgacaaagtgttgaacctcattcagagctgggctgacgcttttaggagttctccagatctgaccggggtcgttactatctacgaagacctgagacgcaaaggccttgagtttcccatgaccgatcttgatatgctaagtcccattcatacccctcagcgaaccgtctttaacagcgaaactcagagcggccaggacagtgtgggtaccgattcttcacaacaagaggattcaggacagcatgccgcacccctgcctgccccaccaatcctgtccggcgacacgccgatcgcccctacccccgagcagatcggcaagctgaggtccgagctagaaatggtgtccggaaacgtacgcgttatgagtgagatgttgactgagttggtgccaacgcaagccgagcctgccgacttggagttattacaggagctgaataggacttgccgtgccatgcagcagcgggttcttgagctgataccacagatagccaacgaacagctgacggaagaactcttaatcgtaaacgataacctgaacaatgtctttttgagacatgagcggtttgagcgctttaggaccggacagacaaccaaggctccgagtgaagcagaaccagccgcagatttgatcgatatggggcctgacccggcagcaactggtaacctttcaagtcagctggccggaatgaatctagggtcaagctctgtacgggcaggactgcaaagtttagaggcatctggtcggctggaggacgaatttgatatgtttgctctgacaaggggatcaagtctggctgatcagagaaaggaggtgaagtatgaagcacctcaggctacagatggtttagccggagcactagacgccaggcagcagtcaaccggagccatcccagtcacacaggcttgcctgatggaagatattgaacagtggttatcaacagacgtcggaaacgacgccgaagagccaaaaggagtcacctctgaagagtttgacaagttcctggaagagagagcaaaagccgctgacagactgcctaatctgagctctccgtcagccgaagggccacccggtccaccatccggtcctgctcccaggaaaaaaactcaagagaaggatgacgatatgctcttcgcactgtag

SEQ ID NO: 156562 - DNA, 1479 bp, Artificial Sequence
  derived and/or modified sequence
atggattttctgctgggtaatcctttttcatctccagtaggccagaggatcgaaaaggccacagacggttccctgcaatcagaggattgggcccttaacatggagatttgcgatattatcaacgaaactgaggaaggacccaaggacgcacttcgggcagtaaaaaaaaggatcgtgggcaataaaaacttccacgaggtcatgctggctttgacagtcctggaaacttgcgttaaaaattgtgggcatcgctttcatgtgctcgtggcgtcccaagatttcgtcgagtccgtgcttgttaggaccatcctccccaagaataacccacctaccattgtgcacgacaaagtcctgaaccttattcaaagctgggccgatgcgttcaggtcctcccccgatttaactggcgtcgttactatttacgaggacctgagacggaagggacttgagttccctatgactgatttggacatgttgagcccaatccacactccacagagaactgtctttaacagcgagacacagtcaggccaggactcagtgggtacagacagttcccagcaggaggactccggtcagcatgccgcacctctccctgcccctcccattctgtcaggggacacccccatagcccctactcctgagcaaataggcaagttaagatccgagttggaaatggtgtctggcaatgtgagggtgatgagtgagatgctcactgagctggtgcccacccaagctgagcccgcagacctggagcttttgcaagaactgaaccgcacttgtagagccatgcaacagcgcgtgttggagcttattccgcaaattgccaacgagcaattgaccgaagagctgcttattgttaacgacaatttgaataatgtctttcttcgacatgagcgatttgaacgattccggacaggccagacgacaaaggcgccatccgaggctgagccagccgctgaccttatcgatatggggcctgatcccgcagctactggaaacttgagttctcaactggctggtatgaacctgggaagcagtagtgttcgtgccggactccagtcattagaggcttctggtcggttggaagatgagtttgatatgttcgctctaacgcgcggttcctctttggcagatcaaagaaaggaggtgaaatacgaggctccccaggcaacagacggactggcaggagccttggatgccaggcaacagtctaccggcgcaatccccgttactcaggcctgtctaatggaagatatcgagcagtggctttcgacggacgtcgggaacgatgccgaagagccgaagggcgtgacctctgaggagttcgacaaattcctggaggaacgcgctaaggccgctgataggttgcctaatctcagcagtccctctgcggagggaccgcctggtccgcctagcgggccagccccaagaaagaagactcaagagaaggatgacgatatgctgttcgcgctgtag

SEQ ID NO: 156563 - DNA, 1506 bp, Artificial Sequence
  derived and/or modified sequence
atggattttctcctggggaatcctttcagtagcccagtcggccagaggattgagaaggccacagacggttccttacagtccgaggactgggccttgaacatggagatctgcgacataattaacgaaactgaagagggcccaaaagacgcccttcgagcggtgaaaaaacgcattgtgggcaacaaaaacttccacgaagtcatgcttgctcactccgcccgacggcatctcagtgcactacaggttctggaaacatgcgtgaagaactgtggacatcgctttcatgtccttgtggcctcgcaggacttcgtggagtcagtgctagtgcggactattctcccaaaaaataatccaccgaccatcgtacatgacaaagtcctgaatctgattcagagctgggccgacgcttttcgctcatcacctgacctgaccggggtggtgacgatatacgaggacttgcggagaaaggggttggagttccctatgacagatttagacatgctttcgcccatccatacccctcagaggacggtcttcaattccgagacacagtccgggcaggattccgtgggtaccgattcctcacagcaggaggactccgggcagcatgcagcgccactccccgcacccccaatactgtctggagatacccctattgcacctacaccagaacagattggcaaacttcggtcggaactggagatggtgagcggaaatgtgagagtcatgagcgaaatgctaaccgagttggtccctacccaagcagagcccgcagatttggagctgctacaggagctgaatagaacctgtcgagctatgcagcagcgtgtgctggaactgatcccccaaatcgctaatgaacagttgacagaagaacttttgatcgttaacgacaacctcaataacgtgtttttgcggcatgaacggttcgaacgtttccgcaccggccagaccaccaaagccccaagcgaggccgagcccgctgcagacttgatcgatatgggtcccgaccccgctgcgacaggcaatttatcgagccagctcgctgggatgaatcttggctcgagttcagtgagggccggtctgcagagccttgaagcatcgggccgtctggaggatgaatttgacatgttcgctctcacgagggggtctagtctggcagaccagaggaaagaggtgaagtatgaagctccccaagccactgatggcctggccggagcgttagacgctaggcaacagtccaccggagccattccagtaacccaggcttgcctgatggaggatattgagcagtggctcagcaccgatgtggggaacgacgctgaagagcccaaaggggttaccagcgaagagttcgacaaattcctggaagagagggccaaggccgcagaccgcctgcccaatctgagctctccttccgctgaagggcctccgggacctccctctggtcctgcacccagaaaaaaaacccaggagaaagacgatgatatgctgtttgcgttatag

SEQ ID NO: 156564 - DNA, 1953 bp, Artificial Sequence
  derived and/or modified sequence
gattcccggggttggtggcagcggcggtagcagcaatggactttctcctggggaacccgttcagctctccagtgggacagcgcatcgagaaagccacagatggctccctgcagagcgaggactgggccctcaacatggagatctgcgacatcatcaacgagacggaggaagggtgctcgacggcacctctcggccctccaggtcttagaaacctgtgtcaagaactgcgggcaccgcttccacgtgctggtggccagccaggacttcgtggagagtgtgctggtgaggaccatcctgcccaagaacaacccacccaccatcgtgcatgacaaagtgctcaacctcatccagtcctgggctgacgcgttccgcagctcgcccgatctgacaggtgtggtcaccatctatgaggacctgcggaggaaaggcctggagttccccatgactgacctggacatgctgtcacccatccacacaccccagaggaccgtgttcaactcagagacacaatcaggacaggattctgtgggcactgactccagccagcaagaggactctggccagcatgctgcccctctgcccgccccgcccatactctccggtgacacgcccatagcaccaaccccggaacagattgggaagctgcgcagtgagctggagatggtgagtgggaacgtgagggtgatgtcggagatgctgacggagctggtgcccacccaggccgagcccgcagacctggagctgctgcaggagctcaaccgcacgtgccgagccatgcagcagcgggtcctggagctcatccctcagatcgccaatgagcagctgacagaggagctgctcatcgtcaatgacaatctcaacaatgtgttcctgcgccatgaacggtttgaacggttccgaacaggccagaccaccaaggccccaagtgaggccgagccggcagctgacctgatcgacatgggccctgacccagcagccaccggcaacctctcatcccagctggcaggaatgaacctgggctccagcagtgtgagagctggcctgcagtctctggaggcctctggtcgactggaagatgagtttgacatgtttgcgctgacacggggcagctcactggctgaccaacggaaagaggtaaaatacgaagccccccaagcaacagacggcctggctggagccctggacgcccggcagcagagcactggcgcgatcccagtcacccaggcctgcctcatggaggacatcgagcagtggctgtccactgacgtgggtaatgatgcggaagagcctaagggggtcaccagcgaagaatttgacaaattcctggaagaacgggccaaagccgcggaccgattgcccaacctctccagcccctcagctgaggggcccccgggtcccccatctggcccagcgccccggaagaagacccaggagaaagatgatgacatgctgtttgccttatgagtgtggggtctggcaccctgcagcccaggtccccactgctctcacacccttaggctgggacctccctccctcctctggtgttaaggctgctttgggggtggcttgttacccccttttcctcctctttgaagacggagctgccccagctgtggctgggggtgtggaggcagtgggatgaactgggggacaggtctgcgctgcagtgggatctggctgctctgcctcctttcccaccccagctgaccatgagactttgctgagaagtggaggccccaggacaggctggctggctggctggctgcttgacccagtgtgactctccttcactgagtgataccctgctccgggcccatgccccaaggagcccttcagagcccacactgccagtcgaggcctggctggaggctggccacagtggaaattctgccgagcctcttgtcccttccctgctctgctgcatggggccccatggctttggctggccactga

SEQ ID NO: 156565 - DNA, 2382 bp, Artificial Sequence
  derived and/or modified sequence
ttcgcggtgccaccgccccgcccacgcctcctcgccggcctccgagtgcgtcacgtgacgggtcggtggcgctggcggttgctgtcagctgattcccggggttggtggcagcggcggtagcagcaatggactttctcctggggaacccgttcagctctccagtgggacagcgcatcgagaaagccacagatggctccctgcagagcgaggactgggccctcaacatggagatctgcgacatcatcaacgagacggaggaaggtcccaaagatgccctccgagcagtaaagaagagaatcgtggggaataagaacttccacgaggtgatgctggctctcacagtcttagaaacctgtgtcaagaactgcgggcaccgcttccacgtgctggtggccagccaggacttcgtggagagtgtgctggtgaggaccatcctgcccaagaacaacccacccaccatcgtgcatgacaaagtgctcaacctcatccagtcctgggctgacgcgttccgcagctcgcccgatctgacaggtgtggtcaccatctatgaggacctgcggaggaaaggcctggagttccccatgactgacctggacatgctgtcacccatccacacaccccagaggaccgtgttcaactcagagacacaatcaggacaggattctgtgggcactgactccagccagcaagaggactctggccagcatgctgcccctctgcccgccccgcccatactctccggtgacacgcccatagcaccaaccccggaacagattgggaagctgcgcagtgagctggagatggtgagtgggaacgtgagggtgatgtcggagatgctgacggagctggtgcccacccaggccgagcccgcagacctggagctgctgcaggagctcaaccgcacgtgccgagccatgcagcagcgggtcctggagctcatccctcagatcgccaatgagcagctgacagaggagctgctcatcgtcaatgacaatctcaacaatgtgttcctgcgccatgaacggtttgaacggttccgaacaggccagaccaccaaggccccaagtgaggccgagccggcagctgacctgatcgacatgggccctgacccagcagccaccggcaacctctcatcccagctggcaggaatgaacctgggctccagcagtgtgagagctggcctgcagtctctggaggcctctggtcgactggaagatgagtttgacatgtttgcgctgacacggggcagctcactggctgaccaacggaaagaggtaaaatacgaagccccccaagcaacagacggcctggctggagccctggacgcccggcagcagagcactggcgcgatcccagtcacccaggcctgcctcatggaggacatcgagcagtggctgtccactgacgtgggtaatgatgcggaagagcctaagggggtcaccagcgaagaatttgacaaattcctggaagaacgggccaaagccgcggaccgattgcccaacctctccagcccctcagctgaggggcccccgggtcccccatctggcccagcgccccggaagaagacccaggagaaagatgatgacatgctgtttgccttatgagtgtggggtctggcaccctgcagcccaggtccccactgctctcacacccttaggctgggacctccctccctcctctggtgttaaggctgctttgggggtggcttgttacccccttttcctcctctttgaagacggagctgccccagctgtggctgggggtgtggaggcagtgggatgaactgggggacaggtctgcgctgcagtgggatctggctgctctgcctcctttcccaccccagctgaccatgagactttgctgagaagtggaggccccaggacaggctggctggctggctggctgcttgacccagtgtgactctccttcactgagtgataccctgctccgggcccatgccccaaggagcccttcagagcccacactgccagtcgaggcctggctggaggctggccacagtggaaattctgccgagcctcttgtcccttccctgctctgctgcatggggccccatggctttggctggccactgagggtagggtgtggaggtgtggaggccccctgaggagctgcggcggcccaggtacgaagctgcaactctgcgcgcagtgggcgagatctcatcagccccaggctgcaggtgaggcttcaggggatgctggggccccactgcccctccgctgccttgccctccatccttcctctgttccttctggccgggcaccacagcactggggctcacctcttggttgatcctcttgtactgggagaggtgccttttgtatccccaattaaaggtagaaaaccaccctgctagcagca

SEQ ID NO: 156566 - DNA, 1960 bp, Artificial Sequence
  derived and/or modified sequence
gattcccggggttggtggcagcggcggtagcagcaatggactttctcctggggaacccgttcagctctccagtgggacagcgcatcgagaaagccacagatggctccctgcagagcgaggactgggccctcaacatggagatctgcgacatcatcaacgagacggaggaaggtcccaaagatgccctccgagcagtaaagaagagaatcgtggggaataagaacttccacgaggtgatgctggctcacagtgctcgacggcacctctcggccctccaggtcttagaaacctgtgtcaagaactgcgggcaccgcttccacgtgctggtggccagccaggacttcgtggagagtgtgctggtgaggaccatcctgcccaagaacaacccacccaccatcgtgcatgacaaagtgctcaacctcatccagtcctgggctgacgcgttccgcagctcgcccgatctgacaggtgtggtcaccatctatgaggacctgcggaggaaaggcctggagttccccatgactgacctggacatgctgtcacccatccacacaccccagaggaccgtgttcaactcagagacacaatcaggacaggattctgtgggcactgactccagccagcaagaggactctggccagcatgctgcccctctgcccgccccgcccatactctccggtgacacgcccatagcaccaaccccggaacagattgggaagctgcgcagtgagctggagatggtgagtgggaacgtgagggtgatgtcggagatgctgacggagctggtgcccacccaggccgagcccgcagacctggagctgctgcaggagctcaaccgcacgtgccgagccatgcagcagcgggtcctggagctcatccctcagatcgccaatgagcagctgacagaggagctgctcatcgtcaatgacaatctcaacaatgtgttcctgcgccatgaacggtttgaacggttccgaacaggccagaccaccaaggccccaagtgaggccgagccggcagctgacctgatcgacatgggccctgacccagcagccaccggcaacctctcatcccagctggcaggaatgaacctgggctccagcagtgtgagagctggcctgcagtctctggaggcctctggtcgactggaagatgagtttgacatgtttgcgctgacacggggcagctcactggctgaccaacggaaagaggtaaaatacgaagccccccaagcaacagacggcctggctggagccctggacgcccggcagcagagcactggcgcgatcccagtcacccaggcctgcctcatggaggacatcgagcagtggctgtccactgacgtgggtaatgatgcggaagagcctaagggggtcaccagcgaagaatttgacaaattcctggaagaacgggccaaagccgcggaccgattgcccaacctctccagcccctcagctgaggggcccccgggtcccccatctggcccagcgccccggaagaagacccaggagaaagatgatgacatgctgtttgccttatgagtgtggggtctggcaccctgcagcccaggtccccactgctctcacacccttaggctgggacctccctccctcctctggtgttaaggctgctttgggggtggcttgttacccccttttcctcctctttgaagacggagctgccccagctgtggctgggggtgtggaggcagtgggatgaactgggggacaggtctgcgctgcagtgggatctggctgctctgcctcctttcccaccccagctgaccatgagactttgctgagaagtggaggccccaggacaggctggctggctggctggctgcttgacccagtgtgactctccttcactgagtgataccctgctccgggcccatgccccaaggagcccttcagagcccacactgccagtcgaggcctggctggaggctggccacagtgga

SEQ ID NO: 156567 - protein, 703 aa, Artificial Sequence
  derived and/or modified sequence
MTAVGRRCPALGSRGAAGEPEAGSDYVKFSKEKYILDSSPEKLHKELEEELKLSSTDLRSHAWYHGRIPREVSETLVQRNGDFLIRDSLTSLGDYVLTCRWRNQALHFKINKVVVKAGESYTHIQYLFEQESFDHVPALVRYHVGSRKAVSEQSGAIIYCPVNRTFPLRYLEASYGLGQGSSKPASPVSPSGPKGSHMKRRSVTMTDGLTADKVTRSDGCPTSTSLPRPRDSIRSCALSMDQIPDLHSPMSPISESPSSPAYSTVTRVHAAPAAPSATALPASPVARRSSEPQLCPGSAPKTHGESDKGPHTSPSHTLGKASPSPSLSSYSDPDSGHYCQLQPPVRGSREWAATETSSQQARSYGERLKELSENGAPEGDWGKTFTVPIVEVTSSFNPATFQSLLIPRDNRPLEVGLLRKVKELLAEVDARTLARHVTKVDCLVARILGVTKEMQTLMGVRWGMELLTLPHGRQLRLDLLERFHTMSIMLAVDILGCTGSAEERAALLHKTIQLAAELRGTMGNMFSFAAVMGALDMAQISRLEQTWVTLRQRHTEGAILYEKKLKPFLKSLNEGKEGPPLSNTTFPHVLPLITLLECDSAPPEGPEPWGSTEHGVEVVLAHLEAARTVAHHGGLYHTNAEVKLQGFQARPELLEVFSTEFQMRLLWGSQGASSSQARRYEKFDKVLTALSHKLEPAVRSSEL

SEQ ID NO: 156568 - DNA, 2112 bp, Artificial Sequence
  derived and/or modified sequence
atgaccgccgtgggcagaagatgccccgccctgggcagcagaggcgccgccggcgagcccgaggccggcagcgactacgtgaagttcagcaaggagaagtacatcctggacagcagccccgagaagctgcacaaggagctggaggaggagctgaagctgagcagcaccgacctgagaagccacgcctggtaccacggcagaatccccagagaggtgagcgagaccctggtgcagagaaacggcgacttcctgatcagagacagcctgaccagcctgggcgactacgtgctgacctgcagatggagaaaccaggccctgcacttcaagatcaacaaggtggtggtgaaggccggcgagagctacacccacatccagtacctgttcgagcaggagagcttcgaccacgtgcccgccctggtgagataccacgtgggcagcagaaaggccgtgagcgagcagagcggcgccatcatctactgccccgtgaacagaaccttccccctgagatacctggaggccagctacggcctgggccagggcagcagcaagcccgccagccccgtgagccccagcggccccaagggcagccacatgaagagaagaagcgtgaccatgaccgacggcctgaccgccgacaaggtgaccagaagcgacggctgccccaccagcaccagcctgcccagacccagagacagcatcagaagctgcgccctgagcatggaccagatccccgacctgcacagccccatgagccccatcagcgagagccccagcagccccgcctacagcaccgtgaccagagtgcacgccgcccccgccgcccccagcgccaccgccctgcccgccagccccgtggccagaagaagcagcgagccccagctgtgccccggcagcgcccccaagacccacggcgagagcgacaagggcccccacaccagccccagccacaccctgggcaaggccagccccagccccagcctgagcagctacagcgaccccgacagcggccactactgccagctgcagccccccgtgagaggcagcagagagtgggccgccaccgagaccagcagccagcaggccagaagctacggcgagagactgaaggagctgagcgagaacggcgcccccgagggcgactggggcaagaccttcaccgtgcccatcgtggaggtgaccagcagcttcaaccccgccaccttccagagcctgctgatccccagagacaacagacccctggaggtgggcctgctgagaaaggtgaaggagctgctggccgaggtggacgccagaaccctggccagacacgtgaccaaggtggactgcctggtggccagaatcctgggcgtgaccaaggagatgcagaccctgatgggcgtgagatggggcatggagctgctgaccctgccccacggcagacagctgagactggacctgctggagagattccacaccatgagcatcatgctggccgtggacatcctgggctgcaccggcagcgccgaggagagagccgccctgctgcacaagaccatccagctggccgccgagctgagaggcaccatgggcaacatgttcagcttcgccgccgtgatgggcgccctggacatggcccagatcagcagactggagcagacctgggtgaccctgagacagagacacaccgagggcgccatcctgtacgagaagaagctgaagcccttcctgaagagcctgaacgagggcaaggagggcccccccctgagcaacaccaccttcccccacgtgctgcccctgatcaccctgctggagtgcgacagcgccccccccgagggccccgagccctggggcagcaccgagcacggcgtggaggtggtgctggcccacctggaggccgccagaaccgtggcccaccacggcggcctgtaccacaccaacgccgaggtgaagctgcagggcttccaggccagacccgagctgctggaggtgttcagcaccgagttccagatgagactgctgtggggcagccagggcgccagcagcagccaggccagaagatacgagaagttcgacaaggtgctgaccgccctgagccacaagctggagcccgccgtgagaagcagcgagctgtag

SEQ ID NO: 156569 - DNA, 978 bp, Artificial Sequence
  derived and/or modified sequence
tgaatccagggcgaggccagcagaagagccgccggcgagcccgaggccggcagcgactacgtgaagttcagcaaggagaagtacatcctggacagcagccccgagaagctgcacaaggagctggaggaggagctgaagctgagcagcaccgacctgagaagccacgcctggtaccacggcagaatccccagagaggtgagcgagaccctggtgcagagaaacggcgacttcctgatcagagacagcctgaccagcctgggcgactacgtgctgacctgcagatggagaaaccaggccctgcacttcaagatcaacaaggtggtggtgaaggccggcgagagctacacccacatccagtacctgttcgagcaggagagcttcgaccacgtgcccgccctggtgagataccacgtgggcagcagaaaggccgtgagcgagcagagcggcgccatcatctactgccccgtgaacagaaccttccccctgagatacctggaggccagctacggcctgggccagggcagcagcaagcccgccagccccgtgagccccagcggccccaagggcagccacatgaagagaagaagcgtgaccatgaccgacggcctgaccgccgacaaggtgaccagaagcgacggctgccccaccagcaccagcctgcccagacccagagacagcatcagaagctgcgccctgagcatggaccagatccccgacctgcacagccccatgagccccatcagcgagagccccagcagccccgcctacagcaccgtgaccagagtgcacgccgcccccgccgcccccagcgccaccgccctgcccgccagccccgtggccagaagaagcagcgagccccagctgtgccccggcagcgcccccaagacccacggcgagagcgacaagggcccccacaccagccccagccacaccctgggcaaggccagccccagccccagcctgagcagctacagctag

SEQ ID NO: 156570 - DNA, 2112 bp, Artificial Sequence
  derived and/or modified sequence
atgacagccgttggacgcaggtgccccgccctgggatcccgcggcgcagcgggagaaccagaagcaggcagtgactatgtgaagttcagtaaggagaagtacatcctggattccagccctgaaaagctgcacaaggaattggaagaagaactgaagctgagctctaccgatctccgttcacatgcatggtaccatggaagaattccgagagaggtgagcgagacgctggttcagcgaaatggtgactttctgatccgcgattcactgacatcccttggagattacgtattgacgtgccggtggagaaaccaggctctccacttcaagattaacaaggtggtggttaaggccggtgaatcttatacgcacatacagtacctgtttgaacaggagtccttcgaccacgtccctgcactcgtgagataccatgtgggctctagaaaagctgttagcgaacagagcggcgcgattatatactgtcctgtgaaccgcacctttcccttgcggtatctggaggcaagctacggacttggccagggctcctcaaaacccgccagcccagtctcaccatccggacctaaaggatctcacatgaaacgccgctcggtgacaatgaccgatgggctcacagccgataaagttactcggagcgacggatgcccaacatcgacctcacttcctcgcccacgcgactcgattagaagttgcgccctgagtatggatcaaattcctgatcttcacagcccaatgagcccaataagtgaatctccttcatctccagcatattccaccgtaaccagagtacacgccgcaccagccgcccctagcgctactgcactcccagcttctccagtcgcacgccgttccagcgaacctcagctatgccctggctccgcccccaagacacatggcgaaagcgacaagggaccacataccagcccatctcacactctggggaaggcgtcccctagtccttctttatcgagctatagtgacccagactcggggcactactgccagttacagcctccagttcggggcagtagagagtgggcggctaccgagacttctagccagcaagctcgcagttatggggaacggttgaaggagctatctgaaaatggcgcacccgaaggagactggggcaagactttcaccgtcccgattgtggaggtgaccagctcttttaaccctgccaccttccagagtctgctgattccacgcgataaccggcctctagaggtgggtttgcttcggaaggtgaaggaactcctggcggaagttgacgccaggacactggccaggcacgtgacaaaggtcgattgtctcgtcgcccggatactcggggtgactaaggaaatgcagacactgatgggcgtccgatgggggatggaactcctgactctccctcatggcagacaattgagactggacctcctggagcggttccatacgatgagtatcatgcttgctgtagacatcctgggctgtaccggctccgctgaggagcgtgctgccttactccacaaaacgatacagctagccgccgaactgcgaggaaccatgggcaacatgttctccttcgctgctgtgatgggcgccctggacatggcacagatctcaaggcttgagcaaacatgggtgacactgagacagcggcatacagagggagccatactgtacgagaaaaagctgaagcctttcctgaagtcactgaacgagggcaaagaaggtcctcctttgtcaaatacgacatttcctcatgtgcttccactaataaccctgttagaatgcgattctgccccgcccgaggggcctgagccatggggatccaccgagcacggcgtggaagtagttctcgcccacttagaggccgccaggactgtcgctcaccatggagggctgtatcacactaatgccgaggttaaactgcaggggttccaagcaagacccgagctgctggaggtgttctccaccgaatttcagatgcgtctgctgtggggttcccaaggagcatcatcatcacaggcaagaaggtatgagaaattcgataaggtactcacagctttatctcacaaattagaacccgctgtcaggtcctctgagctttag

SEQ ID NO: 156571 - DNA, 978 bp, Artificial Sequence
  derived and/or modified sequence
tgaattcagggggaggctagcaggagagctgccggtgaaccggaggctggaagtgattatgtaaagttcagcaaagagaagtacatcctggactcgtctccggagaaactgcacaaggagcttgaggaagaactgaagcttagctcaactgatctcagaagtcatgcctggtaccacggaaggatcccacgggaagtcagtgaaactcttgtacagagaaacggcgattttcttattagagactccttgacgagcttaggtgattacgtcttgacctgccggtggaggaatcaggccctgcatttcaaaatcaacaaagtcgtggtgaaagctggtgaaagttacacccacatacagtacctcttcgagcaggaatccttcgaccacgttcccgccttagtgagatatcatgtgggctcccgtaaggcggtgtccgaacaatcaggggccatcatctactgccccgtgaaccggacctttcctttgcgatacctggaggctagctacggactgggacaggggagtagcaaacctgcatcccctgtgtctcctagcggccctaagggcagccacatgaaaaggcggtccgtcactatgacagacggcctcactgccgacaaggtaacccggtctgatgggtgcccgacgtccactagcctcccaagaccacgcgacagcatcagatcttgcgctttgagcatggatcaaattccagatcttcacagcccaatgtctcccatatctgaatccccgtcaagtcctgcctattctacagtgacaagagtacatgctgctcccgctgctccctctgctaccgcactgcccgcgtctcccgtggcccgcagatcttctgaaccacagttgtgcccaggctctgctcccaaaacgcacggggagagcgacaaaggaccgcacacaagcccaagccatactctggggaaggcttctcctagcccaagcctgagttcttattcctag

SEQ ID NO: 156572 - DNA, 2750 bp, Artificial Sequence
  derived and/or modified sequence
gaggcggagagcgtccttccctgccggtggagtaggcggtggagtggggccgggcaaggagcgcaggggcgtgtctgggggcgtggtctacaggtcagtctccgcccccggagtccggcactgagctctgcagctcagtggcccgagaaaggcaggagccgctgggtttaggaggtccccgggttgccggcggcgacagcgggggaagcatgactgctgtgggccgaaggtgccccgcgctggggtcccgaggggctgctggagagccagaggctggcagcgactatgtgaagttctccaaggagaagtacatcctggactcatcgccagagaaactccacaaggaattggaggaggagctcaaactcagcagcacggatctccgcagccatgcctggtaccatggccgcatcccccgagaggtctcggagaccttggtacaacgcaacggcgacttcctcatccgggactcactcaccagcctgggcgactatgtgctcacgtgccgctggcgcaaccaggccttgcacttcaagatcaacaaggtggtggtgaaggcaggcgagagctacacacacatccagtacctgtttgagcaggagagctttgaccacgtgcccgccctcgtgcgctatcatgtgggcagccgcaaggctgtgtcagagcagagtggtgccatcatctactgcccggtgaaccgcaccttcccactgcgctacctcgaggccagctatggcctgggacaggggagtagcaagcctgctagccccgtcagcccctcaggccccaagggcagccacatgaagcggcgcagcgtcaccatgaccgatgggctcactgctgacaaggtcacccgcagcgatggctgccccaccagtacgtcgctgccccgccctcgggactccatccgcagctgtgccctcagcatggaccagatcccagacctgcactcacccatgtcgcccatctccgagagccctagctcccctgcctacagcactgtaacccgtgtccatgccgcccctgcagccccttctgccacagcattgcctgcctcccctgtcgcccgccgttccagtgagccccagctgtgtcccggaagtgccccaaagacccatggggagtcagacaagggcccccacaccagcccctcccacacccttggcaaggcctccccgtcaccatcactcagcagctacagtgacccggactctggccactactgccagctccagcctcccgtgcgtggcagccgagagtgggcagcgactgagacctccagccagcaggccaggagctatggggagaggctaaaggaactgtcagaaaatggggcccctgaaggggactggggcaagaccttcacagtccccatcgtggaagtcacttcttccttcaacccggccaccttccagtcactactgatccccagggataaccggccactggaggtgggccttctgcgcaaggtcaaggagctgctggcagaagtggatgcccggacgctggcccggcatgtcaccaaggtggactgcctggttgctaggatactgggcgttaccaaggagatgcagaccctaatgggagtccgctggggcatggaactgctcaccctcccccatggccggcagctacgcctagacctgctggaaaggttccacaccatgtccatcatgctggccgtggacatcctgggctgcaccggctctgcggaggagcgggcagcgctgctgcacaagaccattcagctggcggccgagctgcgggggactatgggcaacatgttcagcttcgcggcggtcatgggtgccctggacatggcccagatttctcggctggagcagacatgggtgaccctgcggcagcgacacacagagggtgccatcctgtacgagaagaagctcaagccttttctcaagagcctcaacgagggcaaagaaggcccgccgctgagcaacaccacgtttcctcatgtgctgcccctcatcaccctgctggagtgtgactcggccccaccagagggccctgagccctggggcagcacggagcacggcgtggaggtggtgctggctcacctggaggccgcccgcacagtggcacaccacggaggcctgtaccacaccaatgctgaagtcaagctgcaggggttccaggcccggccggagctcctggaggtgttcagcacggagttccagatgcgccttctctggggcagtcagggtgccagcagcagccaggcccggcgctatgagaagttcgacaaggtcctcactgccctgtcccacaagctggaacctgctgtccgctccagcgagctgtgaccccagggacatttcccctctgcagctgcggacagcgtcaggggcagaggggcacacaactttccccagagcaccccaaggacactgtgatcaacccgagaatgttctgggttcaactcaagcatctcccttgcacctccagggtcctgcgtggactctgggttccatcccacctgctacatgctcaccaggtctccattgaggaagaacaggaacgccggttcccccaccagcttttgctgctccccttcctgctggggttccctgttttcgagccatgggaggcaggctgctcacgcctcctcactctctgtctgtccctcaccaacaccaaggcctccatctcactgtaaataagtctctgttctgtaaatagatgtacagaagccatgttatttctttcatataataaacttttatgactcttta

SEQ ID NO: 156573 - DNA, 2112 bp, Artificial Sequence
  derived and/or modified sequence
atgacagctgtgggccgccgctgcccagccctgggcagcagaggagctgctggggagcctgaggccggcagtgactatgtgaagttcagcaaggagaagtacatcctggacagcagccctgagaagctgcacaaggagctggaggaggagctgaagctgagcagcacagacctgcggagccacgcctggtaccacggccgcatcccccgggaggtgtctgagaccctggtgcagagaaatggagacttcctgatccgggacagcctgaccagcctgggggactatgtgctgacctgccgctggaggaaccaggccctgcacttcaagatcaacaaggtggtggtgaaggccggggagagctacacccacatccagtacctgtttgagcaggagagctttgaccacgtgcctgccctggtgcgctaccacgtgggcagcaggaaggctgtgtctgagcagagcggggccatcatctactgccctgtgaacagaaccttccccctgcgctacctggaggccagctatggcctgggccagggcagcagcaagccagccagccctgtgagccccagcggccccaagggcagccacatgaagagaagatctgtgaccatgacagatggcctgacagctgacaaggtgaccaggagtgatggctgccccaccagcaccagcctgccccggccccgggacagcatccgcagctgtgccctgtccatggaccagatcccagacctgcacagccccatgagccccatcagcgagagccccagcagccctgcctacagcacagtgaccagggtgcacgccgccccagctgcccccagcgccacagccctgcctgccagccctgtggcccggcgcagcagcgagccccagctgtgccccggcagcgcccccaagacccatggagagagtgacaagggcccccacaccagccccagccacaccctgggcaaggccagccccagccccagcctgagcagctacagcgaccctgattctggccactactgccagctgcagccccctgtgcggggcagccgggagtgggccgccacagagaccagcagccagcaggcccggagctatggagagcggctgaaggagctgtctgaaaatggagcccctgagggggactggggcaagaccttcaccgtgcccatcgtggaggtgaccagcagcttcaacccagccaccttccagagcctgctgatcccccgggacaaccggcccctggaggtgggcctgctgaggaaggtgaaggagctgctggccgaggtggatgcccggaccctggcccggcacgtgaccaaggtggactgcctggtggcccgcatcctgggcgtgaccaaggagatgcagaccctgatgggcgtgcgctggggcatggagctgctgaccctgccccacggccggcagctgcggctggacctgctggagcgcttccacaccatgagcatcatgctggccgtggacatcctgggctgcaccggcagcgctgaggagagagctgccctgctgcacaagaccatccagctggccgctgagctgcggggcaccatgggcaacatgttctcctttgctgctgtgatgggcgccctggacatggcccagatcagccggctggagcagacctgggtgaccctgcggcagaggcacacagaaggagccatcctgtatgagaagaagctgaagcccttcctgaagagcctgaatgaaggcaaggagggcccccccctgagcaacaccaccttcccccacgtgctgcccctcatcaccctgctggagtgtgacagcgcccctcctgagggccctgagccctggggcagcacagagcacggcgtggaggtggtgctggcccacctggaggccgccaggacagtggcccaccacggcggcctgtaccacaccaatgctgaggtgaagctgcagggcttccaggcccggcctgagctgctggaggtgttcagcacagagttccagatgaggctgctgtggggcagccagggcgccagcagcagccaggcccggcgctatgagaagtttgacaaggtgctgacagccctgagccacaagctggagcctgctgtgcgcagcagcgagctgtag

SEQ ID NO: 156574 - DNA, 978 bp, Artificial Sequence
  derived and/or modified sequence
tgaatccagggcgaggccagccggcgggctgctggggagcctgaggccggcagtgactatgtgaagttcagcaaggagaagtacatcctggacagcagccctgagaagctgcacaaggagctggaggaggagctgaagctgagcagcacagacctgcggagccacgcctggtaccacggccgcatcccccgggaggtgtctgagaccctggtgcagagaaatggagacttcctgatccgggacagcctgaccagcctgggggactatgtgctgacctgccgctggaggaaccaggccctgcacttcaagatcaacaaggtggtggtgaaggccggggagagctacacccacatccagtacctgtttgagcaggagagctttgaccacgtgcctgccctggtgcgctaccacgtgggcagcaggaaggctgtgtctgagcagagcggggccatcatctactgccctgtgaacagaaccttccccctgcgctacctggaggccagctatggcctgggccagggcagcagcaagccagccagccctgtgagccccagcggccccaagggcagccacatgaagagaagatctgtgaccatgacagatggcctgacagctgacaaggtgaccaggagtgatggctgccccaccagcaccagcctgccccggccccgggacagcatccgcagctgtgccctgtccatggaccagatcccagacctgcacagccccatgagccccatcagcgagagccccagcagccctgcctacagcacagtgaccagggtgcacgccgccccagctgcccccagcgccacagccctgcctgccagccctgtggcccggcgcagcagcgagccccagctgtgccccggcagcgcccccaagacccatggagagagtgacaagggcccccacaccagccccagccacaccctgggcaaggccagccccagccccagcctgagcagctacagctag

SEQ ID NO: 156575 - DNA, 2112 bp, Artificial Sequence
  derived and/or modified sequence
atgaccgccgtgggccggcggtgccccgccctgggcagccggggcgcagccggggagcctgaagcgggtagtgactatgtgaaatttagtaaagaaaaatacatcttggatagttcccccgaaaagctccataaagaactggaagaagaactgaaactgtcatcaacagatctgagaagccacgcttggtatcatggccgcattccccgggaggtgtcagaaacgctggttcagcgcaatggcgacttccttattagagattccttaactagtctgggggactatgtgctcacttgcagatggaggaaccaagccctgcatttcaagattaataaggtggtcgtgaaggctggtgaatcatatacccatatccagtacttgttcgagcaggaatcttttgatcatgtgcccgccctcgttcggtatcatgtgggaagtcgaaaagccgtgagtgagcagagcggggcaatcatctactgccctgtcaaccgcaccttccccctgagatatctcgaggcatcctacggcctaggccagggcagcagcaaacccgcatcacccgtctctccatctggccctaagggcagccacatgaagcgacggtctgtgacaatgacagacggactcacagctgataaagtcacacgcagcgatggttgtcccactagtacaagcctgcctcgtccacgtgactctatccgatcctgtgcccttagcatggaccagatccccgacctacattcccctatgtcccccatctctgagtcccccagtagtcccgcgtactccaccgtgactcgagttcacgcggcccccgccgctccatccgcgaccgccctgcccgcttctcctgtggcgagacgctctagtgagccccagctttgccctgggtctgccccaaagacccacggggaatctgacaaaggcccccacacttcgccctcccacaccttgggcaaagcaagcccgagtcctagcctgagctcatactccgatcccgactcagggcattactgccagcttcagcctccagtaagaggctctcgcgaatgggctgccacagagacatccagccagcaagccagatcctacggggagcggttgaaagagctgagcgaaaatggcgcccctgagggggactggggcaagacatttacagtgcctatcgtggaagtaacctcttcatttaaccccgcaaccttccagtcattgcttattccaagggataacagaccgcttgaagtgggccttctcagaaaagtaaaagaactcctggcggaggttgacgcacgcacacttgcgagacacgttacaaaagtggactgtctggtagcacgtattctgggggtgaccaaagagatgcagaccttaatgggcgtgagatggggcatggaactcctgactctgccccacggacgacagttaagactggatctcctggaaagattccacactatgtctatcatgctggctgtggacattctgggatgcacgggtagcgctgaggaacgcgctgcgctgctgcacaagacaatccagctggccgccgaactgagaggcaccatgggaaacatgttctcctttgctgctgtgatgggcgccctggacatggcacagatcagccgcctggaacaaacctgggtgacactgcgacagcgccatactgagggcgcgatcctgtacgaaaagaaattgaaacctttccttaagtctctcaacgaaggaaaggagggcccccccctgtctaacaccactttccctcacgtgctgccactcatcaccctcctggagtgtgatagcgctccgcctgagggccctgagccatggggttccacggaacacggcgtggaagtggtcctggctcatctcgaggcagctcgcaccgtggctcatcacggcggtctgtatcacaccaacgcagaagtgaaacttcaggggtttcaggctagacctgagcttctggaagtctttagcacggaatttcagatgcgactcctctgggggagccagggggcttcctcatctcaagctaggcggtatgagaagttcgacaaggtcctgacggcccttagtcacaagttggagccagcagtacggagtagcgaactgtag

SEQ ID NO: 156576 - DNA, 978 bp, Artificial Sequence
  derived and/or modified sequence
tgaatccagggcgaggccagccggcgggccgccggcgagcccgaggccgggagcgactacgtgaagttttccaaagaaaagtacattctagattcttctcccgagaagcttcataaggagctggaagaggaactgaagctatcatcaactgatttaaggtcacacgcatggtaccacggaaggattccacgagaggtcagcgagaccctggtgcagaggaatggcgatttcctcatcagagactctctgacaagcctgggggactatgtgctgacctgcaggtggaggaatcaagctctgcattttaagattaataaagtcgtagtcaaggcaggagagtcgtatactcatatccagtatttattcgaacaggaatcctttgaccatgtccccgcattggtgcgataccatgtgggcagccggaaagccgtgagtgaacagagtggcgcgattatatactgccctgtgaacaggacattcccactccggtatctggaggctagttatggcctcgggcaaggctcttcgaagcctgcatcccctgttagcccaagcgggcccaaagggtctcacatgaaacggagatcagtgactatgacggatggattaaccgccgacaaggtgactcgcagtgatggttgccctactagtacttcattgccgcgtcccagagattccattcggagctgcgccctgagcatggatcagatacctgacctccactcaccaatgagcccaatttcagagagcccaagctcaccagcctactctacagttacgcgagtacacgctgcacctgctgctccgagtgcaacagccctgccggcttcccctgtggccagacgcagcagcgagccacagctgtgcccaggtagtgcccccaaaacacacggcgagtctgataaaggcccacatacctccccgtcgcacacactgggtaaggctagccccagcccctcccttagctcatatagttag

SEQ ID NO: 156577 - DNA, 778 bp, Artificial Sequence
  derived and/or modified sequence
ggccgctccgcccggggccctagagccagccggggagctgcagctcagcggcgcccggcagggtcgggctgggctgggcccggccgacccggggagggggcggggtcaccccagcctcacctctgggcgcccaggcgctccgcggggtgagggttcggcggccactcctgggactctgggctgcggtagatgccgttctccaaggagaagtacatcctggactcatcgccagagaaactccacaaggaattggaggaggagctcaaactcagcagcacggatctccgcagccatgcctggtaccatggccgcatcccccgagaggtctcggagaccttggtacaacgcaacggcgacttcctcatccgggactcactcaccagcctgggcgactatgtgctcacgtgccgctggcgcaaccaggccttgcacttcaagatcaacaaggtggtggtgaaggcaggcgagagctacacacacatccagtacctgtttgagcaggagagctttgaccacgtgcccgccctcgtgcgctatcatgtgggcagccgcaaggctgtgtcagagcagagtggtgccatcatctactgcccggtgaaccgcaccttcccactgcgctacctcgaggccagctatggcctgggacaggggagtagcaagcctgctagccccgtcagcccctcaggccccaagggcagccacatgaagcggcgcagcgtcaccatgaccgatgggctcactgctgacaaggtcacccgcagcgatggctgccccacca

SEQ ID NO: 156578 - DNA, 2112 bp, Artificial Sequence
  derived and/or modified sequence
atgactgcagtcggcaggagatgcccagccctcggatcccgcggagccgctggtgagcctgaggccggatccgactacgtgaagtttagcaaggaaaaatacatcttagatagctcccctgaaaagctgcataaggaactcgaggaagaactcaagctctctagtactgacttgcgatctcacgcgtggtaccacggtcgcattccgcgagaggtgtctgaaaccttggtccagaggaacggtgacttcctgatcagggactcactcacctccttaggtgactacgtgctgacctgccgatggcgcaatcaggcccttcatttcaaaatcaataaagtcgtggtaaaggcaggagagtcctatacgcatatacaatatctattcgaacaggaatctttcgaccacgtgcctgcactcgtccggtaccatgttggcagccggaaagcagtgtctgagcagagcggagctataatttactgcccggtgaatagaaccttcccgctccgctatctggaagccagctatggcctgggacagggttctagtaagccagccagccctgtcagcccttctggacccaagggctctcacatgaaaaggcgctccgtgacaatgacagatgggttaaccgccgacaaagtcactcgttcagatggctgtcccacttctacatccctgccaaggccccgtgattccatcaggagttgcgccctgtctatggatcagatacctgacctgcactctcccatgagtcctattagcgagagcccatcatcaccggcttactctacagttacacgcgtccatgccgcacccgctgcaccatctgcgaccgccttgccggcttctcccgttgcaaggcgcagctccgaaccccagctgtgcccagggagcgcgccaaagacacatggggagtccgataaaggccctcacacttccccatcccacacactgggcaaagcctctccttcgcccagcttgtcatcctacagcgacccagattctgggcactactgtcagctgcagccgccagttagaggctcacgcgaatgggccgctacagagacaagctcacaacaggcacgctcatatggggagagactcaaggaattgtccgaaaacggtgctccagagggagattgggggaaaaccttcactgtgccaattgtcgaggtgactagtagcttcaaccccgcaacttttcagtccttactcatccctcgggacaataggccgttggaagtgggtctgctgcggaaggtaaaagagttgttagccgaggtcgatgccagaaccctggctcggcatgtcacgaaagtggattgcctggttgctaggatcctcggagtgaccaaagagatgcagacgctgatgggcgtacggtggggtatggagctcctaactcttccacatggacgccagctccgcctggacctgttggaacggtttcacactatgagcatcatgttggcagtggatattctgggctgtaccggctccgctgaggaacgggcagctctgctccacaaaactatccagctggcagcggagctcagaggcacaatgggcaacatgttcagttttgccgcagtgatgggcgctttagatatggcacagatcagccgcttagaacagacctgggtgactctgcgacagagacacactgagggcgctattctctatgagaagaagcttaagccctttctgaaaagtctcaatgagggaaaggaaggcccacctttatcgaacaccaccttccctcacgtgctgcctctgatcaccctgctggagtgcgattccgcaccccctgaggggcctgagccctggggtagtacagagcacggagtggaggtcgtcctcgcacatctggaggcggcaaggaccgtggctcatcacggaggcctgtaccatacaaacgcggaggttaagctgcaggggtttcaggccagaccagagctattggaggtgttctctacagagtttcaaatgcggctcttgtggggcagccagggagccagtagctcacaggctcgacgttacgaaaaatttgacaaggtgctgacggccctgtcacacaagcttgaaccagccgtcagaagttctgagctctag

SEQ ID NO: 156579 - DNA, 978 bp, Artificial Sequence
  derived and/or modified sequence
tagattcagggtgaggcgtcccgcagagccgctggtgagcccgaggctggctccgattacgtcaaatttagcaaagaaaaatatatcctcgacagctcccctgagaagctccataaagaattggaagaagagctgaagctctccagcaccgacctccggagtcacgcttggtaccatggacggatacctagagaagtgtctgagaccttggtacagagaaatggcgacttcctgatcagagattctttgacgtcgctgggagattacgtccttacctgtagatggaggaatcaggcacttcacttcaaaatcaataaggtggtagtgaaagcgggagagagctacacccacatccagtacctcttcgagcaggagagttttgatcatgttccggcattggttagataccacgttgggtctaggaaggcagtgtctgagcagtccggggcaatcatctactgccctgtcaaccggacattcccactcaggtatctggaggccagctacgggctcggccaaggcagctctaagcccgcaagcccagtttcaccaagcggacccaagggtagccacatgaaaaggcggtcagtgactatgacagacggcctcactgctgataaagtgactcgtagcgatggttgccccacgagtacttccttgccccgtccaagagattctatcaggtcctgcgccctctcgatggaccagatccctgacttgcatagccccatgtcgcccatttctgaatctccctcttctcctgcctattcgacagtgactagagtccacgcagcaccagcagccccttctgctaccgccctgcctgctagtccagtggcccgtcgctcaagcgagccacagctgtgcccaggttctgcccctaagacacacggagagtctgataaggggccacacaccagtcccagccatacactgggcaaggcctctccttcaccgagtctatcatcatactcatag

SEQ ID NO: 156580 - DNA, 976 bp, Artificial Sequence
  derived and/or modified sequence
atatccaaggggaggcgtccaggagggctgctggagagccagaggctggcagcgactatgtgaagttctccaaggagaagtacatcctggactcatcgccagagaaactccacaaggaattggaggaggagctcaaactcagcagcacggatctccgcagccatgcctggtaccatggccgcatcccccgagaggtctcggagaccttggtacaacgcaacggcgacttcctcatccgggactcactcaccagcctgggcgactatgtgctcacgtgccgctggcgcaaccaggccttgcacttcaagatcaacaaggtggtggtgaaggcaggcgagagctacacacacatccagtacctgtttgagcaggagagctttgaccacgtgcccgccctcgtgcgctatcatgtgggcagccgcaaggctgtgtcagagcagagtggtgccatcatctactgcccggtgaaccgcaccttcccactgcgctacctcgaggccagctatggcctgggacaggggagtagcaagcctgctagccccgtcagcccctcaggccccaagggcagccacatgaagcggcgcagcgtcaccatgaccgatgggctcactgctgacaaggtcacccgcagcgatggctgccccaccagtacgtcgctgccccgccctcgggactccatccgcagctgtgccctcagcatggaccagatcccagacctgcactcacccatgtcgcccatctccgagagccctagctcccctgcctacagcactgtaacccgtgtccatgccgcccctgcagccccttctgccacagcattgcctgcctcccctgtcgcccgccgttccagtgagccccagctgtgtcccggaagtgccccaaagacccatggggagtcagacaagggcccccacaccagcccctcccacacccttggcaaggcctccccgtcaccatcactcagcagctacagtga

SEQ ID NO: 156581 - protein, 576 aa, Artificial Sequence
  derived and/or modified sequence
MQVPQDGEDLAGQPWYHGLLSRQKAEALLQQNGDFLVRASGSRGGNPVISCRWRGSALHFEVFRVALRPRPGRPTALFQLEDEQFPSIPALVHSYMTGRRPLSQATGAVVSRPVTWQGPLRRSFSEDTLMDGPARIEPLRARKWSNSQPADLAHMGRSREDPAGMEASTMPISALPRTSSDPVLLKAPAPLGTVADSLRASDGQLQAKAPTKPPRTPSFELPDASERPPTYCELVPRVPSVQGTSPSQSCPEPEAPWWEAEEDEEEENRCFTRPQAEISFCPHDAPSCLLGPQNRPLEPQVLHTLRGLFLEHHPGSTALHLLLVDCQATGLLGVTRDQRGNMGVSSGLELLTLPHGHHLRLELLERHQTLALAGALAVLGCSGPLEERAAALRGLVELALALRPGAAGDLPGLAAVMGALLMPQVSRLEHTWRQLRRSHTEAALAFEQELKPLMRALDEGAGPCDPGEVALPHVAPMVRLLEGEEVAGPLDESCERLLRTLHGARHMVRDAPKFRKVAAQRLRGFRPNPELREALTTGFVRRLLWGSRGAGAPRAERFEKFQRVLGVLSQRLEPDR

SEQ ID NO: 156582 - DNA, 1731 bp, Artificial Sequence
  derived and/or modified sequence
atgcaggtgccccaggacggcgaggacctggccggccagccctggtaccacggcctgctgagcagacagaaggccgaggccctgctgcagcagaacggcgacttcctggtgagagccagcggcagcagaggcggcaaccccgtgatcagctgcagatggagaggcagcgccctgcacttcgaggtgttcagagtggccctgagacccagacccggcagacccaccgccctgttccagctggaggacgagcagttccccagcatccccgccctggtgcacagctacatgaccggcagaagacccctgagccaggccaccggcgccgtggtgagcagacccgtgacctggcagggccccctgagaagaagcttcagcgaggacaccctgatggacggccccgccagaatcgagcccctgagagccagaaagtggagcaacagccagcccgccgacctggcccacatgggcagaagcagagaggaccccgccggcatggaggccagcaccatgcccatcagcgccctgcccagaaccagcagcgaccccgtgctgctgaaggcccccgcccccctgggcaccgtggccgacagcctgagagccagcgacggccagctgcaggccaaggcccccaccaagccccccagaacccccagcttcgagctgcccgacgccagcgagagaccccccacctactgcgagctggtgcccagagtgcccagcgtgcagggcaccagccccagccagagctgccccgagcccgaggccccctggtgggaggccgaggaggacgaggaggaggagaacagatgcttcaccagaccccaggccgagatcagcttctgcccccacgacgcccccagctgcctgctgggcccccagaacagacccctggagccccaggtgctgcacaccctgagaggcctgttcctggagcaccaccccggcagcaccgccctgcacctgctgctggtggactgccaggccaccggcctgctgggcgtgaccagagaccagagaggcaacatgggcgtgagcagcggcctggagctgctgaccctgccccacggccaccacctgagactggagctgctggagagacaccagaccctggccctggccggcgccctggccgtgctgggctgcagcggccccctggaggagagagccgccgccctgagaggcctggtggagctggccctggccctgagacccggcgccgccggcgacctgcccggcctggccgccgtgatgggcgccctgctgatgccccaggtgagcagactggagcacacctggagacagctgagaagaagccacaccgaggccgccctggccttcgagcaggagctgaagcccctgatgagagccctggacgagggcgccggcccctgcgaccccggcgaggtggccctgccccacgtggcccccatggtgagactgctggagggcgaggaggtggccggccccctggacgagagctgcgagagactgctgagaaccctgcacggcgccagacacatggtgagagacgcccccaagttcagaaaggtggccgcccagagactgagaggcttcagacccaaccccgagctgagagaggccctgaccaccggcttcgtgagaagactgctgtggggcagcagaggcgccggcgcccccagagccgagagattcgagaagttccagagagtgctgggcgtgctgagccagagactggagcccgacagatag

SEQ ID NO: 156583 - DNA, 1731 bp, Artificial Sequence
  derived and/or modified sequence
atgcaggtgcctcaggacggggaggatctcgccggacagccatggtatcatgggttgctttcccgtcagaaggctgaagcactcctgcagcagaatggcgacttcctggtcagggcctctggctccaggggtggcaatccggtcattagttgccgctggcgcggatcggcactgcacttcgaggtgtttagggtagcactgcgacctcgacctgggcgacccaccgccctcttccagctggaagacgagcagttccctagcatcccggctcttgtccacagctatatgaccggcagaagaccccttagtcaagctacgggcgccgtagtcagcaggcctgtgacttggcaaggccctctgcggaggagcttttccgaggatacgctcatggacggccctgcaaggatcgagcctctgcgggcgcgtaaatggtcaaacagccagcccgcagatcttgcccacatgggaaggagtcgggaagaccctgccggcatggaagcctcaaccatgcccatcagcgctctgcctcggacctcttccgatcccgtgctgctgaaagccccagctccactcggtaccgtggccgactccctgcgggcaagtgacggccagttacaggctaaagcccccaccaagccacctagaacaccaagcttcgagctgcctgatgcatccgaaagaccccccacatactgtgagttggtgccccgggtcccttcagtacaaggcacaagcccctcgcagtcgtgtccggagcctgaggctccgtggtgggaagcggaggaagatgaggaagaggagaaccgttgtttcacccgaccccaggccgagatctccttctgtccacacgatgcaccgagctgcctccttggaccccagaatcggccactcgaaccccaggtcctgcatacactacgcggcctgtttctggagcatcaccctggttcaacggccctacatttgctgctcgttgattgccaagctaccggtctgctcggggttacccgggatcagcggggaaatatgggcgtttcgtctggtcttgaactactcacgctcccacatgggcaccacctacgtctcgaacttctcgagcgccaccagaccctggccctggcgggcgcgctcgcggtattaggatgtagtgggcccttagaggagagggccgcggccttgaggggactcgtggaactggcattggcactgcgccctggggccgctggcgatttaccaggactggccgccgtcatgggggcattgttgatgcctcaggtgtctcggctggagcacacctggcgtcagttgcgtagaagccacacagaggcagcactcgctttcgaacaagagctgaagccactcatgagagcactggatgagggcgccggaccctgtgatcctggcgaagtcgctctgcctcacgtggctccaatggtgagattgcttgagggtgaggaagtggcaggtccgcttgacgagagctgcgaaaggcttctccgcacacttcatggtgctcgccatatggtgcgagatgcacctaaattccgcaaggtagcagcacagaggttacgcgggtttagacctaatcctgagctgcgggaagcactcacgactgggttcgtaaggcgactgctatgggggtcaagaggagcaggggcacctcgtgccgaacggtttgagaagttccaacgagtcctgggagtgctgtctcagcggctggagcccgaccgctag

SEQ ID NO: 156584 - DNA, 1731 bp, Artificial Sequence
  derived and/or modified sequence
atgcaggtgccccaggatggagaggacctggccggccagccctggtaccacggcctgctgagccggcagaaggccgaggccctgctgcagcagaatggagacttcctggtgcgggccagcggcagccggggcggcaaccctgtgatcagctgccgctggaggggcagcgccctgcactttgaggtgttccgggtggccctgcggcccaggcctggccggcccacagccctcttccagctggaggatgagcagttccccagcatcccagccctggtgcacagctacatgactggaagaagacccctgagccaggccaccggggctgtggtgtccaggcctgtgacctggcagggccccctgcggcgctccttcagcgaggacaccctgatggatggccctgcccgcatcgagcccctgcgggccaggaagtggagcaacagccagcctgctgacctggcccacatgggccgcagccgggaggaccctgctggcatggaggccagcaccatgcccatcagcgccctgcccaggaccagcagtgaccctgtgctgctgaaggccccagcccccctgggcaccgtggccgacagcctgcgggccagtgatggccagctgcaggccaaggcccccaccaagccacccaggacccccagctttgagctgcctgatgccagcgagcggccccccacctactgtgagctggtgccccgggtgcccagcgtgcagggcaccagccccagccagagctgcccagagcctgaggccccctggtgggaggccgaggaggatgaggaggaggagaaccgctgcttcacccggccccaggccgagatctccttctgcccccatgatgcccccagctgcctgctgggcccccagaaccggcccctggagccccaggtgctgcacaccctgcggggcctcttcctggagcaccaccctggcagcacagccctgcacctgctgctggtggactgccaggccaccggcctgctgggcgtgacccgggaccagaggggcaacatgggcgtgagcagcggcctggagctgctgaccctgccccacggccaccacctgcggctggagctgctggagcggcaccagaccctggccctggccggggccctggccgtgctgggctgcagcggccccctggaggagagagctgctgccctgcggggcctggtggagctggccctggccctgcggcctggagctgctggggacctgcccggcctggccgctgtgatgggcgccctgctgatgccccaggtgtcccggctggagcacacctggaggcagctgcggcgcagccacacagaggccgccctggcctttgagcaggagctgaagcccctgatgagggccctggatgagggcgccggcccctgtgaccccggggaggtggccctgccccacgtggcccccatggtgcggctgctggagggggaggaggtggccggccccctggatgagagctgtgagcggctgctgcggaccctgcacggggcccggcacatggtgagagatgcccccaagttcaggaaggtggccgcccagaggctgcggggcttccggcccaaccctgagctgcgggaggccctgaccactggatttgtgcggcggctgctgtggggcagcagaggagctggggcccccagggctgagagatttgagaagttccagagggtgctgggcgtgctgagccagaggctggagccagacagatag

SEQ ID NO: 156585 - DNA, 1731 bp, Artificial Sequence
  derived and/or modified sequence
atgcaggtgccccaggacggcgaggacctggccggccagccctggtaccatgggttgttgtctaggcaaaaggcggaggccctccttcagcagaatggcgatttccttgtgcgcgcctcaggctcccgcggaggaaaccccgtcatctcatgtcggtggcggggatcagctctgcatttcgaggtcttccgcgtggcactgagacccagacccggacggcccaccgcattgtttcaactcgaggacgaacagttccccagcattcccgctctggtccattcctatatgaccgggagaaggcccctcagccaagccactggtgcagtggtatcaagacctgtgacctggcagggcccactaagacggtcctttagcgaggacacgttaatggacgggcctgcgaggatcgagcccctgcgcgcacgtaagtggagtaatagtcagcccgctgatctggctcatatggggagatcaagggaggaccccgctgggatggaggctagtacgatgccaatttccgcgcttccccgaacgagctcagaccctgtcctgctgaaggccccggcccctttgggaaccgttgccgattccctccgggccagcgatggccagctgcaggccaaggcgcccactaaacctccacggacgccctccttcgagctgcccgacgctagcgaacgaccgcctacctattgcgagttggtgccacgggtgccctcggtgcaaggcacgagcccttctcagtcatgtcctgagcccgaagctccttggtgggaggccgaggaagacgaagaagaagagaatcggtgcttcaccaggccgcaggctgagataagcttctgcccacatgacgctcccagctgtcttctgggcccccagaacaggcccctggagcctcaggttctgcacacactgagaggattattcttagagcatcacccgggctcaacagccctgcatctgttgttagtggattgccaggctaccggtctgcttggcgtcacgcgcgatcagcggggtaatatgggcgtaagttccggcctcgagctccttaccctcccacacggccatcatcttcggctcgaactcctggagcgacaccagacactggccctggcaggagccttagccgtccttggctgttctggacccttggaggagagagctgcagccttgaggggacttgtcgaattggctctggcgctgcgtcccggggcagctggagacttgcctggactggcagccgtgatgggggccctcctcatgcctcaggtgtcaagactcgaacatacatggcgacaactgaggcgttcgcacaccgaagcagcactggcattcgaacaggaacttaaaccgttgatgcgagccctcgacgagggggccggaccctgtgatcctggagaggtggcactaccccatgttgcacccatggttaggctgttagaaggcgaggaggtcgcaggtccgctggacgagtcttgcgaaaggctgctgagaactctgcacggtgccagacacatggtcagggatgctcccaaattccgcaaggtcgccgctcagcgcctccggggttttaggcctaaccccgaattgcgcgaggctttaaccacgggcttcgtaagaagattgttgtggggaagcagaggagctggcgccccaagggctgagcggttcgaaaaattccagcgggtgctgggtgtgctgtcgcagcggttagagcccgatcggtag

SEQ ID NO: 156586 - DNA, 1731 bp, Artificial Sequence
  derived and/or modified sequence
atgcaagttccccaggacggcgaggacctggccggacaaccctggtaccatggtctgctctccaggcagaaagctgaggctctgctgcagcagaacggcgatttcctggttcgcgcttccggtagccggggaggcaatcccgtaatctcttgtcgctggagaggatctgccctccactttgaggtgtttcgggtggccctccgtccacgcccagggaggccaactgcactgttccaattagaagacgagcagttcccttccattcctgcactcgtgcatagctatatgacgggacgtcgaccgttaagccaggccaccggtgccgtggtctccagaccagtcacttggcagggccctttacggagatctttcagtgaagatacactgatggatggcccagcacggatcgaacctcttcgggctcgtaaatggtctaactctcagcctgcagacctggcccacatgggaagatcgcgcgaagacccagcgggaatggaggcaagtactatgccaatcagtgcactgcctaggacaagcagcgaccctgtactcttgaaggccccagctcccttgggaactgtggcagatagtctgcgcgcttcagacggccagctgcaggccaaagcccctacgaaacctcccaggacaccgtccttcgaactgcctgatgcaagcgagcgccctcccacctactgcgagctggtgccacgcgtgccttcagtacagggcaccagtcccagtcagtcctgtcccgagcccgaggcgccttggtgggaggcagaggaggatgaggaagaggagaacaggtgcttcactcgccctcaagcagaaatctccttctgtccccacgacgctccatcctgcttgctgggtccccagaatcgtcccctggagccacaagtgctccacacactcagaggactcttcctagagcaccacccaggctctactgcactccacctccttctcgtagactgtcaggccacaggcctgctgggagtcacccgcgaccagagagggaacatgggagtctctagcggcttggagctcttgaccctgccccatgggcaccatctgcggctggaactcctggagaggcaccagacactggcactagccggagctctggctgtgttagggtgcagcggaccgctagaagagcgggctgcagcactccgcggtctggtggaactggcactggctctccgcccaggtgcagctggcgacttacctgggctggctgccgtcatgggcgctctgctcatgcctcaagttagtcgcctggagcacacttggcgacagttacgccgatctcatacagaagccgcactcgcttttgagcaagagttaaaaccactaatgcgggcactagatgagggagcaggcccttgcgaccccggagaggtcgctttacctcatgtggctccgatggtgcgattgctcgaaggggaggaagtcgccggacctttggatgagtcttgcgaaagactgctcagaactctccatggcgctcgccatatggtccgggatgctcccaaattcaggaaggtagccgcacagagactgaggggattcaggccgaatccggagctgagggaggccctgacaaccggattcgttaggcgactgctctggggatctaggggcgctggggctccaagagccgaacgtttcgagaaatttcagcgcgtgctaggagtcttatctcaacggctcgagccggaccgctag

SEQ ID NO: 156587 - DNA, 2318 bp, Artificial Sequence
  derived and/or modified sequence
taggtgtggtctgggaaggctggggcggtggcaaggtggagggcgggggtgacagcagcccggagccgcggagcctcagcttccgcctggacccagcctcgtgggagccccgcgggtcctgcccagatgtggaagactgaggcctgttgaaagtgcagagctcagccctggcaccctctgttcccaagagctccatgcaggtgccacaggatggagaagaccttgctggccaaccttggtaccacggcctcctgtcccgccagaaggctgaagctcttcttcagcaaaatggcgacttcctggttcgcgcctctgggtcccgtgggggcaaccccgtgatctcctgccgctggcggggctcagccctccattttgaggtgttccgtgtggccctgcgtccccggccaggccgacccacagccctctttcaactggaggatgagcaattccccagcataccggctctggttcacagttatatgacaggcaggcgcccactgtcccaggccacaggggctgtggtctccaggcctgtgacttggcaggggcctctgcgacgcagctttagcgaggacaccctgatggatggcccagctcggatagagcctctcagggcaaggaagtggagcaacagtcagcctgcagatttggcacatatggggcggtcaagagaagaccccgctgggatggaagcctccaccatgcccatatctgccttgccccgaacgagcagtgacccggtgttgctgaaggcccctgctcccctgggaactgttgccgacagtctcagggcctccgatgggcagcttcaagccaaggcaccaacgaagcccccccggacaccctccttcgaactgcctgatgcctctgaacgtcccccgacgtactgcgagctggtgccccgagtgcccagtgtccagggaacatccccgagccaaagctgcccagagccagaggccccatggtgggaggccgaggaggatgaggaggaagagaatagatgttttacaagaccacaggctgagatctctttctgcccccatgatgccccctcctgcctgctgggcccccagaatcggcccctggaaccccaagtcctgcataccctccgtggcctgttcctggagcaccatcctgggagcaccgcccttcacctgctattggtagactgccaggccacaggcctcctgggagtgaccagagatcagcggggcaacatgggagtctcatctggcctggagctgctcactcttccccatggacaccacttgaggttggaactgctggagaggcatcagacactggcgctggccggggcgctggcggtgctgggctgctcggggccgctggaggagcgcgcagccgcactgaggggactggtagagctggcgctggcgctgcggccaggggcggcgggggacctgcccgggctggctgcagtcatgggcgccctgctcatgccccaggtgtcccggttggagcacacgtggcgccagctccgaaggagccacacggaggctgcgctggcctttgagcaggagctgaagccgctgatgcgggctctggatgagggcgctggaccctgcgaccccggcgaggtggcgctgccgcacgtggcacccatggttcgcctactggagggcgaggaagtcgcggggccgctggacgagagctgtgagcggctgttgcgcaccctgcacggggcgcgtcacatggtccgggacgcacccaaattccgcaaggtggcagcccagcgcctgcgaggattccggcctaacccggagctgagggaggccctgaccaccggcttcgtgcggaggctgctctggggtagccggggcgcgggagctccgcgcgctgaacgctttgagaagttccagcgcgtcctcggcgtcctgtcgcagcgcctggagcctgaccgctgagagcgcagacacccttcttcacacccgggacccccaggtttttgcgaaccccagaagagaccaaaggagtcgtcccaggctcctcgcgcctcaggtggaatcctgccctgtgcctcacagaagaggtggggaccgcagtcagggtcacctggaccatggtgaacatgtgacctgcagatctggcatcagaggccagagttcaaatgtgactccacctcttaaaagccgtgatttctagcagttgacttcacctctgtgtcggcctttaacaaaatcatagccatacagcagctcaggcctgtaatctcagcactttgggaggccgaggcggaaggaaggcttgaggccaggagttcaagaccagccagggcaacatggtgagacctcatctct

SEQ ID NO: 156588 - protein, 774 aa, Artificial Sequence
  derived and/or modified sequence
MDDWKSRLVIKSMLPHFAMVGNRQEPRKLQESGKKPSWMEEEDLSFLYKSSPGRKHQGTVKRRQEEDHFQFPDMADGGYPNKIKRPCLEDVTLAMGPGAHPSTACAELQVPPLTINPSPAAMGVAGQSLLLENNPMNGNIMGSPFVVPQTTEVGLKGPTVPYYEKINSVPAVDQELQELLEELTKIQDPSPNELDLEKILGTKPEEPLVLDHPQATLSTTPKPSVQMSHLESLASSKEFASSCSQVTGMSLQIPSSSTGISYSIPSTSKQIVSPSSSMAQSKSQVQAMLPVALPPLPVPQWHHAHQLKALAASKQGSATKQQGPTPSWSGLPPPGLSPPYRPVPSPHPPPLPLPPPPPPFSPQSLMVSCMSSNTLSGSTLRGSPNALLSSMTSSSNAALGPAMPYAPEKLPSPALTQQPQFGPQSSILANLMSSTIKTPQGHLMSALPASNPGPSPPYRPEKLSSPGLPQQSFTPQCSLIRSLTPTSNLLSQQQQQQQQQQQANVIFKPISSNSSKTLSMIMQQGMASSSPGATEPFTFGNTKPLSHFVSEPGPQKMPSMPTTSRQPSLLHYLQQPTPTQASSATASSTATATLQLQQQQQQQQQQPDHSSFLLQQMMQQPQRFQRSVASDSMPALPRQGCCHLFAWTSAASSVKPQHQHGNSFTSRQDPQPGDVSPSNITHVDKACKLGEARHPQVSLGRQPPSCQALGSESFLPGSSFAHELARVTSSYSTSEAAPWGSWDPKAWRQVPAPLLPSCDATARGTEIRSYGNDP

SEQ ID NO: 156589 - protein, 646 aa, Artificial Sequence
  derived and/or modified sequence
MEEEDLSFLYKSSPGRKHQGTVKRRQEEDHFQFPDMADGGYPNKIKRPCLEDVTLAMGPGAHPSTACAELQVPPLTINPSPAAMGVAGQSLLLENNPMNGNIMGSPFVVPQTTEVGLKGPTVPYYEKINSVPAVDQELQELLEELTKIQDPSPNELDLEKILGTKPEEPLVLDHPQATLSTTPKPSVQMSHLESLASSKEFASSCSQVTGMSLQIPSSSTGISYSIPSTSKQIVSPSSSMAQSKSQVQAMLPVALPPLPVPQWHHAHQLKALAASKQGSATKQQGPTPSWSGLPPPGLSPPYRPVPSPHPPPLPLPPPPPPFSPQSLMVSCMSSNTLSGSTLRGSPNALLSSMTSSSNAALGPAMPYAPEKLPSPALTQQPQFGPQSSILANLMSSTIKTPQGHLMSALPASNPGPSPPYRPEKLSSPGLPQQSFTPQCSLLHYLQQPTPTQASSATASSTATATLQLQQQQQQQQQQPDHSSFLLQQMMQQPQRFQRSVASDSMPALPRQGCCHLFAWTSAASSVKPQHQHGNSFTSRQDPQPGDVSPSNITHVDKACKLGEARHPQVSLGRQPPSCQALGSESFLPGSSFAHELARVTSSYSTSEAAPWGSWDPKAWRQVPAPLLPSCDATARGTEIRSYGNDP

SEQ ID NO: 156590 - DNA, 4608 bp, Artificial Sequence
  derived and/or modified sequence
ccctgtgtctaggtcgtttgggaaacgccttggagagtcaagaataaatttgcaggtcaaacaatggatgactggaaaagtcggcttgtaatcaagagcatgcttccccatttcgccatggtgggaaatcgtcaggagcccagaaagctccaggaatcgggaaagaagccctcgtggatggaggaagaagatttatcttttctctacaagagcagcccaggaagaaagcatcagggaactgttaagaggagacaagaagaagaccacttccagtttccagacatggctgatgggggctaccctaataaaattaagaggccttgccttgaagatgtcacccttgcaatgggcccaggtgctcatcctagtactgcttgtgcagaactgcaggtccctccattgacaataaatcctagccctgcggctatgggagtggctggccagtcattactgctggagaataaccctatgaatggcaacatcatgggctcaccatttgtagtaccacagactacagaagtgggactgaaagggcccactgttccttactatgagaaaatcaacagcgtgccggctgtagaccaggagcttcaagagctgctagaggagctcaccaaaattcaagacccttctccaaatgagctagatcttgagaagatactggggacgaagccagaagagccactggttttagatcatccccaggcaaccctaagcacaactcccaagccttcggttcagatgtcacacttggagagcctggcttccagcaaggagtttgcttctagttgcagccaagttactggcatgtcacttcagatcccatcctcctccacagggatcagctattcgattccttccaccagtaagcagatagtgtcaccgagttcttcaatggcacagtccaagagccaggtccaggccatgctccctgtcgctctgccccccttaccagtgcctcagtggcatcacgcccaccagctgaaggcgttggcagccagcaagcaggggtctgctacaaagcagcaagggcccacccccagttggtctggtctgcctcctccaggactctctccaccttaccgcccagtgccatcaccacacccaccaccgctgccactgccaccaccaccacccccattcagcccccagagcctcatggtgtcctgcatgtcgtccaataccttgtcgggtagcactctccgaggctctcccaatgccttactgtcaagcatgacgtccagcagcaatgctgccctggggcccgccatgccctatgctcctgagaagctccccagccctgctctcactcaacagccgcagttcggccctcagagctccattcttgccaacctcatgtcctctaccatcaaaacccctcaaggacacctgatgtctgctctgcctgccagcaaccctgggccgtccccaccctatcgcccagagaagctctctagcccaggcttgccacagcagtccttcaccccacagtgttccctgatccgaagcctcactcccaccagtaatcttctaagccagcaacagcagcagcagcagcagcagcagcaagcaaatgtgatctttaagcccataagcagcaactcatccaaaaccctgagcatgatcatgcagcaggggatggcaagctccagcccaggagccacggagccatttacttttggcaacaccaagcccttgtcccattttgtttctgagccgggtccccagaagatgccctccatgcctaccacctctaggcagccttccctgctccactacctgcagcagccgacaccaacgcaggcctcctcagccactgcctcctccacggccactgccaccttgcagctgcagcagcagcagcagcaacagcagcagcagcctgaccattcttcattccttctgcagcagatgatgcagcaaccccagcgttttcagcgatcagtggcctcagattccatgcctgctctgcccagacagggctgttgccatctgtttgcatggacttctgcagctagctcggtgaagccccagcatcaacacgggaactctttcactagcaggcaagatcctcagcctggagacgtgtcaccgtctaacattactcatgtagacaaagcctgcaagcttggggaagccaggcacccccaggtcagcctcgggcgacagcccccgtcctgccaggccctggggagtgagtccttcctgcccggcagctcctttgctcatgagctggcccgagtcacctcctcgtacagcacctcagaggcagcgccctggggcagctgggatccgaaggcctggaggcaggtgcccgctccactactgcctagctgcgacgccacagcaagaggaacagagatcaggtcttatggcaatgacccctgaacggcagaatgcatatatctcccaacagatgagtccatttgaagccgtccaagaacaagtcacctccaagtgtagccggatcaaggcaagccccccatctagcaagcacttgatgccacccagaactgggcttcttcagaacaatctgagtccaggaatgatcccactcaccaggcaccagagctgcgagggcatgggagtgatctcaccaactctggggaagcggcaaggaattttcacctccagcccccagtgtcccatcctctcacactcaggccagactcccctgggcagacttgactctgtctgccagcatatgcagagccccaaggccaccccaccagaagtgcccctgcctgggttctgtcccagctccctgggcacccagtccttgagtccccaccagctcagacggcctagtgtgccaagaatgcccactgcgttcaacaatgctgcatgggtcacagcggcagcagctgtgaccacagcagtttcggggaaaacacccctcagccaagtggataatagcgttcagcagcactcaccttctggccaggcctgccttcagaggccatctgattgggaggcacaagtgcccgctgcgatgggaacacaagtgcccctggccaacaaccccagcttcagcctgctgggcagccagagcctcaggcagagcccggtacagggcccggtgcctgtagcaaacaccaccaagttcctccagcagggtatggccagctttagtcccctgagccccatacagggcatcgagccaccaagctatgtggctgctgctgccaccgctgctgctgcttctgccgttgctgccagccagttcccaggtccgttcgacagaacggatattccccctgagctgccacctgccgactttttgcgccagccccaacccccactaaatgatctgatttcgtcacctgactgcaatgaggtagatttcattgaagctctcttgaaaggctcctgtgtgagcccagatgaagactgggtgtgcaacttgaggctgatcgacgacattttggaacagcatgctgctgctcaaaatgccacagcccagaattctgggcaagtcacccaggatgctggggcactttaaatctgagcaggatgcccatagaaacccccatggtgacatcactctaggaagtggtgtcgatccatacccgcagttgtctcccgttacaatttgagtggtgttgtcagcccatgcttatccctctctctacctgtgacaaaatggaaagctggtgatttttcaagctacgtgtacatatttgaaaattttgtaaatggttttcctaaacattaatgacagaagtatttatacttcattttgtgactttgtaaataaagcgacggcttttgtttcagtagagttgtgtttactatgcattgttttgtgtttattatacaatgttacaaatatgcagaccgtgttgtttgctccagtgataccttgttaagctaggtggctgagtcgcttatggttttaatgcaatgagcaatgtggatatgaccaagagttgttgtgcaagttgacaaatgccaaatagaaaaccacttggccatttatttctatgttcactaaaaatcctattgccttgtgtgattcttaatctcttttgcgaacctttcagtctccgctagctctttcctaatgagctttacagcagaagctgttttatcgttaagtgccccacagagacactttaccaggaggctgggagagttctccagatttgggagaggcgcagagacagtgtgtgagccgagccctgtctcagcaatccacctggaggagctagagtatcctcctccctttaccattcagaccgagagaaaaagcccagcttgtgtgcaccctcgtggggttaaggcgagctgttcctggtttaaagcctttcagtatttgttttgatgtaaggctctgtggtttgggggggaacatctgtaaacattattagttgatttggggtttgtctttgatggtttctatctgcaattatcgtcatgtatatttaagtgtctgttatagaaaacccacacccactgtcctgtaaacttttctcagtgtccagactttctgtaatcacattttaattgccacctcgtatttcacctctacatttgaaatctggcgtctgtttcaagccagtgtgttttttcttcgttctgtaataaacagccaggagaaaagtgcca

SEQ ID NO: 156591 - DNA, 2325 bp, Artificial Sequence
  derived and/or modified sequence
atggacgactggaagtctaggctggtgataaaatcaatgttgccccattttgcgatggttgggaaccgccaggagccaagaaagctgcaggagagtggtaagaagccgagctggatggaggaagaagacctgagctttttatataagagcagccctggcagaaagcaccagggcacagtgaaaagaagacaggaagaggaccatttccagttccctgatatggctgatggaggatatcccaacaagattaaacgcccctgtctggaggatgttacccttgccatgggacctggcgcccacccaagcaccgcctgcgctgaactccaggtaccccctctaaccatcaatccgtcgcccgccgctatgggcgtcgccggacagagcctgctgctcgaaaataatcctatgaacggcaatattatgggctctccattcgtcgtcccccagactacagaggttggcctaaaagggcccaccgtgccctactatgagaagattaatagcgtgcccgcagtggaccaagagttgcaagagctgctcgaagaactcacgaagattcaggacccaagcccgaatgaacttgacctggagaagattctgggcacaaaaccagaggagccattggtgctggatcatccacaggccaccctatcaacaacccctaaaccaagtgtccagatgagccatcttgaatccctagcatcgagcaaggagtttgctagttcttgctctcaagtaaccgggatgtctctccagattccaagctcatccacaggtatttcttattcaatcccttcaaccagcaaacaaatagtctccccctcgtcctctatggctcagagcaagagtcaggtacaagcaatgctgccagtggcattgccgcctctgccagtgccccagtggcaccacgctcatcaacttaaagcgctggcggccagtaagcagggaagcgctaccaagcaacagggtccaaccccgtcctggtctggcctccccccccctggcctgagccccccgtatagacctgtgccgtccccccatcctccccccctcccgcttcctcccccgcctcctccattttccccgcagtcactgatggtttcatgcatgtcttcaaataccctgtccggctcaactctgagaggaagtcccaatgcactgctgagcagtatgacaagctccagtaatgcagccctgggtcccgctatgccctacgctcctgagaagctcccttcacccgccctgactcagcagccccagttcggtccacagagcagtatcctcgctaatctgatgtcctccactataaagacaccacagggccacctgatgtccgctctccccgcttccaatcctggccctagccctccttaccggcctgaaaaactgagttcacccggactgcctcagcagagcttcaccccacagtgttccctgatcagaagtctcacccccacctcaaatttactctcccagcagcagcaacagcagcagcaacagcaacaggccaacgtgatattcaagcctatttccagtaattcatcaaagactctttcgatgatcatgcagcagggtatggccagctccagcccgggtgccaccgaacctttcacattcgggaatactaaacctcttagccactttgtctccgaaccaggacctcaaaaaatgccatctatgcctaccacttctcggcaaccatctttgctccactacctgcagcaacctacacccacccaggcctcaagtgcgactgcatccagtacagcaacggccacactacagcttcaacaacagcagcagcagcagcagcagcagcccgaccactctagcttccttctacagcagatgatgcagcagccacagagattccaaaggtctgtagcaagtgacagcatgcctgcccttccccggcaaggatgttgtcatctcttcgcctggacctccgctgctagttccgtgaagccccagcaccagcatgggaattccttcacctctcgccaggatcctcagcctggggatgtctctccctccaatatcacccacgttgacaaagcctgcaaactgggggaagcccgacaccctcaggtgagtctgggtaggcagcctccctcgtgccaggcactgggatccgaatcttttctgcctgggagtagctttgcccacgaactcgcccgtgtcacttcgtcatattccacaagcgaagctgctccctgggggagctgggaccccaaggcatggcggcaggtccccgctcctctactgccctcttgcgacgccacggcccgagggaccgagattaggtcttacgggaacgatccctag

SEQ ID NO: 156592 - DNA, 2325 bp, Artificial Sequence
  derived and/or modified sequence
atggatgattggaagtcgcgactggtgatcaaatcaatgctgccacattttgcgatggtaggtaataggcaggagccgcggaagctccaggagtccgggaagaagcctagttggatggaagaagaggacctctctttcctgtataagagcagccctggccgaaaacaccagggcacagtaaagcggaggcaggaagaggaccactttcagttcccggacatggcggacggcggttacccaaacaagataaagagaccatgtctggaggatgtaaccctggccatggggcccggtgcccatccctccaccgcatgcgcagagctgcaagtcccaccccttaccatcaatccctcccccgccgccatgggcgtcgcaggccagtcattgctgctggagaataaccccatgaacggaaacattatgggttcgccattcgtggtgcctcagactactgaggtgggactaaagggcccaactgtgccatactatgaaaagattaactcagtgcccgcagtggaccaagagcttcaggagttactcgaggagctgaccaaaatccaggacccgagccctaacgagctggacctcgaaaagatactcggcactaaaccagaagagcccctagttctggatcaccctcaagcaaccctgtctacaaccccaaaaccgtcggtccagatgtcacacctggagagtttagcttcatctaaggagttcgcatcatcttgtagtcaggtcactggtatgtccctgcagattcctagttcttcaacaggtatttcctacagcatcccgagtacctccaagcagatcgtaagcccttctagcagcatggcacagagtaagagccaggtgcaagcgatgttgccagtcgccctgccccctctgccagttccccaatggcatcatgcgcatcagctaaaagccctggccgcctccaagcaaggctccgctactaagcagcagggcccaaccccatcatggagtgggctccccccgcctggcctatcccccccataccgccctgtgcccagcccacaccctccccctcttcccttacccccaccaccaccgcccttttcaccccagtctctcatggtgtcttgtatgagtagtaacacattgagcggctccacactcagggggtcaccaaacgccctgctctcatctatgacctccagtagcaacgccgcactcggccctgccatgccttatgccccggaaaaactgccaagtccagcactgacacaacagccgcagttcggaccgcaaagttccatcctggctaatttaatgagctctactattaaaacgccacaaggccatcttatgtccgctctgcctgcctccaaccctggcccatcacctccataccgtcctgagaagctgagctcccctgggctcccacagcagagctttacaccccagtgttctttgattcgatctcttacacctacaagtaacctgctcagtcagcagcagcagcagcagcagcagcagcaacaggcgaacgtgatatttaagccaatcagttccaactcctcgaagactttgtctatgataatgcaacaagggatggcttcttcaagtcctggcgctaccgagcccttcacattcggcaacaccaagccactgagtcactttgtgtccgaaccagggccccaaaagatgccctcaatgccgacaacatctaggcagccatctttgttgcactacctccagcagcccacacctacccaagccagcagtgcaactgcaagctccacagcaacagccacactgcagctccagcagcagcagcagcaacagcagcaacagcctgaccatagttccttcctgctgcaacagatgatgcagcaacctcagcggtttcagaggtccgtcgcctccgatagcatgcccgctctccctagacaaggatgctgccatctgtttgcctggacgtctgcagcttctagcgtgaaaccccaacaccagcacggaaatagctttacctcaaggcaggacccacagccgggcgatgttagccccagcaacatcacgcacgtagacaaagcatgcaagcttggtgaagcgcgtcatcctcaggtttcactagggagacagccgccaagctgtcaggctctcggcagcgaatcgttcctgcctggttctagcttcgcacacgagctcgcccgggtaaccagctcctatagcacatcagaagcggccccctggggctcctgggaccctaaagcatggaggcaggtccccgcacccttattgccctcatgcgatgccaccgctagaggaaccgagatccggagctatggtaacgacccatag

SEQ ID NO: 156593 - DNA, 1941 bp, Artificial Sequence
  derived and/or modified sequence
atggaggaggaggacctctcatttctctacaaatcaagccctgggaggaagcatcaggggactgtaaagagaagacaggaggaggatcacttccaattccctgatatggccgacggcggctatcccaacaagatcaaaagaccctgcctggaggacgtgaccttggctatgggcccaggtgcgcatccttctactgcatgcgctgaactgcaggtgccccccctgacaattaacccgtcaccagccgccatgggggtggcgggtcagagtttgctgctggaaaacaacccgatgaacgggaatatcatggggtctccattcgtggtgccccagactacggaggtcggcttgaaaggccctactgtcccctattacgaaaaaatcaacagtgtccctgccgttgatcaggagctccaagaacttcttgaggaattgactaagattcaggacccctcccccaatgaattagatttggaaaagatcctgggcaccaagccggaagaaccccttgttcttgaccacccacaggccaccttgtccactacgccgaagccttccgttcagatgtctcacttagagagtctcgcttcatccaaagagtttgcatccagctgctcacaggtgactggaatgtctctgcagatcccctcttcatctacaggaatttcttactccatcccttccacaagtaagcagatagtaagcccatctagctccatggcacaatcaaaatcgcaggtgcaggctatgctgcccgtggcattacctcccctacctgttccccagtggcaccatgcacaccaattgaaggcgctcgccgctagcaagcagggatctgccacaaagcaacaaggccctacgccaagctggagcggactgccccccccaggcctctcacccccatatagacccgtcccgtccccccacccacccccgctgcccctgcctccaccacctcccccttttagtccacagtctctaatggtgtcatgtatgtctagtaataccctctccggctctacgctgcggggctcacccaacgcgcttttatccagcatgactagctcttcaaacgcggcccttggaccggctatgccttatgctccagagaagttgccctcccctgccctgactcaacagccacagttcggaccccagtcgtcgatcttggctaacttaatgagcagtactatcaagaccccacaggggcacctcatgtctgcccttcctgcaagcaaccctggtccctctcctccatacagacccgaaaagctctcaagtcctggcctaccccagcagtccttcaccccccaatgctccttgctgcactatcttcagcagcccacacccacccaagcatcttcagctacggccagcagcactgctacagctactctgcagctgcagcagcaacagcagcaacagcagcagcagcctgaccatagttccttcttacttcagcagatgatgcagcagccacaaaggtttcagagatctgttgcctcagattctatgcccgctctcccccggcagggctgttgtcacctgttcgcatggacgtcagcggcctcaagtgtcaagccccagcaccagcatggaaactcctttacttctaggcaagatccccagccgggtgatgtgagtccctcgaatatcacgcatgtcgacaaagcatgtaaactcggtgaggcgcgtcatcctcaggtgtccctagggagacagccgcccagctgccaggcgctgggctctgagagcttcctgccaggaagtagtttcgcccacgagttggcacgcgtaactagcagctacagcacctctgaggccgcgccgtggggatcgtgggacccaaaagcatggcgccaggtgcctgctccccttctgccctcatgtgatgctactgcccgcggaacagaaattcgcagctatggaaacgacccttag

SEQ ID NO: 156594 - DNA, 2325 bp, Artificial Sequence
  derived and/or modified sequence
atggatgactggaagagccggctggtgatcaagtccatgctgccccactttgccatggtgggcaaccggcaggagcccaggaagctgcaggagagcggcaagaagcccagctggatggaggaggaggacctgtccttcctgtacaagagcagccctggcaggaagcaccagggcaccgtgaagaggcggcaggaggaggaccacttccagttcccagacatggctgatggcggctaccccaacaagatcaagaggccctgcctggaggatgtgaccctggccatgggccctggggcccaccccagcacagcctgtgccgagctgcaggtgccccccctgaccatcaaccccagccctgctgccatgggcgtggccggccagagcctgctgctggagaacaaccccatgaatggaaacatcatgggcagcccctttgtggtgccccagaccacagaggtgggcctgaagggccccaccgtgccctactatgagaagatcaacagcgtgcctgctgtggaccaggagctgcaggagctgctggaggagctgaccaagatccaggaccccagccccaatgagctggacctggagaagatcctgggcaccaagccagaggagcccctggtgctggaccacccccaggccaccctgagcaccacccccaagcccagcgtgcagatgagccacctggagagcctggccagcagcaaggagtttgccagcagctgcagccaggtgacaggcatgagcctgcagatccccagcagcagcacaggcatctcctacagcatccccagcaccagcaagcagatcgtgagccccagcagctccatggcccagagcaagagccaggtgcaggccatgctgcctgtggccctgccccccctgcctgtgccccagtggcaccacgcccaccagctgaaggccctggccgccagcaagcagggcagcgccaccaagcagcagggccccacccccagctggagcggcctgcccccacctggcctgagccccccctacagacctgtgcccagcccccaccccccacccctgcccctgcccccacctcctccacccttcagcccccagagcctgatggtgtcctgcatgagcagcaacaccctgagcggcagcaccctgcggggcagccccaatgccctgctgagctccatgaccagcagcagcaatgctgccctgggccctgccatgccctatgcccctgagaagctgcccagccctgccctgacccagcagccccagtttggcccccagagcagcatcctggccaacctgatgagcagcaccatcaagaccccccagggccacctgatgtctgccctgcctgccagcaaccctggccccagccccccctacagacctgagaagctgagcagccctggcctgccccagcagagcttcaccccccagtgcagcctcatccgcagcctgacccccaccagcaacctgctgagccagcagcagcagcagcagcagcagcagcagcaggccaacgtcatcttcaagcccatcagcagcaacagcagcaagaccctgtccatgatcatgcagcagggcatggccagcagcagccctggggccacagagcccttcacctttggaaacaccaagcccctgagccactttgtgtctgagcccggcccccagaagatgcccagcatgcccaccaccagccggcagcccagcctgctgcactacctgcagcagcccacccccacccaggccagcagcgccacagccagcagcacagccacagccaccctgcagctgcagcagcagcagcagcagcagcagcagcagcctgaccacagcagcttcctgctgcagcagatgatgcagcagccccagcgcttccagaggtctgtggccagtgacagcatgcctgccctgccccggcagggctgctgccacctgtttgcctggaccagcgctgccagctctgtgaagccccagcaccagcacggcaacagcttcaccagccggcaggacccccagcctggagatgtgagccccagcaacatcacccacgtggacaaggcctgcaagctgggggaggcccggcacccccaggtgtccctgggccggcagccccccagctgccaggccctgggcagcgagagcttcctgcccggcagcagctttgcccacgagctggcccgggtgaccagcagctacagcaccagcgaggccgccccctggggctcctgggaccccaaggcctggaggcaggtgcctgcccccctgctgcccagctgtgatgccacagcccggggcacagagatccgctcctatggaaatgacccctag

SEQ ID NO: 156595 - DNA, 1941 bp, Artificial Sequence
  derived and/or modified sequence
atggaggaggaggacctgtccttcctgtacaagagcagccctggcaggaagcaccagggcaccgtgaagaggcggcaggaggaggaccacttccagttcccagacatggctgatggcggctaccccaacaagatcaagaggccctgcctggaggatgtgaccctggccatgggccctggggcccaccccagcacagcctgtgccgagctgcaggtgccccccctgaccatcaaccccagccctgctgccatgggcgtggccggccagagcctgctgctggagaacaaccccatgaatggaaacatcatgggcagcccctttgtggtgccccagaccacagaggtgggcctgaagggccccaccgtgccctactatgagaagatcaacagcgtgcctgctgtggaccaggagctgcaggagctgctggaggagctgaccaagatccaggaccccagccccaatgagctggacctggagaagatcctgggcaccaagccagaggagcccctggtgctggaccacccccaggccaccctgagcaccacccccaagcccagcgtgcagatgagccacctggagagcctggccagcagcaaggagtttgccagcagctgcagccaggtgacaggcatgagcctgcagatccccagcagcagcacaggcatctcctacagcatccccagcaccagcaagcagatcgtgagccccagcagctccatggcccagagcaagagccaggtgcaggccatgctgcctgtggccctgccccccctgcctgtgccccagtggcaccacgcccaccagctgaaggccctggccgccagcaagcagggcagcgccaccaagcagcagggccccacccccagctggagcggcctgcccccacctggcctgagccccccctacagacctgtgcccagcccccaccccccacccctgcccctgcccccacctcctccacccttcagcccccagagcctgatggtgtcctgcatgagcagcaacaccctgagcggcagcaccctgcggggcagccccaatgccctgctgagctccatgaccagcagcagcaatgctgccctgggccctgccatgccctatgcccctgagaagctgcccagccctgccctgacccagcagccccagtttggcccccagagcagcatcctggccaacctgatgagcagcaccatcaagaccccccagggccacctgatgtctgccctgcctgccagcaaccctggccccagccccccctacagacctgagaagctgagcagccctggcctgccccagcagagcttcaccccccagtgcagcctgctgcactacctgcagcagcccacccccacccaggccagcagcgccacagccagcagcacagccacagccaccctgcagctgcagcagcagcagcagcagcagcagcagcagcctgaccacagcagcttcctgctgcagcagatgatgcagcagccccagcgcttccagaggtctgtggccagtgacagcatgcctgccctgccccggcagggctgctgccacctgtttgcctggaccagcgctgccagctctgtgaagccccagcaccagcacggcaacagcttcaccagccggcaggacccccagcctggagatgtgagccccagcaacatcacccacgtggacaaggcctgcaagctgggggaggcccggcacccccaggtgtccctgggccggcagccccccagctgccaggccctgggcagcgagagcttcctgcccggcagcagctttgcccacgagctggcccgggtgaccagcagctacagcaccagcgaggccgccccctggggctcctgggaccccaaggcctggaggcaggtgcctgcccccctgctgcccagctgtgatgccacagcccggggcacagagatccgctcctatggaaatgacccctag

SEQ ID NO: 156596 - DNA, 4607 bp, Artificial Sequence
  derived and/or modified sequence
ccctgtgtctaggtcgtttgggaaacgccttggagagtcaagaataaatttgcaggtcaaacaatggatgactggaaaagtcggcttgtaatcaagagcatgcttccccatttcgccatggtgggaaatcgtcaggagcccagaaagctccaggaatcgggaaagaagccctcgtggatggaggaagaagatttatcttttctctacaagagcagcccaggaagaaagcatcagggaactgttaagaggagacaagaagaagaccacttccagtttccagacatggctgatgggggctaccctaataaaattaagaggccttgccttgaagatgtcacccttgcaatgggcccaggtgctcatcctagtactgcttgtgcagaactgcaggtccctccattgacaataaatcctagccctgcggctatgggagtggctggccagtcattactgctggagaataaccctatgaatggcaacatcatgggctcaccatttgtagtaccacagactacagaagtgggactgaaagggcccactgttccttactatgagaaaatcaacagcgtgccggctgtagaccaggagcttcaagagctgctagaggagctcaccaaaattcaagacccttctccaaatgagctagatcttgagaagatactggggacgaagccagaagagccactggttttagatcatccccaggcaaccctaagcacaactcccaagccttcggttcagatgtcacacttggagagcctggcttccagcaaggagtttgcttctagttgcagccaagttactggcatgtcacttcagatcccatcctcctccacagggatcagctattcgattccttccaccagtaagcagatagtgtcaccgagttcttcaatggcacagtccaagagccaggtccaggccatgctccctgtcgctctgccccccttaccagtgcctcagtggcatcacgcccaccagctgaaggcgttggcagccagcaagcaggggtctgctacaaagcagcaagggcccacccccagttggtctggtctgcctcctccaggactctctccaccttaccgcccagtgccatcaccacacccaccaccgctgccactgccaccaccaccacccccattcagcccccagagcctcatggtgtcctgcatgtcgtccaataccttgtcgggtagcactctccgaggctctcccaatgccttactgtcaagcatgacgtccagcagcaatgctgccctggggcccgccatgccctatgctcctgagaagctccccagccctgctctcactcaacagccgcagttcggccctcagagctccattcttgccaacctcatgtcctctaccatcaaaacccctcaaggacacctgatgtctgctctgcctgccagcaaccctgggccgtccccaccctatcgcccagagaagctctctagcccaggcttgccacagcagtccttcaccccacagtgttccctgatccgaagcctcactcccaccagtaatcttctaagccagcaacagcagcagcagcagcagcagcagcaagcaaatgtgatctttaagcccataagcagcaactcatccaaaaccctgagcatgatcatgcagcaggggatggcaagctccagcccaggagccacggagccatttacttttggcaacaccaagcccttgtcccattttgtttctgagccgggtccccagaagatgccctccatgcctaccacctctaggcagccttccctgctccactacctgcagcagccgacaccaacgcaggcctcctcagccactgcctcctccacggccactgccaccttgcagctgcagcagcagcagcagcaacagcagcagcagcctgaccattcttcattccttctgcagcagatgatgcagcaaccccagcgttttcagcgatcagtggcctcagattccatgcctgctctgcccagacagggctgttgccatctgtttgcatggacttctgcagctagctcggtgaagccccagcatcaacacgggaactctttcactagcaggcaagatcctcagcctggagacgtgtcaccgtctaacattactcatgtagacaaagcctgcaagcttggggaagccaggcacccccaggtcagcctcgggcgacagcccccgtcctgccaggccctggggagtgagtccttcctgcccggcagctcctttgctcatgagctggcccgagtcacctcctcgtacagcacctcagaggcagcgccctggggcagctgggatccgaaggcctggaggcaggtgcccgctccactactgcctagctgcgacgccacagcaagaggaacagagatcaggtcttatggcaatgacccctgaacggcagaatgcatatatctcccaacagatgagtccatttgaagccgtccaagaacaagtcacctccaagtgtagccggatcaaggcaagccccccatctagcaagcacttgatgccacccagaactgggcttcttcagaacaatctgagtccaggaatgatcccactcaccaggcaccagagctgcgagggcatgggagtgatctcaccaactctggggaagcggcaaggaattttcacctccagcccccagtgtcccatcctctcacactcaggccagactcccctgggcagacttgactctgtctgccagcatatgcagagccccaaggccaccccaccagaagtgcccctgcctgggttctgtcccagctccctgggcacccagtccttgagtccccaccagctcagacggcctagtgtgccaagaatgcccactgcgttcaacaatgctgcatgggtcacagcggcagcagctgtgaccacagcagtttcggggaaaacacccctcagccaagtggataatagcgttcagcagcactcaccttctggccaggcctgccttcagaggccatctgattgggaggcacaagtgcccgctgcgatgggaacacaagtgcccctggccaacaaccccagcttcagcctgctgggcagccagagcctcaggcagagcccggtacagggcccggtgcctgtagcaaacaccaccaagttcctccagcagggtatggccagctttagtcccctgagccccatacagggcatcgagccaccaagctatgtggctgctgctgccaccgctgctgctgcttctgccgttgctgccagccagttcccaggtccgttcgacagaacggatattccccctgagctgccacctgccgactttttgcgccagccccaacccccactaaatgatctgatttcgtcacctgactgcaatgaggtagatttcattgaagctctcttgaaaggctcctgtgtgagcccagatgaagactgggtgtgcaacttgaggctgatcgacgacattttggaacagcatgctgctgctcaaaatgccacagcccagaattctgggcaagtcacccaggatgctggggcactttaaatctgagcaggatgcccatagaaacccccatggtgacatcactctaggaagtggtgtcgatccatacccgcagttgtctcccgttacaatttgagtggtgttgtcagcccatgcttatccctctctctacctgtgacaaaatggaaagctggtgatttttcaagctacgtgtacatatttgaaaattttgtaaatggttttcctaaacattaatgacagaagtatttatacttcattttgtgactttgtaaataaagcgacggcttttgtttcagtagagttgtgtttactatgcattgttttgtgtttattatacaatgttacaaatatgcagaccgtgttgtttgctccagtgataccttgttaagctaggtggctgagtcgcttatggttttaatgcaatgagcaatgtggatatgaccaagagttgttgtgcaagttgacaaatgccaaatagaaaaccacttggccatttatttctatgttcactaaaaatcctattgccttgtgtgattcttaatctcttttgcgaacctttcagtctccgctagctctttcctaatgagctttacagcagaagctgttttatcgttaagtgccccacagagacactttaccaggaggctgggagagttctccagatttgggagaggcgcagagacagtgtgtgagccgagccctgtctcagcaatccacctggaggagctagagtatcctcctccctttaccattcagaccgagagaaaaagcccagcttgtgtgcaccctcgtggggttaaggcgagctgttcctggtttaaagcctttcagtatttgttttgatgtaaggctctgtggtttgggggggaacatctgtaaacattattagttgatttggggtttgtctttgatggtttctatctgcaattatcgtcatgtatatttaagtgtctgttatagaaaacccacacccactgtcctgtaaacttttctcagtgtccagactttctgtaatcacattttaattgccacctcgtatttcacctctacatttgaaatctggcgtctgtttcaagccagtgtgttttttcttcgttctgtaataaacagccaggagaaaagtgcc

SEQ ID NO: 156597 - DNA, 4854 bp, Artificial Sequence
  derived and/or modified sequence
ggcgcggagccgggcggtgggaatggagcgagcagattgaggccgccactgcagcgccgccagcatgaacttggccgcgagctgaagcggccggcggcgggcgggcgcgggggcaccggccgctagccagggggtgatctgcaacagggctgggttccttggcggccgcctgagtccaggctgcccgcgccggcggccgcccgcccctcggacactgcccccgccgccgccggagctctgcagcacgccctgtgtctaggtcgtttgggaaacgccttggagagtcaagaataaatttgcaggtcaaacaatggatgactggaaaagtcggcttgtaatcaagagcatgcttccccatttcgccatggtgggaaatcgtcaggagcccagaaagctccaggaatcgggaaagaagccctcgtggatggaggaagaagatttatcttttctctacaagagcagcccaggaagaaagcatcagggaactgttaagaggagacaagaagaagaccacttccagtttccagacatggctgatgggggctaccctaataaaattaagaggccttgccttgaagatgtcacccttgcaatgggcccaggtgctcatcctagtactgcttgtgcagaactgcaggtccctccattgacaataaatcctagccctgcggctatgggagtggctggccagtcattactgctggagaataaccctatgaatggcaacatcatgggctcaccatttgtagtaccacagactacagaagtgggactgaaagggcccactgttccttactatgagaaaatcaacagcgtgccggctgtagaccaggagcttcaagagctgctagaggagctcaccaaaattcaagacccttctccaaatgagctagatcttgagaagatactggggacgaagccagaagagccactggttttagatcatccccaggcaaccctaagcacaactcccaagccttcggttcagatgtcacacttggagagcctggcttccagcaaggagtttgcttctagttgcagccaagttactggcatgtcacttcagatcccatcctcctccacagggatcagctattcgattccttccaccagtaagcagatagtgtcaccgagttcttcaatggcacagtccaagagccaggtccaggccatgctccctgtcgctctgccccccttaccagtgcctcagtggcatcacgcccaccagctgaaggcgttggcagccagcaagcaggggtctgctacaaagcagcaagggcccacccccagttggtctggtctgcctcctccaggactctctccaccttaccgcccagtgccatcaccacacccaccaccgctgccactgccaccaccaccacccccattcagcccccagagcctcatggtgtcctgcatgtcgtccaataccttgtcgggtagcactctccgaggctctcccaatgccttactgtcaagcatgacgtccagcagcaatgctgccctggggcccgccatgccctatgctcctgagaagctccccagccctgctctcactcaacagccgcagttcggccctcagagctccattcttgccaacctcatgtcctctaccatcaaaacccctcaaggacacctgatgtctgctctgcctgccagcaaccctgggccgtccccaccctatcgcccagagaagctctctagcccaggcttgccacagcagtccttcaccccacagtgttccctgatccgaagcctcactcccaccagtaatcttctaagccagcaacagcagcagcagcagcagcagcagcaagcaaatgtgatctttaagcccataagcagcaactcatccaaaaccctgagcatgatcatgcagcaggggatggcaagctccagcccaggagccacggagccatttacttttggcaacaccaagcccttgtcccattttgtttctgagccgggtccccagaagatgccctccatgcctaccacctctaggcagccttccctgctccactacctgcagcagccgacaccaacgcaggcctcctcagccactgcctcctccacggccactgccaccttgcagctgcagcagcagcagcagcaacagcagcagcagcctgaccattcttcattccttctgcagcagatgatgcagcaaccccagcgttttcagcgatcagtggcctcagattccatgcctgctctgcccagacagggctgttgccatctgtttgcatggacttctgcagctagctcggtgaagccccagcatcaacacgggaactctttcactagcaggcaagatcctcagcctggagacgtgtcaccgtctaacattactcatgtagacaaagcctgcaagcttggggaagccaggcacccccaggtcagcctcgggcgacagcccccgtcctgccaggccctggggagtgagtccttcctgcccggcagctcctttgctcatgagctggcccgagtcacctcctcgtacagcacctcagaggcagcgccctggggcagctgggatccgaaggcctggaggcaggtgcccgctccactactgcctagctgcgacgccacagcaagaggaacagagatcaggtcttatggcaatgacccctgaacggcagaatgcatatatctcccaacagatgagtccatttgaagccgtccaagaacaagtcacctccaagtgtagccggatcaaggcaagccccccatctagcaagcacttgatgccacccagaactgggcttcttcagaacaatctgagtccaggaatgatcccactcaccaggcaccagagctgcgagggcatgggagtgatctcaccaactctggggaagcggcaaggaattttcacctccagcccccagtgtcccatcctctcacactcaggccagactcccctgggcagacttgactctgtctgccagcatatgcagagccccaaggccaccccaccagaagtgcccctgcctgggttctgtcccagctccctgggcacccagtccttgagtccccaccagctcagacggcctagtgtgccaagaatgcccactgcgttcaacaatgctgcatgggtcacagcggcagcagctgtgaccacagcagtttcggggaaaacacccctcagccaagtggataatagcgttcagcagcactcaccttctggccaggcctgccttcagaggccatctgattgggaggcacaagtgcccgctgcgatgggaacacaagtgcccctggccaacaaccccagcttcagcctgctgggcagccagagcctcaggcagagcccggtacagggcccggtgcctgtagcaaacaccaccaagttcctccagcagggtatggccagctttagtcccctgagccccatacagggcatcgagccaccaagctatgtggctgctgctgccaccgctgctgctgcttctgccgttgctgccagccagttcccaggtccgttcgacagaacggatattccccctgagctgccacctgccgactttttgcgccagccccaacccccactaaatgatctgatttcgtcacctgactgcaatgaggtagatttcattgaagctctcttgaaaggctcctgtgtgagcccagatgaagactgggtgtgcaacttgaggctgatcgacgacattttggaacagcatgctgctgctcaaaatgccacagcccagaattctgggcaagtcacccaggatgctggggcactttaaatctgagcaggatgcccatagaaacccccatggtgacatcactctaggaagtggtgtcgatccatacccgcagttgtctcccgttacaatttgagtggtgttgtcagcccatgcttatccctctctctacctgtgacaaaatggaaagctggtgatttttcaagctacgtgtacatatttgaaaattttgtaaatggttttcctaaacattaatgacagaagtatttatacttcattttgtgactttgtaaataaagcgacggcttttgtttcagtagagttgtgtttactatgcattgttttgtgtttattatacaatgttacaaatatgcagaccgtgttgtttgctccagtgataccttgttaagctaggtggctgagtcgcttatggttttaatgcaatgagcaatgtggatatgaccaagagttgttgtgcaagttgacaaatgccaaatagaaaaccacttggccatttatttctatgttcactaaaaatcctattgccttgtgtgattcttaatctcttttgcgaacctttcagtctccgctagctctttcctaatgagctttacagcagaagctgttttatcgttaagtgccccacagagacactttaccaggaggctgggagagttctccagatttgggagaggcgcagagacagtgtgtgagccgagccctgtctcagcaatccacctggaggagctagagtatcctcctccctttaccattcagaccgagagaaaaagcccagcttgtgtgcaccctcgtggggttaaggcgagctgttcctggtttaaagcctttcagtatttgttttgatgtaaggctctgtggtttgggggggaacatctgtaaacattattagttgatttggggtttgtctttgatggtttctatctgcaattatcgtcatgtatatttaagtgtctgttatagaaaacccacacccactgtcctgtaaacttttctcagtgtccagactttctgtaatcacattttaattgccacctcgtatttcacctctacatttgaaatctggcgtctgtttcaagccagtgtgttttttcttcgttctgtaataaacagccaggagaaaagtgcc

SEQ ID NO: 156598 - DNA, 2434 bp, Artificial Sequence
  derived and/or modified sequence
accagatgtgttggtgacaggttgctactcagaggtgcggacaggagctgagcgctgctgctgtcggagcagacgcggcgttcccgggttgtgctcagcccctgcagctgccatcggctggagaagtccagcgcaccgcctaggcaagccagctgacgccgggggcacagaccaccctccactgagtgcggagcagccaagggaaagaagccctcgtggatggaggaagaagatttatcttttctctacaagagcagcccaggaagaaagcatcagggaactgttaagaggagacaagaagaagaccacttccagtttccagacatggctgatgggggctaccctaataaaattaagaggccttgccttgaagatgtcacccttgcaatgggcccaggtgctcatcctagtactgcttgtgcagaactgcaggtccctccattgacaataaatcctagccctgcggctatgggagtggctggccagtcattactgctggagaataaccctatgaatggcaacatcatgggctcaccatttgtagtaccacagactacagaagtgggactgaaagggcccactgttccttactatgagaaaatcaacagcgtgccggctgtagaccaggagcttcaagagctgctagaggagctcaccaaaattcaagacccttctccaaatgagctagatcttgagaagatactggggacgaagccagaagagccactggttttagatcatccccaggcaaccctaagcacaactcccaagccttcggttcagatgtcacacttggagagcctggcttccagcaaggagtttgcttctagttgcagccaagttactggcatgtcacttcagatcccatcctcctccacagggatcagctattcgattccttccaccagtaagcagatagtgtcaccgagttcttcaatggcacagtccaagagccaggtccaggccatgctccctgtcgctctgccccccttaccagtgcctcagtggcatcacgcccaccagctgaaggcgttggcagccagcaagcaggggtctgctacaaagcagcaagggcccacccccagttggtctggtctgcctcctccaggactctctccaccttaccgcccagtgccatcaccacacccaccaccgctgccactgccaccaccaccacccccattcagcccccagagcctcatggtgtcctgcatgtcgtccaataccttgtcgggtagcactctccgaggctctcccaatgccttactgtcaagcatgacgtccagcagcaatgctgccctggggcccgccatgccctatgctcctgagaagctccccagccctgctctcactcaacagccgcagttcggccctcagagctccattcttgccaacctcatgtcctctaccatcaaaacccctcaaggacacctgatgtctgctctgcctgccagcaaccctgggccgtccccaccctatcgcccagagaagctctctagcccaggcttgccacagcagtccttcaccccacagtgttccctgctccactacctgcagcagccgacaccaacgcaggcctcctcagccactgcctcctccacggccactgccaccttgcagctgcagcagcagcagcagcaacagcagcagcagcctgaccattcttcattccttctgcagcagatgatgcagcaaccccagcgttttcagcgatcagtggcctcagattccatgcctgctctgcccagacagggctgttgccatctgtttgcatggacttctgcagctagctcggtgaagccccagcatcaacacgggaactctttcactagcaggcaagatcctcagcctggagacgtgtcaccgtctaacattactcatgtagacaaagcctgcaagcttggggaagccaggcacccccaggtcagcctcgggcgacagcccccgtcctgccaggccctggggagtgagtccttcctgcccggcagctcctttgctcatgagctggcccgagtcacctcctcgtacagcacctcagaggcagcgccctggggcagctgggatccgaaggcctggaggcaggtgcccgctccactactgcctagctgcgacgccacagcaagaggaacagagatcaggtcttatggcaatgacccctgaacggcagaatgcatatatctcccaacagatgagtccatttgaagccgtccaagaacaagtcacctccaagtgtagccggatcaaggcaagccccccatctagcaagcacttgatgccacccagaactgggcttcttcagaacaatctgagtccaggaatgatcccactcaccaggcaccagagctgcgagggcatgggagtgatctcaccaactctggggaagcggcaaggaattttcacctccagcccccagtgtcccatcctctcacactca

SEQ ID NO: 156599 - DNA, 2325 bp, Artificial Sequence
  derived and/or modified sequence
atggacgactggaagagccggctggtgatcaagagcatgctgccccactttgctatggtaggcaatcggcaagaaccccggaaacttcaggaaagcggaaaaaagcccagctggatggaggaggaagatctgtcttttctgtacaaatcctctcccggccgtaagcaccagggcaccgtgaaacggcggcaagaggaagatcacttccagttccccgatatggcagacggaggctatccaaataaaatcaaaagaccatgtttggaggacgtcactctggcaatgggacccggtgcccacccttcaacagcctgcgccgaactccaagttcctcccctgaccatcaatccaagtccagccgccatgggggtggccggtcagtcattgctgcttgaaaataaccccatgaatgggaatattatgggatccccctttgtggtacctcagacgactgaagtgggtcttaagggccccacggtcccgtactatgaaaagattaacagcgtgcccgcggtggatcaggaattacaggagctcctcgaggaactcacaaagattcaggacccctcgccaaacgagctggacttggaaaagattttgggaaccaaacctgaggaacctttagtgctggaccaccctcaggccactctctctactacccctaagccttccgtgcaaatgagtcatctggagtcactggcgtcttccaaggagttcgcatcatcatgtagccaggtcacagggatgtcacttcaaatccctagctcctccacaggtatcagctattcgatcccctcaaccagcaaacagattgttagcccatcttccagcatggcccagagtaagagtcaagtgcaagcgatgttacctgtggccctacccccccttcccgtgccacagtggcatcacgcccatcaactgaaggccctggccgccagcaagcagggaagcgcaaccaagcagcagggccccactccctcttggtctggtctcccccctcccggcttaagtccaccatatcgcccagtcccatcaccacatccccccccacttcctctgcctccacctccgccgcctttcagcccccaatccctcatggtctcctgcatgtcgtcaaacacactctctgggtccacactgaggggatcccctaacgcccttctgagctctatgacctcttcaagtaacgctgcactgggtccagcaatgccatatgcccctgagaaactaccatcacctgctctcacgcagcagccacaattcgggccccagtcaagcatcctagccaacctgatgtcttcaacaattaagacccctcaaggacacctcatgtcagccctccctgcatctaaccccggtccttcacccccgtatcgtcccgaaaagctatcatcacccggcttacctcagcagagttttaccccacagtgctccttaattcgaagtctcaccccaacctccaacttgctttcacagcagcagcagcaacagcagcaacaacagcaggccaatgtgatttttaagcctattagttccaacagctctaagacactgtcaatgatcatgcagcagggaatggcctcttcatctcccggggccactgagcccttcacttttggcaataccaaacctctttcccatttcgtttccgaacctggcccgcagaaaatgcctagtatgcctacgacttccaggcagcctagtctgcttcattacctgcagcagcccactcctactcaggcgtccagtgctactgcttcctcaaccgccaccgcaacactccaattgcaacagcagcagcaacagcagcaacagcaacctgaccacagcagctttctcttgcagcagatgatgcagcagccgcagagattccagcgctctgtggctagtgattctatgcccgctctaccccgacaggggtgctgccacctgttcgcatggacttcagcggcttcatcggtgaaaccccagcaccagcatggcaactctttcacgtcccggcaggaccctcagccgggagacgtgtctccctcaaacataacccatgtggataaggcctgtaagctgggagaggcgcgccacccccaggtgagcctgggaagacagcctcccagttgtcaagcactgggatcggagtccttcctccctggttcatctttcgcccatgagctcgcccgagtaactagctcatacagcaccagtgaagcggcaccgtggggaagctgggatcccaaagcttggcgccaggttccagcccctttattgccttcatgcgatgctaccgcaagggggactgaaattcgcagctatggtaatgatccttag

SEQ ID NO: 156600 - DNA, 2325 bp, Artificial Sequence
  derived and/or modified sequence
atggacgactggaagagccggctggtgatcaagagcatgctgccccacttcgcaatggtgggcaataggcaagagccacgcaagttgcaagaaagcggcaagaagccgtcttggatggaagaggaagatttgtcatttctttacaagtcgagccccggacgaaagcaccagggtaccgtcaagagaagacaggaagaggaccattttcagttccccgacatggctgacggcggctacccaaataaaatcaaaaggccatgtctggaggacgtgacactcgcaatgggacccggagcgcatcccagcactgcctgtgcagagttgcaagtgcccccactgaccataaacccgagccctgcggccatgggagtagctgggcagtcgctgctcctcgagaataaccccatgaatggcaacatcatgggcagcccctttgtggtcccccagacgacggaggttggattaaaggggccaactgtcccatactacgaaaagatcaattccgtgcctgccgtggaccaggaattgcaggaactgctggaggagctcacaaaaatacaagacccgagccctaatgagcttgacctagaaaagattctgggaacaaagccagaagagccattggtcctggaccacccccaggcaacgctgtccacgacacctaaaccaagtgtccagatgtctcacttggagtcgttagccagctcaaaagaattcgctagctcttgttctcaggtgacagggatgtcactccaaatccccagctcctctaccggtatttcgtacagtattccaagcacttccaagcagatcgtgagccccagcagctccatggcccagagtaagagtcaagttcaggctatgttgcctgttgctctccctcccctgcccgtgcctcagtggcaccatgcccaccagctgaaggccctggccgccagtaagcaggggtccgcaaccaagcaacagggaccaaccccgagttggtctggtcttcccccccccgggctatctcccccctaccggcctgtgcctagcccccacccacctccccttccactgccaccccccccaccaccctttagccctcagtcgctcatggttagttgcatgtcgtcaaacacactctccggtagcactctacgagggagcccaaacgccctgttatccagcatgactagctcttcgaatgcagctctggggcccgccatgccctatgcacccgagaaactgccgagccccgcgcttactcagcaaccccagtttggaccacagtcctcgatcctggcgaacctcatgagcagtactatcaagacacctcagggccatctgatgtctgcgcttccagccagcaatcccggcccttcacccccttataggcctgaaaagttatccagtcccggtttacctcagcagtctttcacaccccagtgtagcttgatcaggagcctcaccccaacttccaacctgctctctcagcaacagcagcagcaacagcagcaacagcaggccaatgtaatcttcaagcccatatcctccaattcctctaagacgctctcaatgataatgcagcagggaatggcttcttcaagtcccggcgcgacagagcccttcacatttggtaataccaagcccttaagtcacttcgtttccgagcctggtccacaaaagatgccttctatgcccactacgtctcgtcagccttccttactccactatctgcagcagcctacgccaacacaggcgtcaagcgccaccgctagcagtaccgcaacggctaccctccagttacagcagcagcaacagcagcaacagcagcagccagaccactcttcatttcttctgcagcagatgatgcagcagccccagagatttcagaggtcggtcgcttcggattccatgccagctctcccgcgacaaggctgttgtcacctatttgcctggacttcggccgctagcagtgttaaaccccagcatcagcatggaaacagctttacttcccggcaagatccccagccaggagatgtgtctcccagcaacataacacacgtggataaggcctgtaagctcggagaagcccgtcatccccaggtctctcttgggaggcagcccccaagttgccaggctctgggcagcgagtccttcttacccggttccagttttgctcacgaactggcccgggtgacctcctcttactctaccagcgaagcagccccgtggggatcttgggacccgaaggcctggcggcaagtccccgccccactattgccttcatgtgacgcgacagcacggggaacggaaatccgaagctacggaaacgatccgtag

SEQ ID NO: 156601 - DNA, 1941 bp, Artificial Sequence
  derived and/or modified sequence
atggaggaggaggacctgagcttcctgtacaagagcagccccggccgaaaacatcagggaaccgtcaaacgcagacaggaagaggatcactttcagttccctgacatggccgatggtggatacccaaataaaataaagaggccctgtctcgaagacgtgacgcttgcaatgggtcctggggctcatccttcaaccgcatgtgccgaacttcaggtcccgcctctcacaataaaccctagtccagctgccatgggggtcgcgggacagagcctgctcctcgagaacaatcccatgaacggtaatatcatgggctccccgtttgtggtgccccagacgactgaagttgggctcaagggcccaacagtgccttactacgagaagataaatagcgtccctgccgtcgatcaggaattacaggaattgttggaagagctgaccaaaattcaggacccctccccaaatgagttagacctcgagaaaattctcggaacgaaaccggaggagccactggtgcttgaccaccctcaggctaccctttccacaacccccaagccctccgtgcagatgtcacacctggaatccctggccagctctaaagaattcgctagtagctgttctcaggttactggtatgtctttacagatcccatcttcctcgaccgggatttcctattcgataccctctacatccaaacagatcgtaagccccagtagcagtatggcacaatcaaaaagtcaagttcaagcaatgttgcccgttgctctgcctcccctccccgttccccagtggcaccatgctcaccagctgaaggccctggcagctagtaaacagggaagtgccactaaacagcagggccctacaccatcttggagtgggctgcccccccccggtctctctccaccctatcgaccagttccttcgccacacccacccccactgccacttccccctccccccccgccattcagtcctcagtccctcatggtgtcctgtatgagcagtaacaccctgagtggatcaaccctccgcgggagtccaaacgccctgctttcatccatgaccagctcctccaacgctgcactgggaccagcgatgccctacgctccggaaaaactgccctcaccagcccttacccaacagccccagttcggacctcaatcttccatcctggccaacctgatgtcctcaactatcaagacgccacaggggcatttaatgtcagccctgccggcctccaatcccgggcccagtcctccataccgtcctgaaaaacttagctccccaggcttgccccagcagtcatttacaccacagtgttccttactgcattacctccagcagcccacgcccacacaggcaagcagtgccaccgcctcgagtacagcgaccgccacactccaattacaacaacaacagcagcagcagcaacagcaacccgatcatagctcctttctgcttcagcaaatgatgcagcagccacagcgttttcagcgttccgtggcctctgactctatgccagccctgccccgtcaaggatgttgccacctgttcgcctggacatccgccgcaagttcagttaagccacaacaccagcacggcaatagctttacttcgagacaggatcctcaacccggcgatgtcagcccctcaaacatcactcatgtcgacaaagcctgcaagctgggagaagctcggcatcctcaggtgtcactgggccggcagcctcctagttgtcaggcactgggttctgaaagtttcctgcccggctcaagtttcgcccacgaactcgctcgggtcacaagctcttacagtactagcgaggccgctccctggggcagttgggaccctaaagcctggcggcaagtacccgcgccccttttgccatcttgtgatgcgaccgctagaggcaccgagatacggagttacggcaacgatccatag

SEQ ID NO: 156602 - DNA, 2325 bp, Artificial Sequence
  derived and/or modified sequence
atggatgattggaagtctcgtttagtcataaagagcatgctaccccactttgctatggttggtaatcgacaagaaccccgaaaacttcaggaatccgggaaaaagccctcctggatggaggaagaggatctgagcttcctctataagtccagtcctggcaggaagcatcagggcactgtaaaaaggaggcaggaggaagatcactttcagttccctgacatggccgacggtggctatcctaacaagatcaaacgcccatgtttggaggatgtcacattagccatgggtcctggcgctcatccaagtacagcctgcgccgagctccaagttccccctctgacaatcaacccctctccagccgctatgggggtcgccggacagagccttcttcttgagaataacccaatgaacgggaacatcatgggcagcccctttgtagtgccgcagaccaccgaagtggggctgaagggtcctaccgtcccctattatgaaaagatcaattcagtcccagccgtggaccaggagctgcaggagctgctggaagagctaacaaagatccaagacccatcccccaacgaactggacctggaaaagatcctcggcaccaaacctgaggagcccttagtgctggatcacccacaggccactctgagcaccacacccaaacctagcgtgcagatgagccacctagagagcctggccagtagtaaggaattcgcgtccagctgtagtcaggtaacgggcatgagtctgcagattccatcatcctcaactggcatcagttactctattccttctacatcgaaacaaatcgtgtccccttcaagttccatggcacagagcaagagccaggtgcaggctatgctgcctgtggctctccccccactgcctgtcccacagtggcatcatgctcatcagcttaaggcactagcagctagcaaacagggatccgctaccaaacagcaggggccaacaccgagttggagcggtctgccaccacccggtctgagcccgccataccggccagttcccagtccacaccccccaccacttcccttacctccaccaccacctcctttttcgccgcaatccctgatggtgtcatgcatgtccagcaatacgctttcagggagtacactgagggggagcccaaacgctctgctcagttcaatgacctccagcagtaatgccgctctgggacctgccatgccttacgccccagagaagctgccctctccggctttaacacagcagccccagtttgggccacagagctcaattctcgctaacctgatgtcaagcacaatcaaaactccacagggacacctgatgtctgccctcccagcttctaaccccggaccaagtcccccttataggcctgaaaaattaagctcacccggtctgccgcaacagagctttacgccccagtgcagtctgatccgatctctgacacccacaagtaatttgctgtctcagcagcagcagcagcagcaacagcaacaacaggctaacgtgatatttaaacccatctcatcaaacagctctaagactctaagtatgattatgcagcagggtatggcatcaagttcccctggggctaccgaaccgtttactttcggaaacaccaaaccactgtcacacttcgtcagcgagccaggtccccagaaaatgcccagcatgcccaccacaagtcggcagccgtctttactgcactacctgcagcagccaactccgactcaggcttcgagcgcaactgccagcagtaccgccaccgcaacactgcagctgcagcagcagcagcagcaacagcagcagcagcccgatcatagctccttcctcctccagcagatgatgcaacagccccaacggttccagcggtccgtggcttctgattcaatgccggctctaccccgtcagggctgctgtcatctgttcgcgtggacctccgccgctagcagcgtcaagccccagcatcagcacgggaacagtttcacatcaagacaagacccgcagcccggagacgtatccccctccaatatcacccatgtggacaaagcctgcaagttaggtgaggctagacacccacaagttagccttggcagacagcccccttcttgtcaggctttgggctccgaatccttcctgccaggaagtagtttcgctcacgagctggccagggtgacatctagctattccacaagcgaagctgcgccttggggttcctgggatcccaaagcttggcgccaggtacctgcaccactcttgcctagttgtgatgcaactgcaagaggcaccgagatccgctcttatgggaatgatccctag

SEQ ID NO: 156603 - DNA, 2325 bp, Artificial Sequence
  derived and/or modified sequence
atggacgattggaagtcccgtttggttatcaaatccatgctgccccatttcgctatggtgggaaaccggcaggaaccacgcaagctgcaggagagcggaaagaagccatcttggatggaagaagaggatctgtccttcttatacaagagctcccctggacggaagcaccaaggtactgttaagagacggcaagaggaggatcacttccagtttcctgacatggccgatggagggtaccctaacaagatcaagcgcccttgcctggaggacgtgaccctggcgatggggcctggagctcacccttcgactgcttgcgctgagctgcaggtgccccctctgaccattaacccttcccctgccgcaatgggggtggctggccaatcgttgctgcttgaaaacaatcctatgaatggcaatatcatgggttctccatttgtggtgccccagacgaccgaggtgggcctcaaaggcccaaccgttccgtattacgagaaaatcaatagcgtacccgcagttgatcaggaattacaggagctattggaagagttgacgaagattcaggatccaagccccaacgagttagacttagaaaagatactgggtacaaaaccagaagaaccattggttctcgatcatccccaggctaccctcagcactacacctaagccgtccgtgcagatgagccaccttgagtctctggcctcctccaaagagtttgcaagtagttgcagtcaggtcacaggcatgtctcttcagataccctcgagcagcacagggatttcttactccatccctagcacttccaaacagattgtttcaccatcaagctcaatggcccagtccaagtcacaggtgcaagctatgctgccagtggcccttcccccactgcctgtgccacagtggcatcatgcccatcagttaaaagccctggctgcctcaaaacagggaagcgctacaaagcagcagggacccacaccatcctggtctgggttgccccctcccggtcttagccccccttaccgtcctgtaccatctccacatcccccacccctgcccctgccccctcctcccccacccttttcaccacagtcactgatggtgtcctgcatgtcctcaaacaccctgagcggctctacactccgaggaagccctaacgctctgctctcctccatgacttcttccagcaacgcggcattgggaccggcaatgccttatgcaccagagaagcttccctctccagccctgacccagcagccacagttcgggccacagtctagtattcttgctaatctaatgagctcaacaattaagactccccaggggcatctcatgtcagctctgcctgcaagtaatccgggaccctctccgccatatcgcccagagaagctatcatcccctgggctaccgcagcagtccttcacaccgcagtgttccctaatcagatccttgacccctacatcgaacctgctgtcccagcagcaacaacagcagcagcagcagcaacaggccaatgtaatctttaaacctatatcttccaacagtagcaaaaccctgagtatgatcatgcagcaagggatggcctcctcctcccccggtgccaccgaacctttcacattcggcaacacaaaacccctgtcacacttcgtctctgaacctgggcctcagaaaatgcctagcatgcctaccacaagccgtcagccatcactcttgcactacctgcagcagccgacacctacacaagccagcagcgcaactgcttctagcacagccactgctacgctgcagctccagcagcaacaacagcaacaacaacagcagcccgatcactcttcgttcctcctgcaacagatgatgcagcagccacagaggtttcagcggtccgtggctagtgacagcatgcctgctctgcccaggcagggttgttgccacctgttcgcttggaccagtgcggcttcttccgtaaagcctcagcatcagcatggcaacagctttaccagccgtcaagatcctcagcccggagatgtaagcccctccaatataacacatgtggataaggcatgcaagctaggagaagcgcgtcatccgcaagtttcactgggacgccagcccccttcctgtcaggctctagggtctgagagctttctgcctggttcttcgtttgcgcatgagctagctcgggtgacctcctcttattccacgtcagaggcggctccatggggctcatgggaccccaaggcctggcggcaggtgcctgctcctctgctgccaagttgtgacgcaacagctcgcggtaccgagattagatcttacggcaatgacccctag

SEQ ID NO: 156604 - DNA, 1941 bp, Artificial Sequence
  derived and/or modified sequence
atggaagaggaagatttgtcctttttgtacaagtcttcccccggacggaagcaccagggaacagtcaagcggcgacaagaggaggaccactttcagttcccggatatggcggacggtggatacccaaacaaaatcaaaagaccctgcctggaggatgttacccttgccatggggcctggggcacaccccagcaccgcttgtgccgaactgcaggtgccccctcttactataaatccttcccctgccgctatgggagtggcaggacaaagcttactgcttgaaaataaccccatgaacggcaatattatgggttctccattcgtggtacctcagacaacagaggtgggtctgaagggtcccaccgtcccctactacgagaagatcaacagtgtcccagccgtggaccaggaacttcaggaactgttagaggagctaacaaagattcaggacccatctccaaatgagctagatctcgaaaagatcctcggcactaagccggaagagcccttggtgttggatcatcctcaggcaacacttagtacaacgcctaagccatctgtccaaatgagccacctcgagtctctggcaagctctaaggaattcgcatcttcatgttcccaggtgacgggcatgagccttcagatcccctccagcagcacaggaatttcctactcaatcccgagcacttcaaagcaaattgtgagtccttcctcatctatggcccagtctaaatcccaggtccaggcaatgctcccggttgcactgcctcccctgcctgtgccccaatggcaccatgcccatcagctgaaggcgttggccgcttccaagcagggtagcgctacaaaacagcaaggccctaccccctcgtggtccggcctgccacctcccggtcttagtcctccctacagaccagtgccttcaccacatccacccccactgccactgccaccaccacctcccccttttagcccccaaagcctgatggtgtcctgtatgagtagcaacactctgagcgggagcacactgcgcggaagtcccaacgccctgctctcgtctatgacctccagctcaaatgctgccctgggcccagccatgccatatgccccagagaaactaccatcgccagccctgacccagcagcctcaattcggacctcagagtagcatcttagctaatctgatgtcttcaacaataaaaacaccgcaaggacatctcatgtctgctttacccgcttcaaacccaggtccctctccaccatatcggccagagaaactgtccagccctggactgccccaacaaagcttcacgccgcagtgtagcctgttacattatctgcagcagccaacacctacccaggcctccagcgctacagcttctagtactgctaccgcaacactgcagctgcaacagcagcagcagcagcagcagcaacagcccgaccattcctccttcttgctccagcagatgatgcagcagcctcagaggttccagcgaagcgtagctagtgatagtatgcctgccctcccacgccagggctgttgccacctctttgcatggacatcagcagcgtcatcagttaagcctcagcatcagcatggaaactctttcacatcacgtcaggacccccaacccggtgatgtctccccaagcaacattacccacgtcgacaaggcctgcaagttgggggaggccaggcacccccaggtgagcctggggaggcagcccccaagttgccaggctctaggcagcgaatctttccttccaggttccagttttgcccacgaattggctcgcgtgacctccagctactctacctcagaagcagccccttggggttcctgggaccccaaggcttggcgccaggttcctgctcccttactgccgtcttgcgacgccacggctagggggaccgagattagaagctatggaaatgatccatag

SEQ ID NO: 156605 - DNA, 2325 bp, Artificial Sequence
  derived and/or modified sequence
atggacgactggaagagcagactggtgatcaagagcatgctgccccacttcgccatggtgggcaacagacaggagcccagaaagctgcaggagagcggcaagaagcccagctggatggaggaggaggacctgagcttcctgtacaagagcagccccggcagaaagcaccagggcaccgtgaagagaagacaggaggaggaccacttccagttccccgacatggccgacggcggctaccccaacaagatcaagagaccctgcctggaggacgtgaccctggccatgggccccggcgcccaccccagcaccgcctgcgccgagctgcaggtgccccccctgaccatcaaccccagccccgccgccatgggcgtggccggccagagcctgctgctggagaacaaccccatgaacggcaacatcatgggcagccccttcgtggtgccccagaccaccgaggtgggcctgaagggccccaccgtgccctactacgagaagatcaacagcgtgcccgccgtggaccaggagctgcaggagctgctggaggagctgaccaagatccaggaccccagccccaacgagctggacctggagaagatcctgggcaccaagcccgaggagcccctggtgctggaccacccccaggccaccctgagcaccacccccaagcccagcgtgcagatgagccacctggagagcctggccagcagcaaggagttcgccagcagctgcagccaggtgaccggcatgagcctgcagatccccagcagcagcaccggcatcagctacagcatccccagcaccagcaagcagatcgtgagccccagcagcagcatggcccagagcaagagccaggtgcaggccatgctgcccgtggccctgccccccctgcccgtgccccagtggcaccacgcccaccagctgaaggccctggccgccagcaagcagggcagcgccaccaagcagcagggccccacccccagctggagcggcctgcccccccccggcctgagccccccctacagacccgtgcccagcccccaccccccccccctgcccctgccccccccccccccccccttcagcccccagagcctgatggtgagctgcatgagcagcaacaccctgagcggcagcaccctgagaggcagccccaacgccctgctgagcagcatgaccagcagcagcaacgccgccctgggccccgccatgccctacgcccccgagaagctgcccagccccgccctgacccagcagccccagttcggcccccagagcagcatcctggccaacctgatgagcagcaccatcaagaccccccagggccacctgatgagcgccctgcccgccagcaaccccggccccagccccccctacagacccgagaagctgagcagccccggcctgccccagcagagcttcaccccccagtgcagcctgatcagaagcctgacccccaccagcaacctgctgagccagcagcagcagcagcagcagcagcagcagcaggccaacgtgatcttcaagcccatcagcagcaacagcagcaagaccctgagcatgatcatgcagcagggcatggccagcagcagccccggcgccaccgagcccttcaccttcggcaacaccaagcccctgagccacttcgtgagcgagcccggcccccagaagatgcccagcatgcccaccaccagcagacagcccagcctgctgcactacctgcagcagcccacccccacccaggccagcagcgccaccgccagcagcaccgccaccgccaccctgcagctgcagcagcagcagcagcagcagcagcagcagcccgaccacagcagcttcctgctgcagcagatgatgcagcagccccagagattccagagaagcgtggccagcgacagcatgcccgccctgcccagacagggctgctgccacctgttcgcctggaccagcgccgccagcagcgtgaagccccagcaccagcacggcaacagcttcaccagcagacaggacccccagcccggcgacgtgagccccagcaacatcacccacgtggacaaggcctgcaagctgggcgaggccagacacccccaggtgagcctgggcagacagccccccagctgccaggccctgggcagcgagagcttcctgcccggcagcagcttcgcccacgagctggccagagtgaccagcagctacagcaccagcgaggccgccccctggggcagctgggaccccaaggcctggagacaggtgcccgcccccctgctgcccagctgcgacgccaccgccagaggcaccgagatcagaagctacggcaacgacccctag

SEQ ID NO: 156606 - DNA, 1941 bp, Artificial Sequence
  derived and/or modified sequence
atggaggaggaggacctgagcttcctgtacaagagcagccccggcagaaagcaccagggcaccgtgaagagaagacaggaggaggaccacttccagttccccgacatggccgacggcggctaccccaacaagatcaagagaccctgcctggaggacgtgaccctggccatgggccccggcgcccaccccagcaccgcctgcgccgagctgcaggtgccccccctgaccatcaaccccagccccgccgccatgggcgtggccggccagagcctgctgctggagaacaaccccatgaacggcaacatcatgggcagccccttcgtggtgccccagaccaccgaggtgggcctgaagggccccaccgtgccctactacgagaagatcaacagcgtgcccgccgtggaccaggagctgcaggagctgctggaggagctgaccaagatccaggaccccagccccaacgagctggacctggagaagatcctgggcaccaagcccgaggagcccctggtgctggaccacccccaggccaccctgagcaccacccccaagcccagcgtgcagatgagccacctggagagcctggccagcagcaaggagttcgccagcagctgcagccaggtgaccggcatgagcctgcagatccccagcagcagcaccggcatcagctacagcatccccagcaccagcaagcagatcgtgagccccagcagcagcatggcccagagcaagagccaggtgcaggccatgctgcccgtggccctgccccccctgcccgtgccccagtggcaccacgcccaccagctgaaggccctggccgccagcaagcagggcagcgccaccaagcagcagggccccacccccagctggagcggcctgcccccccccggcctgagccccccctacagacccgtgcccagcccccaccccccccccctgcccctgccccccccccccccccccttcagcccccagagcctgatggtgagctgcatgagcagcaacaccctgagcggcagcaccctgagaggcagccccaacgccctgctgagcagcatgaccagcagcagcaacgccgccctgggccccgccatgccctacgcccccgagaagctgcccagccccgccctgacccagcagccccagttcggcccccagagcagcatcctggccaacctgatgagcagcaccatcaagaccccccagggccacctgatgagcgccctgcccgccagcaaccccggccccagccccccctacagacccgagaagctgagcagccccggcctgccccagcagagcttcaccccccagtgcagcctgctgcactacctgcagcagcccacccccacccaggccagcagcgccaccgccagcagcaccgccaccgccaccctgcagctgcagcagcagcagcagcagcagcagcagcagcccgaccacagcagcttcctgctgcagcagatgatgcagcagccccagagattccagagaagcgtggccagcgacagcatgcccgccctgcccagacagggctgctgccacctgttcgcctggaccagcgccgccagcagcgtgaagccccagcaccagcacggcaacagcttcaccagcagacaggacccccagcccggcgacgtgagccccagcaacatcacccacgtggacaaggcctgcaagctgggcgaggccagacacccccaggtgagcctgggcagacagccccccagctgccaggccctgggcagcgagagcttcctgcccggcagcagcttcgcccacgagctggccagagtgaccagcagctacagcaccagcgaggccgccccctggggcagctgggaccccaaggcctggagacaggtgcccgcccccctgctgcccagctgcgacgccaccgccagaggcaccgagatcagaagctacggcaacgacccctag

SEQ ID NO: 156607 - protein, 142 aa, Artificial Sequence
  derived and/or modified sequence
MPRCRWLSLILLTIPLALVARKDPKKNETGVLRKLKPVNASNANVKQCLWFAMQEYNKESEDKYVFLVVKTLQAQLQVTNLLEYLIDVEIARSDCRKPLSTNEICAIQENSKLKRKLSCSFLVGALPWNGEFTVMEKKCEDA

SEQ ID NO: 156608 - protein, 134 aa, Artificial Sequence
  derived and/or modified sequence
MPRCRWLSLILLTIPLALVARKDPKKNETGVLRKLKPVNASNANVKQCLWFAMQEYNKESEDKYVFLVVKTLQAQLQVTNLLEYLIDVEIARSDCRKPLSTNEICAIQENSKLKRKLSCSFLVGALPWNGEFTV

SEQ ID NO: 156609 - DNA, 429 bp, Artificial Sequence
  derived and/or modified sequence
atgccaagatgcagatggttgagtttaatcctccttacaatccctctggccttggtcgccagaaaggatcccaagaagaatgagaccggcgtgttgagaaagctcaaacctgtgaacgcctctaacgctaacgtgaagcagtgcctgtggttcgctatgcaggaatacaataaagaatctgaagacaagtatgtatttcttgtagtgaagaccctccaggcccaactgcaggtgacaaacctgctggaatacctgatagacgtcgaaatagccagaagcgattgcagaaaacccctgtcaactaacgagatatgtgccatccaggagaatagcaagctgaaacgaaaattgagctgttccttcttagtgggtgcactcccctggaatggcgagtttactgtcatggagaaaaagtgcgaagacgcttag

SEQ ID NO: 156610 - DNA, 405 bp, Artificial Sequence
  derived and/or modified sequence
atgccacgatgtcgctggttaagtttaatcctgctgaccatccctctggcgctcgtggccagaaaagaccctaagaagaacgagacaggcgttctgaggaaactcaagcctgtgaacgcatccaatgccaacgtgaagcagtgtctgtggttcgctatgcaggagtacaacaaggagtcagaggataagtatgtatttctagtcgtgaaaacactgcaggcacagctccaggtcactaatctcctcgagtatctgattgatgttgagattgctaggtccgattgccgtaaacccctaagcacaaatgagatttgcgctattcaggagaattcaaaactgaaacgaaaattgtcttgcagtttccttgtgggcgctctaccatggaacggagagtttacggtctag

SEQ ID NO: 156611 - DNA, 429 bp, Artificial Sequence
  derived and/or modified sequence
atgccacggtgccggtggctgagcctcattctccttacaatcccacttgccctggtcgcacgaaaggaccctaagaaaaacgagactggcgttttacggaaacttaagcccgtgaatgcaagtaatgccaatgtcaagcaatgtctatggtttgctatgcaagagtataacaaggagtctgaagataaatatgttttccttgtggtgaagacactgcaggcccagctgcaagtaacaaacctgctagaatatctgattgatgttgagattgcgaggtcagactgtcgaaagcctcttagcacaaatgagatttgcgccattcaagaaaattctaaactaaaacgcaaattatcgtgttcttttttagttggtgccctgccttggaacggtgagtttactgttatggaaaaaaaatgcgaagacgcctag

SEQ ID NO: 156612 - DNA, 405 bp, Artificial Sequence
  derived and/or modified sequence
atgcctcgctgcagatggttgagtttgatccttctcacgattcctttagctcttgtagcccgcaaggaccctaaaaaaaacgagacaggcgtattgaggaagttaaagcccgttaacgcatcgaatgcaaatgtgaaacagtgcctttggttcgctatgcaagagtataataaggagtccgaggataagtatgttttcctagtagttaagacactgcaggcccagctccaggtaacaaatctgctagagtacttaatcgacgtagagatagcccggtctgattgtagaaagccactcagtactaatgaaatatgtgccatacaggagaatagcaaacttaaaagaaaactgagctgctctttcctcgtgggggctctgccatggaatggggagtttaccgtttag

SEQ ID NO: 156613 - DNA, 429 bp, Artificial Sequence
  derived and/or modified sequence
atgccccgctgtagatggctctccctcatcctgctcacaattcccctggctttagtggcgagaaaggacccaaagaaaaacgagaccggcgtgctcagaaaactgaaaccagtgaatgcatcaaacgccaacgtcaaacaatgcctctggttcgccatgcaggaatataataaggaaagcgaagacaagtatgttttcttggttgtgaagactttacaagcccagcttcaggtgaccaatttgttagaatacttgatagacgtggagatagctagatcagactgtagaaaacctctttctacaaacgaaatatgcgctattcaggagaactccaagttaaagcggaaattatcttgttctttccttgtcggagcactaccatggaacggagagttcactgtgatggagaagaaatgtgaggacgcctag

SEQ ID NO: 156614 - DNA, 630 bp, Artificial Sequence
  derived and/or modified sequence
gcagaccaggacccacagagacccttgactgggccacaggcatgaactaagagtgctgaagacctaggagaaccactggtcagctgggctgacgctaacaggaggcagtgtgtggctcgaagattcttgaacccacagcagcagctgcggccaccccatcctgcccacagctccagccctgagacgacgaggaggagagtcgactttgcctcttgcccaagggaccatgcccaggtgccggtggctctccctgatcctcctcaccattcccctggccctggtggccaggaaagacccaaaaaagaatgagacaggggtgctgaggaaattaaaacccgtcaatgcctcaaatgccaacgtgaagcagtgtctgtggtttgccatgcaagaatacaacaaagagagcgaggacaagtatgtcttcctggtggtcaagacactgcaagcccagcttcaggtcacaaatcttctggaataccttattgatgtagaaattgcccgcagcgattgcagaaagcctttaagcactaatgaaatctgcgccattcaagaaaactccaagctgaaaaggaaattaagctgcagctttttggtaggagcacttccctggaatggtgaattcactgtgat

SEQ ID NO: 156615 - DNA, 405 bp, Artificial Sequence
  derived and/or modified sequence
atgccacggtgcagatggttatctcttatcctcctgacaataccactggctctggtagcccgaaaagaccctaaaaagaatgagaccggcgttcttcgcaagctgaagccagttaatgcctcaaatgccaatgtgaagcagtgtttgtggttcgccatgcaggaatacaacaaggaaagtgaagacaagtatgtcttcctcgtcgtgaagaccttacaggcacagctgcaagttacaaatctcctggagtacttgatagacgttgaaatcgcccgctcagattgcagaaaacctctttctacgaacgaaatatgcgccatccaagagaactccaagctgaagagaaagttgtcatgtagcttcctggtcggagcattgccgtggaatggagaattcaccgtctag

SEQ ID NO: 156616 - DNA, 890 bp, Artificial Sequence
  derived and/or modified sequence
ctgggccacaggcatgaactaagagtgctgaagacctaggagaaccactggtcaggtcagctcccagctccacagggagtaagaaggagctgcaggcacagcaggctgaaagtccaccaagggctgaggccacaaggcctctggggcagccacagttttcatgatcacatcatacaggactgagaagcagataacaagagtgacgctcacagggctgggctgacgctaacaggaggcagtgtgtggctcgaagattcttgaacccacagcagcagctgcggccaccccatcctgcccacagctccagccctgagacgacgaggaggagagtcgactttgcctcttgcccaagggaccatgcccaggtgccggtggctctccctgatcctcctcaccattcccctggccctggtggccaggaaagacccaaaaaagaatgagacaggggtgctgaggaaattaaaacccgtcaatgcctcaaatgccaacgtgaagcagtgtctgtggtttgccatgcaagaatacaacaaagagagcgaggacaagtatgtcttcctggtggtcaagacactgcaagcccagcttcaggtcacaaatcttctggaataccttattgatgtagaaattgcccgcagcgattgcagaaagcctttaagcactaatgaaatctgcgccattcaagaaaactccaagctgaaaaggaaattaagctgcagctttttggtaggagcacttccctggaatggtgaattcactgtgatggagaaaaagtgtgaagatgcttaatggtgttttgaggcatccctccaacctctgtgactactttatccatgaaaatgaagcaatggcaggtgggaggctcttcccaatgtgctttcttcatgcatgcc

SEQ ID NO: 156617 - DNA, 429 bp, Artificial Sequence
  derived and/or modified sequence
atgcccagatgcagatggctgagcctgatcctgctgaccatccccctggccctggtggccagaaaggaccccaagaagaacgagaccggcgtgctgagaaagctgaagcccgtgaacgccagcaacgccaacgtgaagcagtgcctgtggttcgccatgcaggagtacaacaaggagagcgaggacaagtacgtgttcctggtggtgaagaccctgcaggcccagctgcaggtgaccaacctgctggagtacctgatcgacgtggagatcgccagaagcgactgcagaaagcccctgagcaccaacgagatctgcgccatccaggagaacagcaagctgaagagaaagctgagctgcagcttcctggtgggcgccctgccctggaacggcgagttcaccgtgatggagaagaagtgcgaggacgcctag

SEQ ID NO: 156618 - DNA, 405 bp, Artificial Sequence
  derived and/or modified sequence
atgcccagatgcagatggctgagcctgatcctgctgaccatccccctggccctggtggccagaaaggaccccaagaagaacgagaccggcgtgctgagaaagctgaagcccgtgaacgccagcaacgccaacgtgaagcagtgcctgtggttcgccatgcaggagtacaacaaggagagcgaggacaagtacgtgttcctggtggtgaagaccctgcaggcccagctgcaggtgaccaacctgctggagtacctgatcgacgtggagatcgccagaagcgactgcagaaagcccctgagcaccaacgagatctgcgccatccaggagaacagcaagctgaagagaaagctgagctgcagcttcctggtgggcgccctgccctggaacggcgagttcaccgtgtag

SEQ ID NO: 156619 - DNA, 429 bp, Artificial Sequence
  derived and/or modified sequence
atgccccgctgtagatggctttcactcatactcctcacaattcccctcgcactagtggcacgcaaggatcctaaaaaaaacgaaactggtgtcttgagaaaactaaaacccgtaaatgcctcaaacgctaacgttaaacaatgtctgtggttcgcaatgcaagagtataataaggagtcagaggataagtacgttttcctggttgtcaaaacactgcaagcgcagcttcaggtcacaaacttgttggaatacctgattgatgttgagatcgcccgaagcgattgtaggaaacctttgtccaccaatgaaatttgtgccattcaggagaattccaagttgaagagaaaactgtcatgctcatttttggtcggcgccctaccttggaacggagagttcaccgtgatggagaagaaatgcgaggatgcatag

SEQ ID NO: 156620 - DNA, 405 bp, Artificial Sequence
  derived and/or modified sequence
atgccacgatgtcgttggctttcccttattcttcttaccatccccttggctctggtggcaagaaaggatcccaaaaaaaatgagacaggggtgctccgcaagctcaagccggtgaacgctagtaacgccaacgtgaagcagtgtctctggtttgcgatgcaggagtacaataaggaatccgaggacaagtacgtgttcctcgtggtgaaaaccttgcaggcacagctgcaggtcactaaccttctggagtacctgatcgacgtggagatcgccagatcagattgccgtaaacccctgagcacaaatgagatttgtgcaattcaggaaaatagcaaattgaagcgtaagctgtcttgttccttcctcgtgggtgcattgccctggaatggtgagttcaccgtctag

SEQ ID NO: 156621 - DNA, 429 bp, Artificial Sequence
  derived and/or modified sequence
atgccccgctgccgctggctgagcctcatcctgctgaccatccccctggccctggtggccaggaaggaccccaagaagaatgaaacaggagtgctgaggaagctgaagcctgtgaatgccagcaatgccaacgtgaagcagtgcctgtggtttgccatgcaggagtacaacaaggagagcgaggacaagtatgtgttcctggtggtgaagaccctgcaggcccagctgcaggtgaccaacctgctggagtacctgattgatgtggagatcgcccggagtgactgcaggaagcccctgagcaccaatgagatctgtgccatccaggagaacagcaagctgaagaggaagctgagctgcagcttcctggtgggcgccctgccctggaatggagagttcaccgtgatggagaagaagtgtgaagatgcctag

SEQ ID NO: 156622 - DNA, 405 bp, Artificial Sequence
  derived and/or modified sequence
atgccccgctgccgctggctgagcctcatcctgctgaccatccccctggccctggtggccaggaaggaccccaagaagaatgaaacaggagtgctgaggaagctgaagcctgtgaatgccagcaatgccaacgtgaagcagtgcctgtggtttgccatgcaggagtacaacaaggagagcgaggacaagtatgtgttcctggtggtgaagaccctgcaggcccagctgcaggtgaccaacctgctggagtacctgattgatgtggagatcgcccggagtgactgcaggaagcccctgagcaccaatgagatctgtgccatccaggagaacagcaagctgaagaggaagctgagctgcagcttcctggtgggcgccctgccctggaatggagagttcaccgtgtag

SEQ ID NO: 156623 - DNA, 429 bp, Artificial Sequence
  derived and/or modified sequence
atgccccggtgccggtggctgagcctgatcctgctgaccatcccccttgcgctggttgcgaggaaagaccccaaaaaaaacgaaactggggtcctgaggaaacttaaaccagttaatgcgtccaatgctaatgtgaaacagtgtctctggttcgccatgcaagaatacaacaaggaatcagaagacaaatatgtcttcctagtggtaaaaactctgcaggcacaactccaggttactaatctgttagagtatctgatcgatgtggagattgcacggagcgattgcaggaagcccctgtcaaccaacgaaatatgtgccattcaggagaactcaaagctgaagagaaagctgtcatgcagttttctggtgggcgccctgccttggaacggcgaatttacagttatggaaaaaaaatgcgaagacgcatag

SEQ ID NO: 156624 - DNA, 405 bp, Artificial Sequence
  derived and/or modified sequence
atgccccggtgccggtggctgagcctgatcctgctgaccatccccctcgcgctagtggcaaggaaagaccctaagaagaacgagaccggcgtcctcagaaaactaaagcccgtgaacgcatcgaatgccaatgtgaagcagtgcctgtggttcgccatgcaggagtataataaggagtccgaagataagtacgtgttcttggtggtaaagacactacaggcccagttgcaggtcactaacttactggaatacctgatcgacgtggaaattgccaggtccgattgccggaaaccattgtcgactaacgaaatttgtgccattcaggaaaattccaagttaaagcgcaaactgtcttgctccttcttggtgggcgccctgccatggaacggagaattcacagtctag

SEQ ID NO: 156625 - RNA, 429 nt, Artificial Sequence
  derived and/or modified sequence
augccacggugccgguggcugagccucauucuccuuacaaucccacuugcccuggucgcacgaaaggacccuaagaaaaacgagacuggcguuuuacggaaacuuaagcccgugaaugcaaguaaugccaaugucaagcaaugucuaugguuugcuaugcaagaguauaacaaggagucugaagauaaauauguuuuccuuguggugaagacacugcaggcccagcugcaaguaacaaaccugcuagaauaucugauugauguugagauugcgaggucagacugucgaaagccucuuagcacaaaugagauuugcgccauucaagaaaauucuaaacuaaaacgcaaauuaucguguucuuuuuuaguuggugcccugccuuggaacggugaguuuacuguuauggaaaaaaaaugcgaagacgccuag

SEQ ID NO: 156626 - RNA, 405 nt, Artificial Sequence
  derived and/or modified sequence
augccucgcugcagaugguugaguuugauccuucucacgauuccuuuagcucuuguagcccgcaaggacccuaaaaaaaacgagacaggcguauugaggaaguuaaagcccguuaacgcaucgaaugcaaaugugaaacagugccuuugguucgcuaugcaagaguauaauaaggaguccgaggauaaguauguuuuccuaguaguuaagacacugcaggcccagcuccagguaacaaaucugcuagaguacuuaaucgacguagagauagcccggucugauuguagaaagccacucaguacuaaugaaauaugugccauacaggagaauagcaaacuuaaaagaaaacugagcugcucuuuccucgugggggcucugccauggaauggggaguuuaccguuuag

SEQ ID NO: 156627 - RNA, 429 nt, Artificial Sequence
  derived and/or modified sequence
augccccgcuguagauggcucucccucauccugcucacaauuccccuggcuuuaguggcgagaaaggacccaaagaaaaacgagaccggcgugcucagaaaacugaaaccagugaaugcaucaaacgccaacgucaaacaaugccucugguucgccaugcaggaauauaauaaggaaagcgaagacaaguauguuuucuugguugugaagacuuuacaagcccagcuucaggugaccaauuuguuagaauacuugauagacguggagauagcuagaucagacuguagaaaaccucuuucuacaaacgaaauaugcgcuauucaggagaacuccaaguuaaagcggaaauuaucuuguucuuuccuugucggagcacuaccauggaacggagaguucacugugauggagaagaaaugugaggacgccuag

SEQ ID NO: 156628 - RNA, 405 nt, Artificial Sequence
  derived and/or modified sequence
augccacggugcagaugguuaucucuuauccuccugacaauaccacuggcucugguagcccgaaaagacccuaaaaagaaugagaccggcguucuucgcaagcugaagccaguuaaugccucaaaugccaaugugaagcaguguuugugguucgccaugcaggaauacaacaaggaaagugaagacaaguaugucuuccucgucgugaagaccuuacaggcacagcugcaaguuacaaaucuccuggaguacuugauagacguugaaaucgcccgcucagauugcagaaaaccucuuucuacgaacgaaauaugcgccauccaagagaacuccaagcugaagagaaaguugucauguagcuuccuggucggagcauugccguggaauggagaauucaccgucuag

SEQ ID NO: 156629 - protein, 729 aa, Artificial Sequence
  derived and/or modified sequence
MSGQPPPPPPQQQQQQQQLSPPPPAALAPVSGVVLPAPPAVSAGSSPAGSPGGGAGGEGLGAAAAALLLHPPPPPPPATAAPPPPPPPPPPPASAAAPASGPPAPPGLAAGPGPAGGAPTPALVAGSSAAAPFPHGDSALNEQEKELQRRLKRLYPAVDEQETPLPRSWSPKDKFSYIGLSQNNLRVHYKGHGKTPKDAASVRATHPIPAACGIYYFEVKIVSKGRDGYMGIGLSAQGVNMNRLPGWDKHSYGYHGDDGHSFCSSGTGQPYGPTFTTGDVIGCCVNLINNTCFYTKNGHSLGIAFTDLPPNLYPTVGLQTPGEVVDANFGQHPFVFDIEDYMREWRTKIQAQIDRFPIGDREGEWQTMIQKMVSSYLVHHGYCATAEAFARSTDQTVLEELASIKNRQRIQKLVLAGRMGEAIETTQQLYPSLLERNPNLLFTLKVRQFIEMVNGTDSEVRCLGGRSPKSQDSYPVSPRPFSSPSMSPSHGMNIHNLASGKGSTAHFSGFESCSNGVISNKAHQSYCHSNKHQSSNLNVPELNSINMSRSQQVNNFTSNDVDMETDHYSNGVGETSSNGFLNGSSKHDHEMEDCDTEMEVDSSQLRRQLCGGSQAAIERMIHFGRELQAMSEQLRRDCGKNTANKKMLKDAFSLLAYSDPWNSPVGNQLDPIQREPVCSALNSAILETHNLPKQPPLALAMGQATQCLGLMARSGIGSCAFATVEDYLH

SEQ ID NO: 156630 - protein, 391 aa, Artificial Sequence
  derived and/or modified sequence
MSGQPPPPPPQQQQQQQQLSPPPPAALAPVSGVVLPAPPAVSAGSSPAGSPGGGAGGEGLGAAAAALLLHPPPPPPPATAAPPPPPPPPPPPASAAAPASGPPAPPGLAAGPGPAGGAPTPALVAGSSAAAPFPHGDSALNEQEKELQRRLKRLYPAVDEQETPLPRSWSPKDKFSYIGLSQNNLRVHYKGHGKTPKDAASVRATHPIPAACGIYYFEVKIVSKGRDGYMGIGLSAQGVNMNRLPGWDKHSYGYHGDDGHSFCSSGTGQPYGPTFTTGDVIGCCVNLINNTCFYTKNGHSLGIAFTDLPPLDYPVSPRPFSSPSMSPSHGMNIHNLASGKGSTAHFSGFESCSNGVISNKAHQSYCHSNKHQSSNECTRTKQYKYVKITAS

SEQ ID NO: 156631 - protein, 500 aa, Artificial Sequence
  derived and/or modified sequence
MGIGLSAQGVNMNRLPGWDKHSYGYHGDDGHSFCSSGTGQPYGPTFTTGDVIGCCVNLINNTCFYTKNGHSLGIAFTDLPPNLYPTVGLQTPGEVVDANFGQHPFVFDIEDYMREWRTKIQAQIDRFPIGDREGEWQTMIQKMVSSYLVHHGYCATAEAFARSTDQTVLEELASIKNRQRIQKLVLAGRMGEAIETTQQLYPSLLERNPNLLFTLKVRQFIEMVNGTDSEVRCLGGRSPKSQDSYPVSPRPFSSPSMSPSHGMNIHNLASGKGSTAHFSGFESCSNGVISNKAHQSYCHSNKHQSSNLNVPELNSINMSRSQQVNNFTSNDVDMETDHYSNGVGETSSNGFLNGSSKHDHEMEDCDTEMEVDSSQLRRQLCGGSQAAIERMIHFGRELQAMSEQLRRDCGKNTANKKMLKDAFSLLAYSDPWNSPVGNQLDPIQREPVCSALNSAILETHNLPKQPPLALAMGQATQCLGLMARSGIGSCAFATVEDYLH

SEQ ID NO: 156632 - DNA, 2190 bp, Artificial Sequence
  derived and/or modified sequence
atgtcaggacagcctcccccaccccccccccagcagcagcagcagcagcagcaactgtccccgccaccgccggcagccctagcaccggtgtcaggcgttgtgttgccagctcctcccgccgtgtcagccggaagcagcccagcgggttctccagggggcggagctgggggagaaggactgggcgccgccgctgctgctttgctgctgcatcctccccctcccccaccaccagcaaccgctgctccacctcccccgccacctcctccacccccacctgcatcggcggccgctccagccagtggccctccagccccaccgggtcttgctgcaggccctgggcccgccggcggagctcctactccagccttggtggcaggaagttccgctgcagccccatttcctcatggggatagcgcgctgaacgaacaggaaaaagagctgcaaagacgcctcaaaaggctgtacccagcagttgacgaacaggaaacacccctcccgcggtcttggtcaccaaaagacaaattttcttatatcggcttgagccagaataatctcagggttcattataagggtcatggaaaaacaccaaaagatgctgctagcgtgcgcgcgacccaccccattcccgctgcatgtggcatctattatttcgaggtgaaaatagtctctaaaggccgcgatggctatatggggatcgggctgtccgcacaaggggtcaacatgaaccgcctccctggctgggataagcattcctacggctatcacggagatgatgggcattctttttgctcatccggaaccgggcaaccttacgggcccacatttacaaccggagacgtgatcggctgttgtgtgaacctcatcaataatacctgcttctacaccaaaaacggtcatagcctcggcatcgcatttactgatctgcctccaaacttgtaccccactgttggtctgcaaaccccgggagaggtcgttgacgccaacttcggccaacaccctttcgtgttcgacatcgaagattatatgcgggaatggcgaaccaagatccaagcccagatcgaccgctttcccatcggcgatcgggagggggaatggcaaactatgatccagaagatggtgagtagctacctcgtacatcacgggtactgcgcaaccgccgaagccttcgccagatcaacggatcagacggtcctggaagagctggcctcaatcaagaaccgacagcggattcagaaactggtcttggccggcagaatgggcgaggctatcgaaacaacgcaacagctctacccatctctcctcgagcggaatcccaacctgttgtttacacttaaggtcaggcagtttattgagatggtgaacgggaccgactctgaagtgcgatgcctgggcggaaggtctcccaaatcacaggattcttacccagtctccccgagacctttcagttctcctagcatgagcccttcacacggtatgaacatccataatttagcctctgggaagggtagtacagcacacttcagtggttttgaatcctgttctaatggagtcataagtaacaaggcccaccagagttattgccactcgaataaacaccagtccagtaatcttaatgtgcccgaacttaattcaatcaacatgagcaggagtcaacaggttaataatttcacctctaacgatgtggacatggagacggatcactattccaatggtgtaggagagacttccagcaatggttttctcaatggatcttcgaagcacgatcacgaaatggaggattgtgatacagaaatggaggtagattcttcgcagctaagacgccaactgtgcggaggaagccaggcggctatcgaacggatgattcatttcggaagagagctacaggcaatgagcgaacagctgcgccgagattgtggcaaaaatacagcaaacaaaaaaatgctcaaggacgcgttctctctcctggcctactccgacccctggaattcacccgtcggaaaccagctcgacccaatacagagagagccggtgtgctcagccctgaatagcgctatactggaaacccataaccttcctaaacagccaccactcgcactggccatggggcaggccacgcagtgtctgggcttgatggcaaggtctggaatcggcagctgtgcgtttgccaccgttgaagactacctccattag

SEQ ID NO: 156633 - DNA, 2190 bp, Artificial Sequence
  derived and/or modified sequence
atgagcggccagcccccacctcctccaccccagcagcagcagcagcagcagcagctgagccccccacctcctgctgccctggcccctgtgtctggagtggtgctgcctgcccccccagctgtgtctgctggcagcagccctgctggcagccctgggggcggggccggcggggagggcctgggcgctgctgctgctgccctgctgctgcaccccccacctcctcctcctccagccacagctgcccctcctcctcctcctcctcctcctcctcctccagccagcgctgctgccccagccagcggccccccagcccctcctggcctggccgccggccctggccctgctggaggagcccccaccccagccctggtggccggcagcagcgctgctgcccccttcccccatggagacagcgccctgaatgagcaggagaaggagctgcagaggcggctgaagaggctgtacccagctgtggatgagcaggagacccccctgcccaggtcctggagccccaaggacaagttctcctacatcggcctgagccagaacaacctgcgggtgcactacaagggccacggcaagacccccaaggatgctgcctctgtgcgggccacccaccccatcccagctgcctgtggcatctactactttgaggtgaagatcgtgtccaagggcagagatggctacatgggcatcggcctgagcgcccagggcgtgaacatgaaccggctgcccggctgggacaagcacagctatggctaccatggagatgatggccacagcttctgcagcagcggcaccggccagccctacggccccaccttcaccactggagatgtgattggctgctgcgtgaacctgatcaacaacacctgcttctacaccaagaatggccacagcctgggcatcgccttcacagacctgccccccaacctgtaccccaccgtgggcctgcagaccccaggagaggtggtggatgccaactttggccagcacccctttgtgtttgatattgaggactacatgagggagtggaggaccaagatccaggcccagattgaccgcttccccatcggggaccgggagggggagtggcagaccatgatccagaagatggtgtcctcctacctggtgcaccacggctactgtgccacagctgaggcctttgcccggagcacagaccagacagtgctggaggagctggccagcatcaagaaccggcagaggatccagaagctggtgctggccggccgcatgggagaggccatcgagaccacccagcagctgtaccccagcctgctggagaggaaccccaacctgctcttcaccctgaaggtgcggcagttcatcgagatggtgaatggaacagacagcgaggtgcgctgcctgggcggccgcagccccaagagccaggacagctaccctgtgagcccccggcccttcagcagccccagcatgagccccagccacggcatgaacatccacaacctggccagcggcaagggcagcacagcccacttcagcggctttgagagctgcagcaatggagtcatcagcaacaaggcccaccagagctactgccacagcaacaagcaccagagcagcaacctgaatgtgcctgagctgaacagcatcaacatgagccgcagccagcaggtgaacaacttcaccagcaatgatgtggacatggagacagaccactacagcaatggagtgggggagaccagcagcaatggcttcctgaatggcagcagcaagcatgaccacgagatggaggactgtgacacagagatggaggtggacagcagccagctgcggcggcagctgtgtggcggcagccaggccgccattgaaagaatgatccacttcggccgggagctgcaggccatgtctgagcagctgcggcgggactgtgggaagaacacagccaacaagaagatgctgaaggatgccttcagcctgctggcctacagcgacccctggaacagccctgtgggcaaccagctggaccccatccagcgggagcctgtgtgcagcgccctgaacagcgccatcctggagacccacaacctgcccaagcagccccccctggccctggccatgggccaggccacccagtgcctgggcctgatggcccggagcggcatcggcagctgtgcctttgccaccgtggaggactacctgcactag

SEQ ID NO: 156634 - DNA, 2190 bp, Artificial Sequence
  derived and/or modified sequence
atgagcggccagcccccccccccccccccccagcagcagcagcagcagcagcagctgagcccgccccccccagcagctctggcaccagtgtccggagtagtgctgccagcaccacccgcggtcagtgcgggcagcagcccggcagggtcacccgggggaggcgccgggggggagggcttaggggctgctgccgccgccctattgttgcatccccctccacccccccccccggctactgcagcacctcccccccctcctcctccccccccacctcccgcctcagcagcggctcccgcgagtgggccacctgctccacccgggctggcagctggccccggcccagcggggggcgctccgacccccgctttggtggccggtagttctgccgctgcccctttcccccatggagatagtgcgctgaatgagcaagaaaaggaattgcaacgaagactgaagcggttataccctgctgtggacgagcaggaaacacctttgcctcggagctggagcccgaaagacaagtttagctatattggcctttcccagaataatctacgcgtccattataaaggacatggtaagacccctaaggatgccgcatctgtgagagcaactcaccctatccccgccgcgtgcggaatctactactttgaagttaaaattgtgtcaaagggtcgggacggctacatggggattggcttgtcagcccaaggcgtaaacatgaaccgcttgccaggctgggataaacacagctatggatatcacggagatgatggccattcgttttgttcttcaggcactgggcagccctacggcccaaccttcactactggagatgtgataggttgttgtgtgaacctgattaataacacctgcttttacacaaagaacgggcatagcctaggaatagcatttaccgacctcccccctaatctgtaccccactgtaggactccagaccccaggagaagtcgtcgatgccaatttcggccagcatccattcgtgttcgacatagaggactacatgcgggagtggaggactaaaatccaggcccagatagatcgttttcccatcggggacagagagggagagtggcagacgatgattcaaaagatggtgtcatcgtatttggtgcatcacggatactgtgccactgccgaggctttcgctcggtccacagaccagacggtgctcgaagaactggccagtatcaagaacaggcagcggatacagaaactcgtactcgctgggaggatgggagaggccattgagacgacccaacagctttacccctccctattagagcgcaacccaaacctcctgtttacactgaaggtgcggcagtttatcgaaatggtgaacgggacagacagcgaggttcgatgtttgggcggcagatctcctaagtcccaagatagctaccctgtgtcacccaggcccttttcctcaccgtcaatgtccccctcccacggaatgaacatccacaacttagcctctggtaaaggctccacggctcacttctccggcttcgaatcctgcagtaacggcgtgatctctaataaagcccatcagtcctattgtcactcaaataagcaccagagcagcaatctgaatgtgcctgaactgaatagcataaacatgtcgaggagccagcaggtgaataacttcacatcaaatgacgtggacatggagaccgatcattattccaacggggtgggcgagacaagttcaaatggctttctgaatggctcctcaaagcacgaccacgagatggaggactgcgatacggaaatggaggttgattcgagtcaactgagacgtcagctctgcggaggctcgcaggctgcaatagaacggatgattcactttggcagagagctccaggccatgtccgagcaactgcgccgggattgtgggaagaacaccgcaaataagaagatgcttaaggatgccttttcgctgcttgcgtacagcgacccatggaattcccccgtcggcaaccagctggaccccattcagcgggagcctgtctgcagtgccctgaattctgccatcctggagacgcataacctccctaaacagccacccctggccctcgccatggggcaggccacccagtgtctgggcttaatggcccgttcaggaattgggagttgtgccttcgccacggtggaggactatctccattag

SEQ ID NO: 156635 - DNA, 2190 bp, Artificial Sequence
  derived and/or modified sequence
atgagtggtcaaccaccccctccccctccgcagcagcagcagcagcaacagcaactttccccccctccccctgcagcacttgccccagtatcaggggttgtgctccccgctccgccagcggtcagcgcaggttctagccctgcagggtctcccggtgggggagccggtggggaggggctgggtgctgccgcagcggcactgctcctgcatccccctccacctcccccacccgcaacggcagctccaccaccccctccacccccaccacctccccctgcgagcgctgccgctcctgccagtgggccaccagcgcctcccggtctggccgcagggccaggccctgccggaggagctcccacgcctgccctggtcgctggttcctcggcggctgccccatttcctcacggcgatagtgctttgaatgaacaagagaaggaactacagagaaggctgaagcgactttaccctgccgtggatgaacaggaaacccctctccccagaagctggagccctaaggacaagtttagctatatagggctgagccaaaataacctcagagttcattacaaggggcatggcaaaacaccaaaagacgcagccagcgtcagagcaacccatccgatccccgctgcctgtggcatctattattttgaggttaaaattgtcagtaagggtcgcgatggctatatggggatcggcctcagcgctcagggcgtgaacatgaataggcttccaggatgggataagcattcatacggctatcacggtgacgacgggcactctttttgtagttccggtacaggtcagccctatggaccaacctttaccactggcgatgtcatcggctgttgtgtaaacctgattaataacacgtgcttctatacaaagaacgggcactctcttgggattgcgttcacagacctgcccccaaacttatacccgaccgtggggctgcagacgcccggagaagtggtggacgccaatttcggacagcaccccttcgtgttcgatatagaggattacatgagggagtggagaacaaagatccaggcccagatcgatcgatttccaatcggagatcgggagggtgagtggcaaactatgatccagaagatggtctcatcttatctggtccaccacggctactgcgccaccgcagaggcctttgccaggagtaccgaccaaacagtgctggaagagctggccagcattaaaaatcgccagagaattcagaagctcgtgctggctgggcgtatgggcgaggccatcgaaacaacccagcagctttaccctagtcttctggaacggaatcctaatcttttgttcacgttgaaggtgagacagttcattgaaatggttaacggcacagattcagaagtccgatgcctgggtggaagaagcccaaagagccaggacagttatcctgtttcacctaggcctttctctagcccttccatgagcccttcccatggcatgaatatccataacctggcttccgggaaggggtcaaccgcccatttctcaggctttgaatcatgttcaaacggtgttatttctaacaaagcacaccagagttactgccactccaacaaacatcagtcctccaacttgaatgtccccgagctcaacagtataaatatgagccgctctcagcaggtgaacaattttacttccaacgatgtcgatatggaaacagatcactactcaaacggggtgggtgagacttcgtccaatgggttcctgaacggctcctcaaagcatgatcacgaaatggaagattgtgacactgagatggaggtcgatagttcacagctcagaagacagctctgcgggggttcccaagccgctatcgagcggatgattcacttcgggagagagctgcaggcaatgtctgaacagctccgaagggactgtgggaaaaacaccgctaacaaaaaaatgttgaaagacgcgttctcactgctcgcttatagcgacccatggaatagccctgtgggaaaccagctggaccctattcagagggagccagtctgctccgctctgaattcagcaattttggaaactcataacttgcccaagcagcctcccctggctctggctatgggacaggctacccagtgccttggactgatggcccgtagtggaatcggcagctgtgctttcgccacggttgaggactacctacactag

SEQ ID NO: 156636 - DNA, 2190 bp, Artificial Sequence
  derived and/or modified sequence
atgtccggccagcctcctccccctccgccccagcagcagcagcagcaacagcaattgagcccacctcctcccgcagccctcgccccagtatcgggcgttgtcctgcctgccccccccgctgtctcagcagggtcctctcccgcaggatctcctgggggcggcgcgggcggtgagggccttggtgccgctgccgctgcgcttctgcttcacccccctccgccacctccgcccgcaaccgcagccccccctccgccccccccgccgccaccacctcccgcaagtgcagcagcacccgcaagtgggccacccgctccccccggcctcgctgctggtcccggacccgccggcggcgctcccacccccgccctggtcgctggttcctccgccgccgctcctttccctcacggagacagtgcactgaacgagcaagagaaagagcttcagcggagactcaagagactctacccggccgtcgacgagcaggagacccctctaccgcggtcctggtccccaaaggacaagttcagctacatcgggctgagtcagaacaacctaagagtgcattacaagggccatggcaaaactcccaaagatgccgcatcagtgcgtgctactcatcccatcccggctgcttgcgggatctattattttgaagttaagattgtcagtaagggccgagacggatacatgggcatcggactatccgctcaaggagtaaacatgaacaggctgcctggctgggataagcactcctacggctaccatggagacgacgggcacagcttttgtagcagtggtactggtcagccatatggcccaactttcaccacaggcgacgtcatcgggtgttgtgtgaatttaataaataatacatgtttttatacaaagaacgggcatagcttgggcattgcattcacagacctgcccccgaacctctatccaactgtcggcctccagacaccaggggaggttgtagacgccaacttcggacaacatccattcgtgttcgatattgaagactacatgcgggaatggagaactaaaatccaagcccagatagacagatttcctatcggggatcgggagggagagtggcagaccatgattcagaagatggtgtcatcgtacctggtgcaccatggctactgtgccaccgccgaggcttttgctaggtccaccgatcagaccgtactagaggaacttgcttcaataaaaaatagacaaaggatccagaaattggtgctcgccggtaggatgggagaggccatcgagaccactcaacagctatacccaagcctcctggagaggaatccaaatctgcttttcactctgaaagtgagacaattcatagaaatggtgaatggaactgatagtgaggtcagatgcctaggcgggcgcagcccaaaaagtcaggactcctatcccgtctctcctcggccattctccagtcctagcatgtcaccaagtcacggcatgaacatccacaatctggccagtggcaagggctccacagctcatttcagcgggtttgagagctgctcaaacggagttatctcaaacaaagcccaccagtcctactgccattctaacaaacaccagagtagcaacttaaatgtacccgagctgaatagtattaacatgtcccggtcccaacaggtgaataatttcacctccaatgacgttgacatggagacagaccattacagcaatggcgtaggagagacctcaagtaatgggttcctcaacggttccagcaagcatgatcacgagatggaggactgcgacaccgaaatggaggttgattcgtcacagctgcgacggcaactatgcggtgggtcccaagccgccattgagagaatgatccatttcggcagggaactacaagcgatgtccgagcagctgcgaagagactgcggaaaaaataccgccaacaagaagatgctcaaagacgcctttagtttactcgcatactccgacccctggaactcccctgtggggaaccagctggatcccattcagcgggagcctgtgtgctcggctcttaattctgctatcctggaaacccacaacctcccaaaacagccccccctggcgctggccatgggacaagccacacagtgcctcggcctcatggctagatccggaataggctcgtgcgcttttgcaacagttgaggactacctacactag

SEQ ID NO: 156637 - DNA, 2190 bp, Artificial Sequence
  derived and/or modified sequence
atgagtggccagccaccccccccgccacctcagcagcaacagcaacagcagcagctgtcacctcctccgcccgccgctctcgcccccgtctcaggagtggtattaccagcccccccagctgtttccgccgggtcatcccctgcaggcagccccggaggaggcgccggcggagaaggacttggagcagctgccgcggccctccttctacaccctccccccccgcctcccccagcaaccgctgcgcctcctccgcctccaccccctcccccaccaccagcttcagcagcagcgcccgcatcaggcccacctgccccacctggattagctgccggacctggaccagctggaggggccccaactccagcactggttgctggctccagtgccgctgcaccctttccacacggcgacagtgctcttaatgaacaggaaaaggagctgcagagacgtctcaagaggttgtacccagctgtggatgagcaggagacgccgctgccacgaagttggtctcctaaggacaaattttcctacatcggcctgtcacagaacaacctacgggtccactataaaggacacggtaaaactcccaaggatgccgcctctgtacgtgcaacccatcccattcctgcagcttgcggcatatattacttcgaggtcaagatagtctccaagggaagagacggatacatgggaatcggattgtctgcacaaggagttaatatgaaccgccttcctggctgggataagcacagctacgggtatcacggggatgacgggcacagtttctgctcctctggcactggtcagccctacggaccgacattcactactggagacgtgattggctgctgtgtgaatctgatcaataacacctgcttttatactaaaaatggccatagcctgggaatcgcctttaccgacttgcctcctaacttataccccaccgttggacttcagacacccggcgaggtggtcgacgccaattttggacagcatcctttcgtgttcgacatcgaggattatatgcgagaatggcgcactaaaattcaagctcagatcgataggttccccattggggatcgcgagggagagtggcagactatgatccagaagatggtctctagttatctagttcaccatggttactgcgctaccgctgaagctttcgcccgctctactgaccagaccgtccttgaagaactagcatcaatcaagaatcgccagagaatccaaaagcttgttctagccggacgtatgggcgaggccattgaaaccacccagcaactttatccttccctcctcgagaggaatccgaatctactttttacactcaaagtccggcaatttatcgagatggttaacggcaccgactcagaagttagatgcttgggcggcaggtcaccaaaaagtcaggacagctatccggtgtctccacggcctttctcaagcccttctatgagcccttcacatggtatgaacatccacaatctggctagcggtaaggggagcactgctcatttttccggattcgaaagttgctctaacggcgtcatatccaacaaggcccaccaaagttattgccactccaataagcaccaaagtagtaacctcaacgtccccgaactgaatagtatcaatatgtcacggtcccagcaggtgaacaactttacgagtaacgacgtcgacatggagacagaccactacagcaacggcgttggcgaaacatcctctaatggcttcctcaacggatccagcaaacacgatcacgaaatggaggactgtgataccgagatggaagtggattcttctcagctcaggcggcagctctgcggaggtagtcaagcggctattgagaggatgatacactttggccgagagttacaggcaatgtcagaacagctcagacgtgattgcggtaagaatacagcaaataaaaagatgcttaaagatgctttcagtctcctggcttatagcgatccttggaattcacccgtcggaaaccagcttgacccaatacagcgagaacctgtctgctcggcattaaattctgcgatactggaaacgcacaatctgcccaagcagccacctttagcccttgcaatgggacaagccacacagtgcctcggcctcatggctagatccggaataggctcgtgcgcttttgcaacagttgaggactacctacactag

SEQ ID NO: 156638 - DNA, 3113 bp, Artificial Sequence
  derived and/or modified sequence
gaagcagaggaggaaggagagaagaggtggaggtggccgcaggctgagtcgcggccgggatgtccgggcagccgccgccgccgccgccgcagcagcagcaacagcagcagcagctgtcgccgccaccgccggcggccttggccccagtctccggagtcgtcctgccggcgcccccggccgtcagcgccggctcttctccggccggctcgcccggcggcggtgcgggcggcgaaggcttaggggccgcggcggccgccctgctcctccaccctccgccgccgccgcccccggccaccgcggccccgccgcccccgccgccgcccccgcctccccctgcctcagcggctgcccccgccagcgggccgcccgctcccccgggccttgcagcgggccccggcccggctggaggagccccgaccccagctctggtggcgggcagcagcgccgcggcccccttccctcacggggactcggccctgaacgagcaggagaaggagttgcagcggcggctgaagcgtctctacccggccgtggacgaacaagagacgccgctgcctcggtcctggagcccgaaggacaagttcagctacatcggcctctctcagaacaacctgcgggtgcactacaaaggtcatggcaaaaccccaaaagatgccgcgtcagttcgagccacgcatccaataccagcagcctgtgggatttattattttgaagtaaaaattgtcagtaagggaagagatggttacatgggaattggtctttctgctcaaggtgtgaacatgaatagactaccaggttgggataagcattcatatggttaccatggggatgatggacattcgttttgttcttctggaactggacaaccttatggaccaactttcactactggtgatgtcattggctgttgtgttaatcttatcaacaatacctgcttttacaccaagaatggacatagtttaggtattgctttcactgacctaccgccaaatttgtatcctactgtggggcttcaaacaccaggagaagtggtcgatgccaattttgggcaacatcctttcgtgtttgatatagaagactatatgcgggagtggagaaccaaaatccaggcacagatagatcgatttcctatcggagatcgagaaggagaatggcagaccatgatacaaaaaatggtttcatcttatttagtccaccatgggtactgtgccacagcagaggcctttgccagatctacagaccagaccgttctagaagaattagcttccattaagaatagacaaagaattcagaaattggtattagcaggaagaatgggagaagccattgaaacaacacaacagttatacccaagtttacttgaaagaaatcctaatctccttttcacattaaaagtgcgtcagtttatagaaatggtgaatggtacagatagtgaagtacgatgtttgggaggccgaagtccaaagtctcaagacagttatcctgttagtcctcgaccttttagtagtccaagtatgagccccagccatggaatgaatatccacaatttagcatcaggcaaaggaagcaccgcacatttttcaggttttgaaagttgtagtaatggtgtaatatcaaataaagcacatcaatcatattgccatagtaataaacaccagtcatccaacttgaatgtaccagaactaaacagtataaatatgtcaagatcacagcaagttaataacttcaccagtaatgatgtagacatggaaacagatcactactccaatggagttggagaaacttcatccaatggtttcctaaatggtagctctaaacatgaccacgaaatggaagattgtgacaccgaaatggaagttgattcaagtcagttgagacgccagttgtgtggaggaagtcaggccgccatagaaagaatgatccactttggacgagagctgcaagcaatgagtgaacagctaaggagagactgtggcaagaacactgcaaacaaaaaaatgttgaaggatgcattcagtctactagcatattcagatccctggaacagcccagttggaaatcagcttgacccgattcagagagaacctgtgtgctcagctcttaacagtgcaatattagaaacccacaatctgccaaagcaacctccacttgccctagcaatgggacaggccacacaatgtctaggactgatggctcgatcaggaattggatcctgcgcatttgccacagtggaagactacctacattagctatgcatttcaagagctcacacttatattgtggcatatagtcaacatggaagtagaccagctctgctgatttgaaatttagattttttaaattatgtactggggacaggtttttgtcgctttacattgcttcctagtttacagcatgatgcaaatgattttctaacttagtgttaggagaaattattttccatctttaacctcttagttgtctaagagttaaatattactgaatttcagacgttcaaattgatcatcacaaatcctttaaaacaattacctaaaagaaaccaaaaatcctgccttctttgtgggggaggggggagagaggggaaggaaatggaacaagttgtgtttgtgttagcatgtgggtgatgtaaacttcaaattgggagatgttccgacccccactcccatataagcattcaatcagtgtaacttgcaaaatgcataaacatccgacagtttgaatttatagtgttgatggaagaaatcatttttaatgtgtactgtaaaacttgaaatactcaggagctgagtgaatatgtttgttgctacttacaatcccgacctgttagtcccagtagttttgttttaacatggtctttttcaactttgtttcctgtttaactacagatgacttctgttgtagactcacaagtttaactgttgtattataacagtattacatgtcaacggtgtggttatgacctttatttatataaaaaccaaatatttagtcaatttaccgtgtcttaatttaatctttgtacaccttccatttttaagtgcttaaatgagtactatattgcaataaaatgtagtgatataattaaccagccattaaaaatttacttctacaga

SEQ ID NO: 156639 - DNA, 1640 bp, Artificial Sequence
  derived and/or modified sequence
agaagccaaggaagtcagttcaaaggaggactgctaagtctccactggtttgtcatttggggggttaattagtccttgtgatagcagtttccttaaaattggggtgatagcaggtgcagtgtgtcaaagagagttacatgggaattggtctttctgctcaaggtgtgaacatgaatagactaccaggttgggataagcattcatatggttaccatggggatgatggacattcgttttgttcttctggaactggacaaccttatggaccaactttcactactggtgatgtcattggctgttgtgttaatcttatcaacaatacctgcttttacaccaagaatggacatagtttaggtattgctttcactgacctaccgccaaatttgtatcctactgtggggcttcaaacaccaggagaagtggtcgatgccaattttgggcaacatcctttcgtgtttgatatagaagactatatgcgggagtggagaaccaaaatccaggcacagatagatcgatttcctatcggagatcgagaaggagaatggcagaccatgatacaaaaaatggtttcatcttatttagtccaccatgggtactgtgccacagcagaggcctttgccagatctacagaccagaccgttctagaagaattagcttccattaagaatagacaaagaattcagaaattggtattagcaggaagaatgggagaagccattgaaacaacacaacagttatacccaagtttacttgaaagaaatcctaatctccttttcacattaaaagtgcgtcagtttatagaaatggtgaatggtacagatagtgaagtacgatgtttgggaggccgaagtccaaagtctcaagacagttatcctgttagtcctcgaccttttagtagtccaagtatgagccccagccatggaatgaatatccacaatttagcatcaggcaaaggaagcaccgcacatttttcaggttttgaaagttgtagtaatggtgtaatatcaaataaagcacatcaatcatattgccatagtaataaacaccagtcatccaacttgaatgtaccagaactaaacagtataaatatgtcaagatcacagcaagttaataacttcaccagtaatgatgtagacatggaaacagatcactactccaatggagttggagaaacttcatccaatggtttcctaaatggtagctctaaacatgaccacgaaatggaagattgtgacaccgaaatggaagttgattcaagtcagttgagacgccagttgtgtggaggaagtcaggccgccatagaaagaatgatccactttggacgagagctgcaagcaatgagtgaacagctaaggagagactgtggcaagaacactgcaaacaaaaaaatgttgaaggatgcattcagtctactagcatattcagatccctggaacagcccagttggaaatcagcttgacccgattcagagagaacctgtgtgctcagctcttaacagtgcaatattagaaacccacaatctgccaaagcaacctccacttgccctagcaatgggacaggccacacaatgtctaggactgatggctcgatcaggaattggatcctgcgcatttgccacagtggaagactacctacattag

SEQ ID NO: 156640 - DNA, 2190 bp, Artificial Sequence
  derived and/or modified sequence
atgagcggccagcccccccccccccccccccagcagcagcagcagcagcagcagctgagcccccccccccccgccgccctggcccccgtgagcggcgtggtgctgcccgccccccccgccgtgagcgccggcagcagccccgccggcagccccggcggcggcgccggcggcgagggcctgggcgccgccgccgccgccctgctgctgcaccccccccccccccccccccccgccaccgccgcccccccccccccccccccccccccccccccccccgccagcgccgccgcccccgccagcggcccccccgccccccccggcctggccgccggccccggccccgccggcggcgcccccacccccgccctggtggccggcagcagcgccgccgcccccttcccccacggcgacagcgccctgaacgagcaggagaaggagctgcagagaagactgaagagactgtaccccgccgtggacgagcaggagacccccctgcccagaagctggagccccaaggacaagttcagctacatcggcctgagccagaacaacctgagagtgcactacaagggccacggcaagacccccaaggacgccgccagcgtgagagccacccaccccatccccgccgcctgcggcatctactacttcgaggtgaagatcgtgagcaagggcagagacggctacatgggcatcggcctgagcgcccagggcgtgaacatgaacagactgcccggctgggacaagcacagctacggctaccacggcgacgacggccacagcttctgcagcagcggcaccggccagccctacggccccaccttcaccaccggcgacgtgatcggctgctgcgtgaacctgatcaacaacacctgcttctacaccaagaacggccacagcctgggcatcgccttcaccgacctgccccccaacctgtaccccaccgtgggcctgcagacccccggcgaggtggtggacgccaacttcggccagcaccccttcgtgttcgacatcgaggactacatgagagagtggagaaccaagatccaggcccagatcgacagattccccatcggcgacagagagggcgagtggcagaccatgatccagaagatggtgagcagctacctggtgcaccacggctactgcgccaccgccgaggccttcgccagaagcaccgaccagaccgtgctggaggagctggccagcatcaagaacagacagagaatccagaagctggtgctggccggcagaatgggcgaggccatcgagaccacccagcagctgtaccccagcctgctggagagaaaccccaacctgctgttcaccctgaaggtgagacagttcatcgagatggtgaacggcaccgacagcgaggtgagatgcctgggcggcagaagccccaagagccaggacagctaccccgtgagccccagacccttcagcagccccagcatgagccccagccacggcatgaacatccacaacctggccagcggcaagggcagcaccgcccacttcagcggcttcgagagctgcagcaacggcgtgatcagcaacaaggcccaccagagctactgccacagcaacaagcaccagagcagcaacctgaacgtgcccgagctgaacagcatcaacatgagcagaagccagcaggtgaacaacttcaccagcaacgacgtggacatggagaccgaccactacagcaacggcgtgggcgagaccagcagcaacggcttcctgaacggcagcagcaagcacgaccacgagatggaggactgcgacaccgagatggaggtggacagcagccagctgagaagacagctgtgcggcggcagccaggccgccatcgagagaatgatccacttcggcagagagctgcaggccatgagcgagcagctgagaagagactgcggcaagaacaccgccaacaagaagatgctgaaggacgccttcagcctgctggcctacagcgacccctggaacagccccgtgggcaaccagctggaccccatccagagagagcccgtgtgcagcgccctgaacagcgccatcctggagacccacaacctgcccaagcagccccccctggccctggccatgggccaggccacccagtgcctgggcctgatggccagaagcggcatcggcagctgcgccttcgccaccgtggaggactacctgcactag

SEQ ID NO: 156641 - protein, 241 aa, Artificial Sequence
  derived and/or modified sequence
MVDYYEVLGVQRHASPEDIKKAYRKLALKWHPDKNPENKEEAERKFKQVAEAYEVLSDAKKRDIYDKYGKEGLNGGGGGGSHFDSPFEFGFTFRNPDDVFREFFGGRDPFSFDFFEDPFEDFFGNRRGPRGSRSRGTGSFFSAFSGFPSFGSGFSSFDTGFTSFGSLGHGGLTSFSSTSFGGSGMGNFKSISTSTKMVNGRKITTKRIVENGQERVEVEEDGQLKSLTINGKEQLLRLDNK

SEQ ID NO: 156642 - protein, 66 aa, Artificial Sequence
  derived and/or modified sequence
MVDYYEVLGVQRHASPEDIKKAYRKLALKWHPDKNPENKEEAERKFKQVAEAYEVLSDAKKRDIYD

SEQ ID NO: 156643 - protein, 45 aa, Artificial Sequence
  derived and/or modified sequence
MVDYYEVLGVQRHASPEDIKKAYRKLALKWHPDKNPENKEEAERK

SEQ ID NO: 156644 - protein, 211 aa, Artificial Sequence
  derived and/or modified sequence
MVDYYEVLGVQRHASPEDIKKAYRKLALKWHPDKNPENKEEAERKFKQVAEAYEVLSDAKKRDIYDKYGKEGLNGGGGGGSHFDSPFEFGFTFRNPDDVFREFFGGRDPFSFDFFGVADDDALAEERMRRGQNALPAQPAGLRPPKPPRPASLLRHAPHCLSEEEGEQDRPRAPGPWDPLASAAGLKEGGKRKKQKQREESKKKKSTKGNH

SEQ ID NO: 156645 - DNA, 981 bp, Artificial Sequence
  derived and/or modified sequence
atggtggattattatgaagtcctcggggtgcagaggcacgccagccctgaagatattaaaaaagcttaccggaagctagccctcaaatggcaccccgacaagaaccccgagaataaagaggaggcggagaggaagttcaagcaggtcgcagaggcctacgaggtcttaagcgacgccaagaagcgggatatttacgataagtatggcaaagaggggctaaatggagggggaggtggcggctctcactttgatagccccttcgaatttggattcaccttccggaatccagatgacgtgttcagggaatttttcgggggacgtgatcccttcagtttcgactttttcgaagatccttttgaagacttctttggaaatcggcgcggcccgagaggcagtaggtcacgcggtactggctccttcttttcagcctttagcggttttccatccttcgggtccggattctccagcttcgacaccggctttacctcctttggatctcttggacacggtgggctgacctccttctctagcacatcttttggggggtcagggatggggaatttcaagagcatctctaccagtactaaaatggtcaacggtcggaagattacaacaaaacgaatcgtggaaaatggccaagaacgcgtggaggtggaagaggacggccaactgaagtcgttaacgataaatggcgtcgctgacgatgacgctttagctgaggagcggatgcgccgaggccagaatgccctgccggctcaacccgctgggttgcgcccaccgaagccaccccgacccgcaagcctgctgaggcatgcgccgcactgtctgtctgaggaggaaggcgaacaagaccgtcccagagctcctggaccatgggatccactcgccagcgccgccggactaaaggagggcgggaaacgaaaaaaacagaagcagcgggaagaaagcaagaagaagaaatcaacaaaaggcaatcattag

SEQ ID NO: 156646 - DNA, 378 bp, Artificial Sequence
  derived and/or modified sequence
atggttgattactatgaagtgctgggtgtgcagcgacacgcctccccagaagatatcaaaaaggcgtataggaaactcgctctgaaatggcatcccgacaaaaaccctgagaacaaagaagaggctgaacgcaaattcaagcaggtggctgaggcgtatgaggtcctgagcgatgcaaagaagagggacatatacgacaaatatggtaaggaaggcttgaacgggggcgggggcggaggctcccactttgatagccccttcgaattcggattcaccttccggaatcctgatgacgtgttcagagaattcttcggcgggagggacccatttagcttcgactttttcgaagacccattcgaagatttttttgggaactag

SEQ ID NO: 156647 - DNA, 687 bp, Artificial Sequence
  derived and/or modified sequence
atggtggactactatgaggtcttgggggtgcagaggcacgctagcccagaggatatcaagaaagcctatcggaaactcgcactgaagtggcacccggataaaaaccccgaaaacaaggaggaggcagagagaaagttcaagcaggttgccgaggcatacgaggtgttgagtgacgcaaaaaaaagggatatatatgacaagtatggcaaagaggggcttaatgggggcggagggggaggaagtcactttgactctccctttgaattcggctttaccttccggaaccctgatgatgtctttcgagagttcttcgggggcagagatcccttctcttttgatttcttcgaggacccttttgaagatttttttggaaacaggagaggaccacgaggatcgagatcacggggcacagggtcattttttagtgccttcagtggctttccctcatttgggagcggcttctctagttttgataccggcttcacatccttcggttcgttaggtcacgggggcctaacgagctttagttctacaagctttggggggagtgggatggggaattttaagagcatatcaacttctaccaaaatggtgaatggacgcaaaatcaccacaaagcgcattgtggagaacggccaagagcgggtggaggtggaggaggacggccagttgaagtccttgacatag

SEQ ID NO: 156648 - DNA, 648 bp, Artificial Sequence
  derived and/or modified sequence
atggtggactactacgaagtgctgggggtgcaaagacatgcatcacccgaggatatcaaaaaggcgtacagaaagcttgctctcaaatggcacccagacaaaaatccagaaaacaaggaggaggccgagagaaaattcaagcaagtggcggaagcctacgaggtgctgtccgatgcaaaaaagcgagacatttatgacaaatatggaaaagagggcctaaatgggggcggaggaggcgggtcccacttcgacagtccgtttgagtttggatttaccttccgcaacccagacgatgtcttcagggagttttttggcgggagagatccgttcagtttcgatttctttgaagatcccttcgaagattttttcggcaatcggcgggggcctcgtgggtcacggtcacggggcactggcagctttttttccgctttcagcggctttccaagcttcgggtctgggttttctagctttgataccggattcacgagcttcgggtcacttggacatggtggcctcacgtcatttagctctacttcgtttggtggaagtgggatgggcaatttcaaatccatttctacaagcacaaaatggctcatggcggaaaagagcctccagcgggagctaagccgcaccgtgaagaaggagtag

SEQ ID NO: 156649 - DNA, 726 bp, Artificial Sequence
  derived and/or modified sequence
atggtcgactactacgaggtcctgggcgtgcagcggcatgcatctccagaggatatcaagaaggcttatagaaaactggctctgaaatggcacccggacaaaaacccagaaaacaaagaagaggctgagaggaagttcaagcaggtggccgaggcctatgaagtactttctgacgcaaaaaagcgggacatttacgataagtacggtaaagagggcctgaacgggggtggtggcggaggatcgcacttcgatagccctttcgagttcgggtttaccttccggaaccctgatgacgtgtttcgagaattctttggaggaagagaccctttttcctttgacttcttcgaggatccgttcgaagatttcttcgggaatcggcgaggaccacgtggaagtcggtcgaggggcactgggtcttttttctcagcatttagcgggttcccttcctttggctcgggcttttctagcttcgacactgggtttacttcttttgggagcttaggccatggaggattgacatccttttcttccaccagcttcggcggcagcgggatggggaactttaagagtatctcaacctcaaccaagatggtgaacggccgcaagattaccacaaagcggatagtggaaaacggtcaggagcgagtcgaagtggaggaggacgggcagctgaagagcctcacaatcaatggcaaggagcagctgctgcgcctggacaacaagtag

SEQ ID NO: 156650 - DNA, 201 bp, Artificial Sequence
  derived and/or modified sequence
atggtagactactacgaagtactgggagtccagagacatgctagtccagaagacatcaagaaggcctaccgcaagcttgctttgaagtggcatcctgataaaaatccggagaacaaagaggaggcggagcggaaattcaaacaggtggccgaggcctacgaggttctgagcgatgcgaaaaaaagagacatttacgattag

SEQ ID NO: 156651 - DNA, 138 bp, Artificial Sequence
  derived and/or modified sequence
atggtggactactacgaagtgttaggcgtacagaggcacgccagtcctgaggacattaagaaggcatatcgaaagttggccctgaaatggcatcctgacaagaaccctgagaacaaagaggaagctgagagaaagtag

SEQ ID NO: 156652 - DNA, 441 bp, Artificial Sequence
  derived and/or modified sequence
atggtggactattacgaagtgttgggtgtacagcggcacgcttctcctgaggacattaagaaggcctacagaaagctcgcactaaaatggcatccggacaagaaccctgaaaacaaggaagaagccgagcgcaagttcaaacaggtggcggaggcttatgaggtcctttcagacgctaaaaagcgtgatatctacgacaaatatggtaaagaagggctgaacggaggtggcgggggaggctctcatttcgactctcctttcgaatttggttttacttttaggaacccggatgatgtgttccgggaattcttcggaggcagggatcctttctctttcgattttttcgaggaccctttcgaagacttcttcggaaaccgacgagggccccgcggcagtaggtccagggggaccgggtctttctttagcgcgttctcaggttag

SEQ ID NO: 156653 - DNA, 636 bp, Artificial Sequence
  derived and/or modified sequence
atggttgactactatgaagtgctcggagtgcagcgccacgccagtccagaagacattaagaaggcctacagaaaactggcacttaagtggcatcctgacaagaatcccgagaacaaggaagaagccgagagaaaattcaagcaggtagccgaagcctatgaggtgctctcagacgctaaaaagagggatatttacgataaatatggtaaagaaggcctgaatggcggcggcggcggtggttctcacttcgatagcccgttcgagttcggcttcacgttcaggaacccggatgacgtgttcagggaattttttggtggaagggaccctttttcattcgacttctttggagtagcggacgacgatgctcttgcagaggagcgcatgaggcgtggccaaaatgcccttcccgcacagcctgccggactgaggccccccaagcctcctaggcctgcctcactgctgaggcacgctccacactgcttgtctgaagaggagggagaacaggacagaccccgcgctcccggcccctgggatcctctcgcatctgcggcagggctgaaagagggaggaaagagaaaaaagcagaaacagcgggaagaatctaaaaaaaagaagtccaccaaggggaatcactag

SEQ ID NO: 156654 - DNA, 297 bp, Artificial Sequence
  derived and/or modified sequence
atggtagattattacgaggtgttgggggtgcaaagacacgcatcacccgaagacatcaagaaggcataccgcaaactggctctgaagtggcaccctgataagaaccctgagaacaaggaagaagcggagcggaagtttaagcaggtcgcagaagcctacgaggtcctttccgacgcgaagaaaagggacatctatgataagtatggcaaggaaggcctgaatgggggcggaggtggaggaagtcacttcgactcccctttcgagttcggctttaccttcagaaaccccgatgattag

SEQ ID NO: 156655 - DNA, 981 bp, Artificial Sequence
  derived and/or modified sequence
atggtggactactatgaggtgctgggcgtgcagagacatgccagccctgaggacatcaagaaggcctacaggaagctggccctgaagtggcacccagacaagaaccctgagaacaaggaggaggccgagaggaagttcaagcaggtggccgaggcctatgaggtgctgagtgatgccaagaagagggacatctatgacaagtatggcaaggagggcctgaatggaggcggcggcggcggcagccactttgacagcccctttgaatttggcttcaccttcaggaacccagatgatgtgttccgggagttcttcggcggccgggaccccttctcctttgacttctttgaggacccctttgaggacttctttggaaacagaagaggcccccggggcagccgcagccggggcaccggcagcttcttcagcgccttcagcggcttccccagctttggcagcggcttcagcagctttgacaccggcttcaccagctttggcagcctgggccatggaggcctgaccagcttcagcagcaccagctttggaggcagcggcatgggcaacttcaagagcatcagcaccagcaccaagatggtgaatggaaggaagatcaccaccaagagaattgtggagaatggccaggagcgggtggaggtggaggaggatggccagctgaagagcctgaccatcaacggggtggctgatgatgatgccctggccgaggagaggatgaggcggggccagaatgccctgcctgcccagcctgctggcctgcggccccccaagccacccaggcctgccagcctgctgcggcatgccccccactgcctgtctgaggaggagggggagcaggaccggccccgggcccctggcccctgggaccccctggccagcgctgctggcctgaaggagggcggcaagaggaagaagcagaagcagcgggaggagagcaagaagaagaagagcaccaagggcaaccactag

SEQ ID NO: 156656 - DNA, 378 bp, Artificial Sequence
  derived and/or modified sequence
atggtggactactatgaggtgctgggcgtgcagagacatgccagccctgaggacatcaagaaggcctacaggaagctggccctgaagtggcacccagacaagaaccctgagaacaaggaggaggccgagaggaagttcaagcaggtggccgaggcctatgaggtgctgagtgatgccaagaagagggacatctatgacaagtatggcaaggagggcctgaatggaggcggcggcggcggcagccactttgacagcccctttgaatttggcttcaccttcaggaacccagatgatgtgttccgggagttcttcggcggccgggaccccttctcctttgacttctttgaggacccctttgaggacttctttggaaattag

SEQ ID NO: 156657 - DNA, 687 bp, Artificial Sequence
  derived and/or modified sequence
atggtggactactatgaggtgctgggcgtgcagagacatgccagccctgaggacatcaagaaggcctacaggaagctggccctgaagtggcacccagacaagaaccctgagaacaaggaggaggccgagaggaagttcaagcaggtggccgaggcctatgaggtgctgagtgatgccaagaagagggacatctatgacaagtatggcaaggagggcctgaatggaggcggcggcggcggcagccactttgacagcccctttgaatttggcttcaccttcaggaacccagatgatgtgttccgggagttcttcggcggccgggaccccttctcctttgacttctttgaggacccctttgaggacttctttggaaacagaagaggcccccggggcagccgcagccggggcaccggcagcttcttcagcgccttcagcggcttccccagctttggcagcggcttcagcagctttgacaccggcttcaccagctttggcagcctgggccatggaggcctgaccagcttcagcagcaccagctttggaggcagcggcatgggcaacttcaagagcatcagcaccagcaccaagatggtgaatggaaggaagatcaccaccaagagaattgtggagaatggccaggagcgggtggaggtggaggaggatggccagctgaagagcctgacctag

SEQ ID NO: 156658 - DNA, 648 bp, Artificial Sequence
  derived and/or modified sequence
atggtggactactatgaggtgctgggcgtgcagagacatgccagccctgaggacatcaagaaggcctacaggaagctggccctgaagtggcacccagacaagaaccctgagaacaaggaggaggccgagaggaagttcaagcaggtggccgaggcctatgaggtgctgagtgatgccaagaagagggacatctatgacaagtatggcaaggagggcctgaatggaggcggcggcggcggcagccactttgacagcccctttgaatttggcttcaccttcaggaacccagatgatgtgttccgggagttcttcggcggccgggaccccttctcctttgacttctttgaggacccctttgaggacttctttggaaacagaagaggcccccggggcagccgcagccggggcaccggcagcttcttcagcgccttcagcggcttccccagctttggcagcggcttcagcagctttgacaccggcttcaccagctttggcagcctgggccatggaggcctgaccagcttcagcagcaccagctttggaggcagcggcatgggcaacttcaagagcatcagcaccagcaccaagtggctgatggccgagaagagcctgcagcgggagctgagcaggacagtgaagaaggagtag

SEQ ID NO: 156659 - DNA, 726 bp, Artificial Sequence
  derived and/or modified sequence
atggtggactactatgaggtgctgggcgtgcagagacatgccagccctgaggacatcaagaaggcctacaggaagctggccctgaagtggcacccagacaagaaccctgagaacaaggaggaggccgagaggaagttcaagcaggtggccgaggcctatgaggtgctgagtgatgccaagaagagggacatctatgacaagtatggcaaggagggcctgaatggaggcggcggcggcggcagccactttgacagcccctttgaatttggcttcaccttcaggaacccagatgatgtgttccgggagttcttcggcggccgggaccccttctcctttgacttctttgaggacccctttgaggacttctttggaaacagaagaggcccccggggcagccgcagccggggcaccggcagcttcttcagcgccttcagcggcttccccagctttggcagcggcttcagcagctttgacaccggcttcaccagctttggcagcctgggccatggaggcctgaccagcttcagcagcaccagctttggaggcagcggcatgggcaacttcaagagcatcagcaccagcaccaagatggtgaatggaaggaagatcaccaccaagagaattgtggagaatggccaggagcgggtggaggtggaggaggatggccagctgaagagcctgaccatcaacgggaaggagcagctgctgcggctggacaacaagtag

SEQ ID NO: 156660 - DNA, 201 bp, Artificial Sequence
  derived and/or modified sequence
atggtggactactatgaggtgctgggcgtgcagagacatgccagccctgaggacatcaagaaggcctacaggaagctggccctgaagtggcacccagacaagaaccctgagaacaaggaggaggccgagaggaagttcaagcaggtggccgaggcctatgaggtgctgagtgatgccaagaagagggacatctatgactag

SEQ ID NO: 156661 - DNA, 138 bp, Artificial Sequence
  derived and/or modified sequence
atggtggactactatgaggtgctgggcgtgcagagacatgccagccctgaggacatcaagaaggcctacaggaagctggccctgaagtggcacccagacaagaaccctgagaacaaggaggaggccgagaggaagtag

SEQ ID NO: 156662 - DNA, 441 bp, Artificial Sequence
  derived and/or modified sequence
atggtggactactatgaggtgctgggcgtgcagagacatgccagccctgaggacatcaagaaggcctacaggaagctggccctgaagtggcacccagacaagaaccctgagaacaaggaggaggccgagaggaagttcaagcaggtggccgaggcctatgaggtgctgagtgatgccaagaagagggacatctatgacaagtatggcaaggagggcctgaatggaggcggcggcggcggcagccactttgacagcccctttgaatttggcttcaccttcaggaacccagatgatgtgttccgggagttcttcggcggccgggaccccttctcctttgacttctttgaggacccctttgaggacttctttggaaacagaagaggcccccggggcagccgcagccggggcaccggcagcttcttcagcgccttctctggatag

SEQ ID NO: 156663 - DNA, 636 bp, Artificial Sequence
  derived and/or modified sequence
atggtggactactatgaggtgctgggcgtgcagagacatgccagccctgaggacatcaagaaggcctacaggaagctggccctgaagtggcacccagacaagaaccctgagaacaaggaggaggccgagaggaagttcaagcaggtggccgaggcctatgaggtgctgagtgatgccaagaagagggacatctatgacaagtatggcaaggagggcctgaatggaggcggcggcggcggcagccactttgacagcccctttgaatttggcttcaccttcaggaacccagatgatgtgttccgggagttcttcggcggccgggaccccttctcctttgacttctttggagtggctgatgatgatgccctggccgaggagaggatgagaagaggccagaatgccctgcctgcccagcctgctggcctgcggccccccaagccacccaggcctgccagcctgctgcggcatgccccccactgcctgtctgaggaggagggggagcaggaccggccccgggcccctggcccctgggaccccctggccagcgctgctggcctgaaggagggcggcaagaggaagaagcagaagcagcgggaggagagcaagaagaagaagagcaccaagggcaaccactag

SEQ ID NO: 156664 - DNA, 297 bp, Artificial Sequence
  derived and/or modified sequence
atggtggactactatgaggtgctgggcgtgcagagacatgccagccctgaggacatcaagaaggcctacaggaagctggccctgaagtggcacccagacaagaaccctgagaacaaggaggaggccgagaggaagttcaagcaggtggccgaggcctatgaggtgctgagtgatgccaagaagagggacatctatgacaagtatggcaaggagggcctgaatggaggcggcggcggcggcagccactttgacagcccctttgaatttggcttcaccttcaggaacccagatgactag

SEQ ID NO: 156665 - DNA, 981 bp, Artificial Sequence
  derived and/or modified sequence
atggtggactactacgaggtgctgggcgtgcagcggcacgccagccccgaggacatcaagaaggcatataggaagctagctcttaaatggcatcctgacaagaacccagagaacaaagaggaggccgagagaaagtttaagcaggttgccgaggcctatgaggttctgtccgatgctaagaagcgcgatatttacgacaaatatgggaaggaggggctaaatggcggcggtgggggcggctcccactttgatagtccgttcgagtttggttttacattccgtaatccggacgacgtttttcgcgagttttttggagggcgcgatccttttagcttcgacttctttgaggatccctttgaagactttttcgggaacaggcgcggacccagaggatcccgcagcagggggacgggaagcttcttttcggcgttctccggattcccttcttttggctctggcttttcctcctttgacacaggttttaccagcttcggctccctagggcacggaggtttaacatccttttctagcacatcgttcgggggctccggcatgggaaatttcaagtccatcagtacctccaccaagatggtcaatggtcggaaaatcactacgaagcgcattgtggagaacggccaggagcgtgttgaggtggaagaagatggccagctcaagtctttaacaataaatggcgtggctgatgacgacgctctggccgaagagcgaatgcggagaggccagaacgccttaccagctcagccggccggcctgcgacctcccaagccgccaagacccgcttcactgctgcgccatgctccccactgcctgtcggaagaggagggcgagcaagatagaccacgagccccaggcccgtgggatcctctggcatctgccgctggcctgaaagagggaggaaaaaggaaaaagcaaaagcagagagaggagagtaaaaaaaaaaagtccacaaaaggtaatcactag

SEQ ID NO: 156666 - DNA, 378 bp, Artificial Sequence
  derived and/or modified sequence
atggtggactactacgaggtgctgggcgtgcagcggcacgccagcccagaggacattaaaaaggcctatagaaaactcgctcttaagtggcatcccgataagaaccctgagaacaaggaagaagcagagaggaagttcaagcaggtggcggaagcttacgaagtgctatctgacgccaaaaaacgtgacatctacgataagtacgggaaggagggacttaacgggggcggcgggggtggcagccacttcgatagccctttcgaatttggttttaccttcaggaatcccgacgatgtgtttagggagttctttggaggtcgggacccgttcagctttgacttttttgaggatccatttgaagacttttttggcaattag

SEQ ID NO: 156667 - DNA, 687 bp, Artificial Sequence
  derived and/or modified sequence
atggtggactactacgaggtgctgggcgtgcagcggcacgccagcccggaagatattaagaaggcataccgcaagctggcactcaagtggcaccctgataaaaaccctgagaataaagaagaagcagaacggaaattcaagcaggtggctgaagcatatgaagttctctctgacgccaagaagagagatatttacgataagtacggcaaagagggcctgaatgggggcggcggcggggggtctcacttcgactctccgttcgaatttggcttcacctttagaaacccagatgacgtgttcagggagtttttcggaggacgcgatcctttcagttttgacttctttgaggaccccttcgaggacttctttggtaaccgcagaggccctcgcggctcaagaagcaggggtaccggcagttttttctctgcttttagtggatttccatccttcggtagcgggttcagtagtttcgatactggcttcacgagctttggatctctagggcatggtggactgacaagcttctcctcaacttcctttgggggatccggtatggggaactttaagagtattagtacctccacaaagatggttaacggccggaaaatcaccaccaagcgcatcgtcgaaaacggtcaagagagggttgaagtggaggaagacggccagctgaagagcttaacctag

SEQ ID NO: 156668 - DNA, 648 bp, Artificial Sequence
  derived and/or modified sequence
atggtggactactacgaggtgctgggcgtgcagcggcacgccagcccagaagatatcaaaaaggcataccggaagctggccctgaaatggcaccctgacaaaaatcctgagaataaggaggaggctgagagaaagttcaaacaggtggctgaggcatacgaagtgctgtccgacgccaagaagcgtgacatttacgacaagtatgggaaagaggggttgaacggcggcggaggaggaggatcccacttcgacagtccgtttgagtttggcttcacttttcgaaaccccgacgatgtgtttcgggagttttttggaggacgcgacccctttagtttcgacttcttcgaggacccttttgaagacttcttcgggaacagacggggtcctagaggcagccgctcccgcggtacaggaagtttctttagcgccttttcaggattccccagttttggaagcggcttcagcagctttgacaccggatttacctcctttggctcactaggccacggcggccttacctccttctcatcgacctctttcgggggaagcggcatgggaaattttaagagcatctctacctccactaagtggctaatggcagaaaagagccttcagcgcgaactgtctcgcacagtgaaaaaggaatag

SEQ ID NO: 156669 - DNA, 726 bp, Artificial Sequence
  derived and/or modified sequence
atggtggactactacgaggtgctgggcgtgcagcggcacgccagcccagaggacatcaagaaggcatatcggaaacttgcgctcaaatggcatcccgacaagaaccctgaaaacaaggaggaggctgagcgaaaatttaagcaggtggcagaggcatacgaggtcctgtccgatgctaaaaaacgagacatctacgataaatatggcaaggagggccttaacggagggggggggggcggaagccattttgattcaccctttgagttcggcttcacctttcgaaacccggacgatgtcttcagggagtttttcggcggtagagaccccttctcattcgactttttcgaagatccgtttgaagacttctttggtaataggagaggccccaggggaagccggtcacgcggcactggctcgttcttttctgccttctctggtttcccttcattcggatccgggttctcctctttcgatacgggattcacatcttttggctcgctcggccatggaggcctgacaagttttagctctaccagcttcggagggtccggcatggggaactttaagtcaattagcacttccaccaaaatggtgaacggccggaaaattaccactaagagaattgtggagaacggccaagaaagggtggaggttgaagaggatggccagcttaaaagtcttacaataaacggaaaagaacaactgttgagactagacaataaatag

SEQ ID NO: 156670 - DNA, 201 bp, Artificial Sequence
  derived and/or modified sequence
atggtggactactacgaggtgctgggcgtgcagcggcacgccagccccgaggacatcaagaaggcctaccggaagcttgccctgaagtggcacccagacaaaaaccccgagaataaggaagaagcagaaagaaaatttaaacaagttgcagaagcctacgaggtgttgtcagacgcgaagaagcgcgacatttacgattag

SEQ ID NO: 156671 - DNA, 138 bp, Artificial Sequence
  derived and/or modified sequence
atggtggactactacgaggtgctgggcgtgcagcggcacgccagccccgaggacataaaaaaggcctacaggaagctcgccttgaaatggcacccggataagaatcccgagaataaagaagaggccgaacggaagtag

SEQ ID NO: 156672 - DNA, 441 bp, Artificial Sequence
  derived and/or modified sequence
atggtggactactacgaggtgctgggcgtgcagcggcacgccagccccgaagacatcaagaaggcttaccggaagctggccctgaaatggcatccagacaaaaaccccgagaacaaggaagaagccgaacgtaagttcaagcaggtggccgaggcctatgaggtgcttagcgatgccaaaaagcgtgacatatatgacaaatatggaaaagaaggactgaatggcgggggtggcggagggagtcattttgactctcccttcgaattcggattcacctttcgcaacccggatgatgtatttcgggagttctttggaggaagagatccattcagctttgatttcttcgaagatccctttgaagatttttttggcaatagaagaggtcctcgcggcagtaggagcagggggaccgggagctttttctctgctttttcaggctag

SEQ ID NO: 156673 - DNA, 636 bp, Artificial Sequence
  derived and/or modified sequence
atggtggactactacgaggtgctgggcgtgcagcggcacgccagccctgaggacatcaagaaagcctataggaaactagctctgaaatggcatcccgataaaaacccagagaataaggaggaggcagaaagaaagtttaagcaggtcgctgaggcttatgaggtgctgtctgatgctaagaagagagatatctatgacaaatacgggaaggagggcctgaatggagggggtgggggcggctctcatttcgactctccctttgagttcggcttcacgttcaggaaccccgatgatgtattccgtgagttctttgggggccgggacccattctccttcgattttttcggggtcgcggacgatgatgccctcgccgaggaacgaatgagacgggggcagaatgcgcttccggcacagcctgctggactgagacctcctaagccgcctaggcctgccagtttgcttaggcacgcaccccattgcctttcagaggaagagggtgagcaagatcggccgagggcccccggcccctgggacccactcgccagcgctgctggcctgaaagagggtgggaagcgcaaaaagcagaaacagagggaggagtcaaagaaaaagaaatccacaaagggaaaccactag

SEQ ID NO: 156674 - DNA, 297 bp, Artificial Sequence
  derived and/or modified sequence
atggtggactactacgaggtgctgggcgtgcagcggcacgccagcccagaggacataaaaaaagcatacaggaaactggctctgaagtggcatcccgataaaaatcccgaaaataaggaagaggccgagcgcaaatttaagcaggtagccgaggcctacgaggtcctgagcgacgctaagaagagggacatctacgataagtatggcaaggaggggcttaacggcggcggcggaggaggaagtcacttcgactccccctttgagttcggattcacctttcgaaatcccgatgattag

SEQ ID NO: 156675 - DNA, 981 bp, Artificial Sequence
  derived and/or modified sequence
atggtggattactacgaagtgctcggcgtccagagacacgcatctcccgaggacattaagaaggcgtatagaaagttagcactgaagtggcacccagacaagaaccccgagaataaagaagaggcggagagaaagtttaaacaagtggccgaggcgtacgaggtgctgagcgacgcaaaaaagagagatatttatgataaatacgggaaggaggggctcaacgggggtggcggaggcggatctcacttcgacagtcccttcgagttcggttttacatttaggaaccccgacgatgtattcagggagttctttggcggaagagacccatttagttttgatttcttcgaagatccttttgaggatttctttggcaatagacgcggacccaggggatcccgttcccggggaacagggtcttttttctcagcttttagtggatttccctccttcggatcagggtttagtagctttgacacagggttcacctcatttggcagcttagggcatgggggtctcaccagcttttcgagcacatcattcggagggtccggcatggggaactttaagtccataagcactagcactaagatggtaaacggcagaaagatcaccaccaagagaatcgtggagaatggacaagagcgcgtggaagtggaagaggatggtcagctaaaatcactgaccataaatggggttgcagacgatgatgccctcgcggaagagcggatgcgccgtgggcagaacgctttgcctgcacagccagccggactacggccacccaaaccacccagacctgcgtctcttcttaggcacgcacctcactgcctgtccgaggaagaaggagagcaggatcgccctagggcacccggtccttgggatccacttgcttctgctgcagggctcaaggaaggagggaagagaaagaagcagaagcagcgagaggagtcaaagaaaaaaaagtctacgaagggtaaccattag

SEQ ID NO: 156676 - DNA, 378 bp, Artificial Sequence
  derived and/or modified sequence
atggtggactattatgaggtgttaggcgtgcagaggcacgcaagtccagaagacatcaaaaaagcatacaggaaactggcactcaaatggcaccctgacaagaatcccgaaaacaaagaagaggccgagcgtaagttcaagcaggttgccgaggcttacgaggttctgagcgacgctaagaagagggacatatacgacaaatatggtaaagaaggacttaacggtgggggaggaggagggtcccatttcgactctccattcgagttcggcttcacattccggaatcccgacgacgttttccgggagtttttcggcggaagagatcctttttccttcgatttctttgaggatccattcgaggactttttcgggaattag

SEQ ID NO: 156677 - DNA, 687 bp, Artificial Sequence
  derived and/or modified sequence
atggtcgactactacgaggtgttgggggtgcaaaggcatgcatcacccgaggacatcaaaaaggcttatagaaaactggctctgaagtggcatccagacaaaaaccctgaaaataaggaagaggccgagaggaaatttaagcaggttgccgaggcctacgaagtactgtccgatgctaagaagagggacatttatgataaatatggcaaggaaggcctcaacggtggagggggtggcggaagtcactttgactcccctttcgaattcggctttaccttcagaaaccctgacgatgtttttcgtgagttcttcggtggcagggatccgttctcctttgacttctttgaggacccatttgaagatttttttggcaaccgcagaggtccaagagggtcaagaagtagagggacaggaagcttcttcagcgccttttccggtttccctagctttggctcggggtttagtagcttcgatacaggatttaccagcttcgggagtttaggccacggtgggctgacaagtttcagttcgacctcttttggtgggtccggaatgggtaacttcaagtccatcagcacctcaactaaaatggtaaatgggaggaagatcactactaagaggattgtagagaatggtcaggagcgggtggaggtcgaagaggacggccagctcaagtctctgacttag

SEQ ID NO: 156678 - DNA, 648 bp, Artificial Sequence
  derived and/or modified sequence
atggtggactactacgaagtgctgggcgtgcaaagacacgctagcccggaggacatcaagaaagcctatagaaagctcgcccttaaatggcaccccgacaaaaaccctgagaacaaggaggaggccgagaggaaatttaagcaggtcgccgaagcttacgaggtgctctccgatgctaagaagcgcgacatctacgataaatacggcaaagagggcctgaatggaggcggtgggggaggtagccactttgactccccttttgagttcggctttactttccggaaccctgacgatgtcttcagagagttctttggaggaagagatcctttctccttcgacttttttgaggacccattcgaagacttctttggcaatcgcagaggtcctagaggcagccggtctcgcggtacggggagctttttctccgccttttccggcttccccagttttggttcggggttttccagctttgacaccggtttcactagttttggaagcctggggcacggcggacttacgagcttcagctccaccagcttcggcggatctggcatgggtaactttaaatcaatcagcactagcacaaagtggctgatggccgagaaatccctccagcgggaactgagtagaacagtgaagaaggaatag

SEQ ID NO: 156679 - DNA, 726 bp, Artificial Sequence
  derived and/or modified sequence
atggtggattactatgaagtcctgggggtccagcgccacgcctcaccagaagacatcaaaaaagcatacaggaaactggccctaaaatggcacccggacaaaaacccggaaaacaaagaagaggccgagagaaagttcaagcaggttgccgaagcatacgaggtgctctccgacgccaaaaaacgcgatatatatgataaatatggtaaggagggactgaacggaggcggtggagggggttcccactttgattccccttttgaatttggctttaccttccgtaacccagacgacgtgttcagggaattcttcggaggaagagatccttttagtttcgacttctttgaggatccgttcgaagacttcttcggcaatagacgaggacctagaggctcacggtccagagggactggctcattcttttcggctttctccggatttccatcattcgggtccggcttctcttcatttgacacaggcttcacatcattcggcagcctgggccacggagggctcacatccttctcatccacttccttcggcggatctggcatgggtaatttcaaaagcatcagcacgagtacaaaaatggtgaatggtaggaagattactactaagaggatcgtcgagaacggacaggagcgggtggaggtcgaggaggacggacagctaaagtctctgactatcaacggcaaggagcaactcctgagactggacaataagtag

SEQ ID NO: 156680 - DNA, 201 bp, Artificial Sequence
  derived and/or modified sequence
atggtcgactattacgaagtgctgggcgttcagcgccatgcttcccccgaggacattaaaaaagcataccgaaaactcgccctgaagtggcatccagacaaaaatcccgagaataaggaggaagccgagcgtaagtttaagcaggtcgccgaagcctacgaggtgttaagcgacgctaagaagagggacatctacgattag

SEQ ID NO: 156681 - DNA, 138 bp, Artificial Sequence
  derived and/or modified sequence
atggtggactactatgaggttttaggagtgcagaggcatgcctctcccgaagatattaaaaaagcttaccggaaacttgccctgaagtggcatcctgacaagaatcctgagaataaggaggaggccgagcgcaagtag

SEQ ID NO: 156682 - DNA, 441 bp, Artificial Sequence
  derived and/or modified sequence
atggtagattactacgaagtgttgggagtgcaaaggcatgccagccccgaagatatcaagaaggcctaccgcaagctggccctgaaatggcacccagataagaaccccgaaaacaaggaggaagctgaaaggaaatttaaacaggttgctgaagcctatgaagtcctatccgatgccaagaagagggacatatatgacaagtacgggaaggagggtctgaatggcggtgggggaggtgggagtcattttgactctccgttcgagttcggctttacattccgcaacccagatgacgtttttcgtgaattctttggcggaagagacccattctcttttgactttttcgaggatcccttcgaagatttttttggtaatcgcaggggccctcgagggagtcgcagtaggggcaccggttcctttttttccgccttctcagggtag

SEQ ID NO: 156683 - DNA, 636 bp, Artificial Sequence
  derived and/or modified sequence
atggtggactattatgaggtcctgggagtgcagcgtcatgcttcccccgaagatataaaaaaagcttacagaaagttggcactgaaatggcatccagataagaatcccgaaaataaagaggaggccgaaagaaaattcaagcaggtggccgaagcctacgaggtgctctcggacgccaaaaagcgcgacatatatgacaagtatggcaaggaggggttgaacggcggtggcggaggagggtctcacttcgactccccatttgaattcgggtttacgttccggaatcccgacgacgtctttcgagagttctttggagggagagatcccttttccttcgacttttttggagtggccgacgatgatgccctggctgaggagcgcatgaggaggggccagaacgccttgccagcccagcctgccggtttaagacccccaaagcctcccagacctgccagtctgctgcgacatgcgccacattgtttatcagaggaggagggggagcaggatagaccgagggcccctggcccatgggatccgctcgcatctgccgctggcctgaaggaaggaggcaagaggaaaaaacagaagcagcgcgaggaaagcaaaaagaagaagagtaccaaaggcaatcactag

SEQ ID NO: 156684 - DNA, 297 bp, Artificial Sequence
  derived and/or modified sequence
atggtggactattacgaggttctgggggtccagcgtcatgcatctccagaagatattaaaaaggcttacaggaagctcgccctaaagtggcacccagataagaaccctgaaaacaaggaggaagctgaacgaaaattcaaacaggtagcagaagcttatgaggtgctctctgatgcaaaaaagcgcgatatttatgacaagtacgggaaggaaggactgaacgggggaggcggtggaggctctcactttgactctccatttgagttcggctttacttttagaaacccggatgactag

SEQ ID NO: 156685 - DNA, 981 bp, Artificial Sequence
  derived and/or modified sequence
atggtggactactacgaggtgctgggcgtgcagagacacgccagccccgaggacatcaagaaggcctacagaaagctggccctgaagtggcaccccgacaagaaccccgagaacaaggaggaggccgagagaaagttcaagcaggtggccgaggcctacgaggtgctgagcgacgccaagaagagagacatctacgacaagtacggcaaggagggcctgaacggcggcggcggcggcggcagccacttcgacagccccttcgagttcggcttcaccttcagaaaccccgacgacgtgttcagagagttcttcggcggcagagaccccttcagcttcgacttcttcgaggaccccttcgaggacttcttcggcaacagaagaggccccagaggcagcagaagcagaggcaccggcagcttcttcagcgccttcagcggcttccccagcttcggcagcggcttcagcagcttcgacaccggcttcaccagcttcggcagcctgggccacggcggcctgaccagcttcagcagcaccagcttcggcggcagcggcatgggcaacttcaagagcatcagcaccagcaccaagatggtgaacggcagaaagatcaccaccaagagaatcgtggagaacggccaggagagagtggaggtggaggaggacggccagctgaagagcctgaccatcaacggcgtggccgacgacgacgccctggccgaggagagaatgagaagaggccagaacgccctgcccgcccagcccgccggcctgagaccccccaagccccccagacccgccagcctgctgagacacgccccccactgcctgagcgaggaggagggcgagcaggacagacccagagcccccggcccctgggaccccctggccagcgccgccggcctgaaggagggcggcaagagaaagaagcagaagcagagagaggagagcaagaagaagaagagcaccaagggcaaccactag

SEQ ID NO: 156686 - DNA, 378 bp, Artificial Sequence
  derived and/or modified sequence
atggtggactactacgaggtgctgggcgtgcagagacacgccagccccgaggacatcaagaaggcctacagaaagctggccctgaagtggcaccccgacaagaaccccgagaacaaggaggaggccgagagaaagttcaagcaggtggccgaggcctacgaggtgctgagcgacgccaagaagagagacatctacgacaagtacggcaaggagggcctgaacggcggcggcggcggcggcagccacttcgacagccccttcgagttcggcttcaccttcagaaaccccgacgacgtgttcagagagttcttcggcggcagagaccccttcagcttcgacttcttcgaggaccccttcgaggacttcttcggcaactag

SEQ ID NO: 156687 - DNA, 687 bp, Artificial Sequence
  derived and/or modified sequence
atggtggactactacgaggtgctgggcgtgcagagacacgccagccccgaggacatcaagaaggcctacagaaagctggccctgaagtggcaccccgacaagaaccccgagaacaaggaggaggccgagagaaagttcaagcaggtggccgaggcctacgaggtgctgagcgacgccaagaagagagacatctacgacaagtacggcaaggagggcctgaacggcggcggcggcggcggcagccacttcgacagccccttcgagttcggcttcaccttcagaaaccccgacgacgtgttcagagagttcttcggcggcagagaccccttcagcttcgacttcttcgaggaccccttcgaggacttcttcggcaacagaagaggccccagaggcagcagaagcagaggcaccggcagcttcttcagcgccttcagcggcttccccagcttcggcagcggcttcagcagcttcgacaccggcttcaccagcttcggcagcctgggccacggcggcctgaccagcttcagcagcaccagcttcggcggcagcggcatgggcaacttcaagagcatcagcaccagcaccaagatggtgaacggcagaaagatcaccaccaagagaatcgtggagaacggccaggagagagtggaggtggaggaggacggccagctgaagagcctgacctag

SEQ ID NO: 156688 - DNA, 648 bp, Artificial Sequence
  derived and/or modified sequence
atggtggactactacgaggtgctgggcgtgcagagacacgccagccccgaggacatcaagaaggcctacagaaagctggccctgaagtggcaccccgacaagaaccccgagaacaaggaggaggccgagagaaagttcaagcaggtggccgaggcctacgaggtgctgagcgacgccaagaagagagacatctacgacaagtacggcaaggagggcctgaacggcggcggcggcggcggcagccacttcgacagccccttcgagttcggcttcaccttcagaaaccccgacgacgtgttcagagagttcttcggcggcagagaccccttcagcttcgacttcttcgaggaccccttcgaggacttcttcggcaacagaagaggccccagaggcagcagaagcagaggcaccggcagcttcttcagcgccttcagcggcttccccagcttcggcagcggcttcagcagcttcgacaccggcttcaccagcttcggcagcctgggccacggcggcctgaccagcttcagcagcaccagcttcggcggcagcggcatgggcaacttcaagagcatcagcaccagcaccaagtggctgatggccgagaagagcctgcagagagagctgagcagaaccgtgaagaaggagtag

SEQ ID NO: 156689 - DNA, 726 bp, Artificial Sequence
  derived and/or modified sequence
atggtggactactacgaggtgctgggcgtgcagagacacgccagccccgaggacatcaagaaggcctacagaaagctggccctgaagtggcaccccgacaagaaccccgagaacaaggaggaggccgagagaaagttcaagcaggtggccgaggcctacgaggtgctgagcgacgccaagaagagagacatctacgacaagtacggcaaggagggcctgaacggcggcggcggcggcggcagccacttcgacagccccttcgagttcggcttcaccttcagaaaccccgacgacgtgttcagagagttcttcggcggcagagaccccttcagcttcgacttcttcgaggaccccttcgaggacttcttcggcaacagaagaggccccagaggcagcagaagcagaggcaccggcagcttcttcagcgccttcagcggcttccccagcttcggcagcggcttcagcagcttcgacaccggcttcaccagcttcggcagcctgggccacggcggcctgaccagcttcagcagcaccagcttcggcggcagcggcatgggcaacttcaagagcatcagcaccagcaccaagatggtgaacggcagaaagatcaccaccaagagaatcgtggagaacggccaggagagagtggaggtggaggaggacggccagctgaagagcctgaccatcaacggcaaggagcagctgctgagactggacaacaagtag

SEQ ID NO: 156690 - DNA, 201 bp, Artificial Sequence
  derived and/or modified sequence
atggtggactactacgaggtgctgggcgtgcagagacacgccagccccgaggacatcaagaaggcctacagaaagctggccctgaagtggcaccccgacaagaaccccgagaacaaggaggaggccgagagaaagttcaagcaggtggccgaggcctacgaggtgctgagcgacgccaagaagagagacatctacgactag

SEQ ID NO: 156691 - DNA, 138 bp, Artificial Sequence
  derived and/or modified sequence
atggtggactactacgaggtgctgggcgtgcagagacacgccagccccgaggacatcaagaaggcctacagaaagctggccctgaagtggcaccccgacaagaaccccgagaacaaggaggaggccgagagaaagtag

SEQ ID NO: 156692 - DNA, 441 bp, Artificial Sequence
  derived and/or modified sequence
atggtggactactacgaggtgctgggcgtgcagagacacgccagccccgaggacatcaagaaggcctacagaaagctggccctgaagtggcaccccgacaagaaccccgagaacaaggaggaggccgagagaaagttcaagcaggtggccgaggcctacgaggtgctgagcgacgccaagaagagagacatctacgacaagtacggcaaggagggcctgaacggcggcggcggcggcggcagccacttcgacagccccttcgagttcggcttcaccttcagaaaccccgacgacgtgttcagagagttcttcggcggcagagaccccttcagcttcgacttcttcgaggaccccttcgaggacttcttcggcaacagaagaggccccagaggcagcagaagcagaggcaccggcagcttcttcagcgccttcagcggctag

SEQ ID NO: 156693 - DNA, 636 bp, Artificial Sequence
  derived and/or modified sequence
atggtggactactacgaggtgctgggcgtgcagagacacgccagccccgaggacatcaagaaggcctacagaaagctggccctgaagtggcaccccgacaagaaccccgagaacaaggaggaggccgagagaaagttcaagcaggtggccgaggcctacgaggtgctgagcgacgccaagaagagagacatctacgacaagtacggcaaggagggcctgaacggcggcggcggcggcggcagccacttcgacagccccttcgagttcggcttcaccttcagaaaccccgacgacgtgttcagagagttcttcggcggcagagaccccttcagcttcgacttcttcggcgtggccgacgacgacgccctggccgaggagagaatgagaagaggccagaacgccctgcccgcccagcccgccggcctgagaccccccaagccccccagacccgccagcctgctgagacacgccccccactgcctgagcgaggaggagggcgagcaggacagacccagagcccccggcccctgggaccccctggccagcgccgccggcctgaaggagggcggcaagagaaagaagcagaagcagagagaggagagcaagaagaagaagagcaccaagggcaaccactag

SEQ ID NO: 156694 - DNA, 297 bp, Artificial Sequence
  derived and/or modified sequence
atggtggactactacgaggtgctgggcgtgcagagacacgccagccccgaggacatcaagaaggcctacagaaagctggccctgaagtggcaccccgacaagaaccccgagaacaaggaggaggccgagagaaagttcaagcaggtggccgaggcctacgaggtgctgagcgacgccaagaagagagacatctacgacaagtacggcaaggagggcctgaacggcggcggcggcggcggcagccacttcgacagccccttcgagttcggcttcaccttcagaaaccccgacgactag

SEQ ID NO: 156695 - DNA, 2527 bp, Artificial Sequence
  derived and/or modified sequence
agttgacgccgccgtgccgccgccgcgtgacgcatttcctgtttgttgttggagaaaggagagaaaggaaagcgcgaggagccgccgccaccaccagcgcagcagtcctggagctgtgaggagattcgggccgtcaccctgcctcccctgcgtcccgccaccggccgcttctgtcctcggacccattccaacaatctcgtaaaacatggtggattactatgaagttctaggcgtgcagagacatgcctcacccgaggatattaaaaaggcatatcggaaactggcactgaagtggcatccagataaaaatcctgagaataaagaagaagcagagagaaaattcaagcaagtagcggaggcatatgaagtgctgtcggatgctaagaaacgggacatctatgacaaatatggcaaagaaggattaaatggtggaggaggaggtggaagtcattttgacagtccatttgaatttggcttcacattccgtaacccagatgatgtcttcagggaattttttggtggaagggacccattttcatttgacttctttgaagacccttttgaggacttctttgggaatcgaaggggtccccgaggaagcagaagccgagggacggggtcgtttttctctgcgttcagtggatttccgtcttttggaagtggattttcttcttttgatacaggatttacttcatttgggtcactaggtcacgggggcctcacttcattctcttccacgtcatttggtggtagtggcatgggcaacttcaaatcgatatcaacttcaactaaaatggttaatggcagaaaaatcactacaaagagaattgtcgagaacggtcaagaaagagtagaagttgaagaagatggccagttaaagtccttaacaataaatggtgtggccgacgacgatgccctcgctgaggagcgcatgcggagaggccagaacgccctgccagcccagcctgccggcctccgcccgccgaagccgccccggcctgcctcgctgctgagacacgcgcctcactgtctctctgaggaggagggcgagcaggaccgacctcgggcacccgggccctgggaccccctcgcgtccgcagcaggattgaaagaaggtggcaagaggaagaagcagaagcagagagaggagtcgaagaagaagaagtcgaccaaaggcaatcactagaccggacttgaggcacgcggtgcacccccagacgctggcgctccaccgtgctcggcatgcggtcgtgcacacgcgctaggtagcagcgtcggtcaggactgtctcgaggccacactcgctcggcaggattatgcgatcacggatcagtcagagcagggtcaggagacggggctgacggcacgggtggcggggacagacgtttgggacttggccgcgactctctgcttctctccagctctcaatctgctgcattttcctctagtgcttccggatcctcttcattcttttcggctactcaaccactccgcatgctgctggaatatttctggctttagaagtacaggagggcgcagatggctaactgagtaacattcatgaaatgaggctttctgtggcggcgtagtgtttggaattagaaggtaattcagtagagtgtaacttagagaatattgcaagtgacacattgaatcctgcccgtcagggcaccttttcctcagagcaatccggccacacgaatagaaggctgtcgtgaatcacatcagatgtaaaatcattccttctgtttactcttttaattttcatcctttgcaggtagtgcaaattcaacttcaaatatggtgtaggttttgctagattccatatttttttcttggatttttgctaattatttttagcaaaaaatttttgctcagtggcactctccctagtgtccatgggttagggccatgctggggaaaacgggccggtatttacacacgcgcaaaacacccagagacggcacaaggaggttgaactcatgtttcagttcgcgaacattgactccttacgaaagtcacttcattctaactagatgcgcccacttccggtcattatttcgtttgcatgatgtattgcttcttcacgttttgtttttattgagcacggagtagaattccagggctgccttgacttcttccctgcatgctccctcccagtgactttccttccctttcacatgaggatctgccgttcatgttgctttctcctttgtcctcttggacttgagggcattgtgaaaagctttgctgtgatttaaaaatgccagcaattttaatctagcagtgttgaagctgggaattttttggcgcaatccatgtagcagtgacccaggcttgggagccagaaacaagtgtgacctgggattttatttaacacaactgttgccaaagagttggctttgtttatttggttttggcggggagaggagtggtatttgatgctttctgtggacaatgtaaccctaaacacatcatgtattttaaatgccacctacataaataaaacataagcatattgaataca

SEQ ID NO: 156696 - DNA, 506 bp, Artificial Sequence
  derived and/or modified sequence
tttttctaaggctcccgcactcgcgtctgaaaccagaaacgggagtggcttgcggagcaggaatgccgcagccgtgccgccaagttcggagggagaagaagcaggacccattccaacaatctcgtaaaacatggtggattactatgaagttctaggcgtgcagagacatgcctcacccgaggatattaaaaaggcatatcggaaactggcactgaagtggcatccagataaaaatcctgagaataaagaagaagcagagagaaaattcaagcaagtagcggaggcatatgaagtgctgtcggatgctaagaaacgggacatctatgacaaatatggcaaagaaggattaaatggtggaggaggaggtggaagtcattttgacagtccatttgaatttggcttcacattccgtaacccagatgatgtcttcagggaattttttggtggaagggacccattttcatttgacttctttgaagacccttttgaggacttctttgggaatc

SEQ ID NO: 156697 - DNA, 852 bp, Artificial Sequence
  derived and/or modified sequence
gttgttggagaaaggagagaaaggaaagcgcgaggagccgccgccaccaccagcgcagcagtcctggagctgtgaggagattcgggccgtcaccctgcctcccctgcgtcccgccaccggccgcttctgtcctcggtgagggacccattccaacaatctcgtaaaacatggtggattactatgaagttctaggcgtgcagagacatgcctcacccgaggatattaaaaaggcatatcggaaactggcactgaagtggcatccagataaaaatcctgagaataaagaagaagcagagagaaaattcaagcaagtagcggaggcatatgaagtgctgtcggatgctaagaaacgggacatctatgacaaatatggcaaagaaggattaaatggtggaggaggaggtggaagtcattttgacagtccatttgaatttggcttcacattccgtaacccagatgatgtcttcagggaattttttggtggaagggacccattttcatttgacttctttgaagacccttttgaggacttctttgggaatcgaaggggtccccgaggaagcagaagccgagggacggggtcgtttttctctgcgttcagtggatttccgtcttttggaagtggattttcttcttttgatacaggatttacttcatttgggtcactaggtcacgggggcctcacttcattctcttccacgtcatttggtggtagtggcatgggcaacttcaaatcgatatcaacttcaactaaaatggttaatggcagaaaaatcactacaaagagaattgtcgagaacggtcaagaaagagtagaagttgaagaagatggccagttaaagtccttaacaa

SEQ ID NO: 156698 - DNA, 972 bp, Artificial Sequence
  derived and/or modified sequence
ccaccaccagcgcagcagtcctggagctgacccattccaacaatctcgtaaaacatggtggattactatgaagttctaggcgtgcagagacatgcctcacccgaggatattaaaaaggcatatcggaaactggcactgaagtggcatccagataaaaatcctgagaataaagaagaagcagagagaaaattcaagcaagtagcggaggcatatgaagtgctgtcggatgctaagaaacgggacatctatgacaaatatggcaaagaaggattaaatggtggaggaggaggtggaagtcattttgacagtccatttgaatttggcttcacattccgtaacccagatgatgtcttcagggaattttttggtggaagggacccattttcatttgacttctttgaagacccttttgaggacttctttgggaatcgaaggggtccccgaggaagcagaagccgagggacggggtcgtttttctctgcgttcagtggatttccgtcttttggaagtggattttcttcttttgatacaggatttacttcatttgggtcactaggtcacgggggcctcacttcattctcttccacgtcatttggtggtagtggcatgggcaacttcaaatcgatatcaacttcaactaaatggttaatggcagaaaaatcactacaaagagaattgtcgagaacggtcaagaaagagtagaagttgaagaagatggccagttaaagtccttaacaataaatggtaaggagcagctgctgcgcttggataacaagtaattcaacgcacgcacttaacagaaatgttaaactataacaagcaccatttgaggattaacaggaacatttttttgaagatttcaaacgaactcgactttcagtataattgtacctaaagtatttataaacagctcatcggagcctctatttgtcatagacttttgagttgattgttgggaccacataataggac

SEQ ID NO: 156699 - DNA, 1609 bp, Artificial Sequence
  derived and/or modified sequence
agttgacgccgccgtgccgccgccgcgtgacgcatttcctgtttgttgttggagaaaggagagaaaggaaagcgcgaggagccgccgccaccaccagcgcagcagtcctggagctgtgaggagattcgggccgtcaccctgcctcccctgcgtcccgccaccggccgcttctgtcctcggacccattccaacaatctcgtaaaacatggtggattactatgaagttctaggcgtgcagagacatgcctcacccgaggatattaaaaaggcatatcggaaactggcactgaagtggcatccagataaaaatcctgagaataaagaagaagcagagagaaaattcaagcaagtagcggaggcatatgaagtgctgtcggatgctaagaaacgggacatctatgacaaatatggcaaagaaggattaaatggtggaggaggaggtggaagtcattttgacagtccatttgaatttggcttcacattccgtaacccagatgatgtcttcagggaattttttggtggaagggacccattttcatttgacttctttgaagacccttttgaggacttctttgggaatcgaaggggtccccgaggaagcagaagccgagggacggggtcgtttttctctgcgttcagtggatttccgtcttttggaagtggattttcttcttttgatacaggatttacttcatttgggtcactaggtcacgggggcctcacttcattctcttccacgtcatttggtggtagtggcatgggcaacttcaaatcgatatcaacttcaactaaaatggttaatggcagaaaaatcactacaaagagaattgtcgagaacggtcaagaaagagtagaagttgaagaagatggccagttaaagtccttaacaataaatggtaaggagcagctgctgcgcttggataacaagtaattcaacgcacgcacttaacagaaatgttaaactataacaagcaccatttgaggattaacaggaacatttttttgaagatttcaaacgaactcgactttcagtataattgtacctaaagtatttataaacagctcatcggagcctctatttgtcatagacttttgagttgattgttgggaccacataataggaccattttttttttgtctttaaaattgttgtaaatctctgtatgcactttgcttttttattaaacgtactccaaggtgagtcttgactctttagtgtaggacaagattgtacactaacaccagcatggacctgcttttcattgtgtctgaaatgtgagccacgtagtgtcggcctgctgtgaagttaacattgccaggacgattcttctacagaaataatttcaatttttttcagtatttagtagtgaaagatattaatacattaatggtaatacatttctggtttaatataaattaaggatgttttctagttgtgcatgaatgctggcaacttagtaagttttgacaattgtttaaatatgtaatgttaagcttaggtttaaaaaagtaaagctggtaaactgggtctttgtcatttgctttaaaaaaaaaaaaaaagaaaataaatgcgaatgtgttggtgcattcttcctgagtgggatctgga

SEQ ID NO: 156700 - DNA, 566 bp, Artificial Sequence
  derived and/or modified sequence
accaccagcgcagcagtcctggagctgtgaggagattcgggccgtcaccctgcctcccctgcgtcccgccaccggccgcttctgtcctcgaaacgggagtggcttgcggagcaggaatgccgcagccgtgccgccaagttcggagggagaagaagcaggtgggggaccgcaaagccctgtttctagaactccggacggattgttcagaagtttgtggaagagcaggctgcctttctcactcagaatgtttgtctgctttgctttgcgttaaagaatctgcaccgtagttgatgcaactgaagtttatataagaagtttacattaactcttacctaaggaaggacccattccaacaatctcgtaaaacatggtggattactatgaagttctaggcgtgcagagacatgcctcacccgaggatattaaaaaggcatatcggaaactggcactgaagtggcatccagataaaaatcctgagaataaagaagaagcagagagaaaattcaagcaagtagcggaggcatatgaagtgctgtcggatgctaagaaacgggacatctatgaca

SEQ ID NO: 156701 - DNA, 398 bp, Artificial Sequence
  derived and/or modified sequence
ttcactatgttgttcaggctggtctcgaactcctgacctcaggtgatccacccgcctcggcttcgcaaagtgctggattacaggtgtgagcccgcgcgtccggctgtcactttaaagagtattataagagggcacttcataacttgggcaggtatttttagtcatcctgaacgtgtcgctgtggactgggtgtcaccgcgggaccgcacagacaccttactgtcgtctgctgtaaaggacccattccaacaatctcgtaaaacatggtggattactatgaagttctaggcgtgcagagacatgcctcacccgaggatattaaaaaggcatatcggaaactggcactgaagtggcatccagataaaaatcctgagaataaagaagaagcagagagaaaa

SEQ ID NO: 156702 - DNA, 1022 bp, Artificial Sequence
  derived and/or modified sequence
atactaatgtggtaatcagtgaactatttgcttccgtttccttcagtcactattccctggcgaagtctccacgcgctcccgttcgccggggaacttagggtatccgggcttccctaaattgacaagcgggggccggcgccttcgcccgccttcgctggccgccgcttggtttgttcttcttctccttcggggacttctccgcccgcgcccgcgcccgcgccccagctttcgtcccgctgtgcggagatgccacccagctccaccgcaggaccgcggagcgagaggcggcagacgcgctccgggggccgccggtcaagaggaagatgaagggcgcgacgacttcgcggtttccagaatgggctccttctggcccaacaataagtgccatttggaatcttctcggccttctctgtgccttccgcgcgtctgggctccccggagagaaaggaaagcgcgaggagccgccgccaccaccagcgcagcagtcctggagctgtgaggagattcgggccgtcaccctgcctcccctgcgtcccgccaccggccgcttctgtcctcggacccattccaacaatctcgtaaaacatggtggattactatgaagttctaggcgtgcagagacatgcctcacccgaggatattaaaaaggcatatcggaaactggcactgaagtggcatccagataaaaatcctgagaataaagaagaagcagagagaaaattcaagcaagtagcggaggcatatgaagtgctgtcggatgctaagaaacgggacatctatgacaaatatggcaaagaaggattaaatggtggaggaggaggtggaagtcattttgacagtccatttgaatttggcttcacattccgtaacccagatgatgtcttcagggaattttttggtggaagggacccattttcatttgacttctttgaagacccttttgaggacttctttgggaatcgaaggggtccccgaggaagcagaagccgagggacggggtcgtttttctctgcgttcagtgg

SEQ ID NO: 156703 - DNA, 1159 bp, Artificial Sequence
  derived and/or modified sequence
agagaaaggaaagcgcgaggagccgccgccaccaccagcgcagcagtcctggagctgtgaggagattcgggccgtcaccctgcctcccctgcgtcccgccaccggccgcttctgtcctcggacccattccaacaatctcgtaaaacatggtggattactatgaagttctaggcgtgcagagacatgcctcacccgaggatattaaaaaggcatatcggaaactggcactgaagtggcatccagataaaaatcctgagaataaagaagaagcagagagaaaattcaagcaagtagcggaggcatatgaagtgctgtcggatgctaagaaacgggacatctatgacaaatatggcaaagaaggattaaatggtggaggaggaggtggaagtcattttgacagtccatttgaatttggcttcacattccgtaacccagatgatgtcttcagggaattttttggtggaagggacccattttcatttgacttctttggtgtggccgacgacgatgccctcgctgaggagcgcatgcggagaggccagaacgccctgccagcccagcctgccggcctccgcccgccgaagccgccccggcctgcctcgctgctgagacacgcgcctcactgtctctctgaggaggagggcgagcaggaccgacctcgggcacccgggccctgggaccccctcgcgtccgcagcaggattgaaagaaggtggcaagaggaagaagcagaagcagagagaggagtcgaagaagaagaagtcgaccaaaggcaatcactagaccggacttgaggcacgcggtgcacccccagacgctggcgctccaccgtgctcggcatgcggtcgtgcacacgcgctaggtagcagcgtcggtcaggactgtctcgaggccacactcgctcggcaggattatgcgatcacggatcagtcagagcagggtcaggagacggggctgacggcacgggtggcggggacagacgtttgggacttggccgcgactctctgcttctctccagctctcaatctgctgcattttcctctagtgcttccggatcctcttcattcttttcggctactcaaccactccgcatgctgctggaatatttctggctttagaagtacaggagggcgcagatggctaactgagtaacattcatg

SEQ ID NO: 156704 - DNA, 590 bp, Artificial Sequence
  derived and/or modified sequence
actcgcgtctgaaaccagaaacgggagtggcttgcggagcaggaatgccgcagccgtgccgccaagttcggagggagaagaagcaggtgggggaccgcaaagccctgtttctagaactccggacggattgttcagaagtttgtggaagagcaggctgcctttctcactcagaatgtttgtctgctttgctttgcgttaaagaatctgcaccgtagttgatgcaactgaagtttatataagaagtttacattaactcttacctaaggaaggacccattccaacaatctcgtaaaacatggtggattactatgaagttctaggcgtgcagagacatgcctcacccgaggatattaaaaaggcatatcggaaactggcactgaagtggcatccagataaaaatcctgagaataaagaagaagcagagagaaaattcaagcaagtagcggaggcatatgaagtgctgtcggatgctaagaaacgggacatctatgacaaatatggcaaagaaggattaaatggtggaggaggaggtggaagtcattttgacagtccatttgaatttggcttcacattccgtaacccagatgatg

SEQ ID NO: 156705 - protein, 497 aa, Artificial Sequence
  derived and/or modified sequence
MSTGPDVKATVGDISSDGNLNVAQEECSRKGFCSVRHGLALILQLCNFSIYTQQMNLSIAIPAMVNNTAPPSQPNASTERPSTDSQGYWNETLKEFKAMAPAYDWSPEIQGIILSSLNYGSFLAPIPSGYVAGIFGAKYVVGAGLFISSFLTLFIPLAANAGVALLIVLRIVQGIAQVMVLTGQYSIWVKWAPPLERSQLTTIAGSGSMLGSFIVLLAGGLLCQTIGWPYVFYIFGGIGCACCPLWFPLIYDDPVNHPFISAGEKRYIVCSLAQQDCSPGWSLPIRAMIKSLPLWAILVSYFCEYWLFYTIMAYTPTYISSVLQANLRDSGILSALPFVVGCICIILGGLLADFLLSRKILRLITIRKLFTAIGVLFPSVILVSLPWVRSSHSMTMTFLVLSSAISSFCESGALVNFLDIAPRYTGFLKGLLQVFAHIAGAISPTAAGFFISQDSEFGWRNVFLLSAAVNISGLVFYLIFGRADVQDWAKEQTFTHL

SEQ ID NO: 156706 - DNA, 1494 bp, Artificial Sequence
  derived and/or modified sequence
atgtcaaccgggcccgatgtgaaagcaaccgtgggcgatattagcagtgatggtaacctgaacgtggctcaagaggaatgtagcagaaaaggattttgctcggtccgacacgggttggctttgattttacaactgtgcaacttttccatctacacacagcagatgaacttaagtatcgcgatcccagccatggttaacaacacagctcctccctctcagccgaacgcgtccacagagcgccctagcaccgattcccagggctattggaacgaaaccctgaaagaatttaaggcaatggcccccgcttacgactggtcccccgaaatacagggaataattctcagctcactcaactacggctcctttctggcccctatcccgagcggctatgttgctggaattttcggagctaagtatgtggtgggggctgggctgttcatcagttcttttttaactctgttcatcccacttgccgccaatgccggcgtggctcttctgattgtcctgagaatagtgcagggcatcgcacaggtgatggttctcactggccagtatagtatctgggtgaagtgggcccctccactggagaggtcccagctgacaaccatagctgggagcggcagtatgctcggctcttttatagtgctacttgctgggggactgctgtgccaaactatcggatggccctacgtgttttacatatttggcggaattggttgtgcctgttgccctctgtggtttcccctcatctacgacgatcccgtgaatcatccttttatctcagccggcgagaagcgatacatagtgtgtagtttagcccaacaagattgcagccctggatggagcctgcccatacgcgccatgattaagagtttgcccctgtgggccattctggtcagctacttctgtgaatactggctgttctacaccattatggcgtatacccccacctacatttcaagcgtactccaggctaacctgagagatagcggcatcctcagcgcccttccctttgtcgtaggctgtatttgcattatactgggaggcctgcttgcagattttctgttgagtcgtaagattcttcggcttattacgattcgcaagctctttactgccatcggcgtgctgtttccttcagtcattctggtgagcctgccatgggtgcggtccagtcacagcatgacaatgacatttctcgtactgagcagtgcgatttcatcattctgcgaatccggtgctctcgtgaacttcctggacatagccccaaggtatacaggcttcctgaagggcttgctgcaagttttcgcacacattgccggcgccatcagtcccactgccgccggattcttcatctcacaagacagcgagtttggttggcgcaatgtgtttctgcttagtgcagctgtgaacatttccggtctggtcttttacctgatttttggtcgggcggacgtccaggactgggctaaggagcagactttcacgcacttgtag

SEQ ID NO: 156707 - DNA, 1494 bp, Artificial Sequence
  derived and/or modified sequence
atgagcactggaccagatgtgaaggccaccgtgggggacatcagcagtgatggcaacctgaatgtggcccaggaggagtgcagcaggaagggcttctgcagcgtgagacatggcctggccctgatcctgcagctgtgcaacttcagcatctacacccagcagatgaacctgagcatcgccatcccagccatggtgaacaacacagccccacccagccagcccaatgccagcacagagcggcccagcacagacagccagggctactggaatgagaccctgaaggagttcaaggccatggccccagcctatgactggagccctgagatccagggcatcatcctgagcagcctgaactacggcagcttcctggcccccatccccagcggctacgtggccggcatctttggagccaagtatgtggtgggcgccggcctcttcatcagcagcttcctgaccctcttcatccccctggccgccaatgccggcgtggccctgctgattgtgctgagaattgtgcagggcatcgcccaggtgatggtgctgaccggccagtacagcatctgggtgaagtgggccccacccctggagaggagccagctgaccaccatcgccggcagcggctccatgctgggcagcttcatcgtgctgctggccggcggcctgctgtgccagaccatcggctggccctacgtgttctacatctttggaggcatcggctgtgcctgctgccccctgtggttccccctcatctatgatgatcctgtgaaccaccccttcatctctgctggggagaagcgctacatcgtgtgcagcctggcccagcaggactgcagccctggctggagcctgcccatccgggccatgatcaagagcctgcccctgtgggccatcctggtgtcctacttctgtgagtactggctgttctacaccatcatggcctacacccccacctacatcagctctgtgctgcaggccaacctgcgggacagcggcatcctgagcgccctgccctttgtggtgggctgcatctgcatcatcctgggcggcctgctggccgacttcctgctgagcaggaagatcctgcggctcatcaccatcaggaagctgttcaccgccatcggcgtgctcttccccagcgtcatcctggtgtccctgccctgggtgcgcagcagccacagcatgaccatgaccttcctggtgctgagcagcgccatcagcagcttctgtgagagcggggccctggtgaacttcctggacatcgccccccgctacacaggcttcctgaagggcctgctgcaggtgtttgcccacatcgccggggccatcagccccacagctgctggcttcttcatcagccaggacagcgagtttggctggagaaatgtgttcctgctgtctgctgctgtgaacatcagcggcctggtgttctacctgatcttcggccgggcagatgtgcaggactgggccaaggagcagaccttcacccacctgtag

SEQ ID NO: 156708 - DNA, 1494 bp, Artificial Sequence
  derived and/or modified sequence
atgagcaccggccccgacgtgaaggccaccgtgggcgacatcagctctgacggaaacctgaatgtcgctcaggaggagtgttcccgtaagggattttgttccgtccggcatggcctcgccttgatcctacaactgtgtaactttagcatctacactcagcagatgaatctgtctattgccattcctgccatggtgaataacaccgctccaccttcacagccaaatgctagtactgagcggccctcaactgacagccagggctactggaacgaaacacttaaagagttcaaggcgatggcaccagcctacgattggtcccccgaaatccaagggattatactcagctctcttaattacggctcttttctggcacccattccatctggctacgtggcaggaatcttcggcgccaagtacgtcgtgggcgcagggctctttatcagtagctttcttaccctgttcattccccttgcagctaacgccggcgtggccctcttgattgtacttcgaatcgtgcaggggatcgcccaggtaatggttttgaccggccaatattcgatttgggtaaaatgggccccgcccctcgaacggtcacagctgaccactattgctgggagcgggtccatgctcgggagttttattgttttgctcgccggggggttgttgtgtcaaactattggttggccctacgttttctatatcttcggaggaattggttgcgcctgctgtcccctgtggtttccactaatctacgatgacccggtaaaccaccctttcatctcagccggcgaaaaaaggtatattgtgtgtagcttagcccaacaggattgttcccctggctggagcctgccgatacgggccatgatcaaatccttgcccctgtgggccatactggtctcctacttttgcgagtactggctattctatacaattatggcttacacacctacgtacatttctagcgtgctgcaggcgaatcttagggactcaggtatcctcagcgccttgcctttcgtcgtcggctgcatctgtattatcctgggtggactgcttgcggactttttactgtcccgcaagatcttacggttgattacaatccgtaagctgttcacagccatcggcgtgctgttcccatccgtcatcctggtgtcattgccctgggttcggtcatcacattccatgacaatgactttcctggtgctcagtagcgcaataagctccttttgtgaatcaggcgcgctggtgaacttccttgatatagctccacggtacactgggttccttaaggggttgctgcaggtcttcgcccacatcgcgggggctatttcaccaacagctgccggcttctttatctctcaagacagtgaatttggttggcgcaatgtgttcctactttccgctgctgtcaatatcagcggcttggtcttctacctcatatttggtagagccgatgttcaggactgggccaaggagcagacctttacccacctgtag

SEQ ID NO: 156709 - DNA, 1494 bp, Artificial Sequence
  derived and/or modified sequence
atgtctaccgggccagatgtgaaggctactgtgggggatattagcagcgacgggaacctgaacgtggcccaggaggagtgcagtagaaaggggttttgcagcgttagacatggactagctctgatactccagctgtgcaatttctctatctacacccagcaaatgaacttatccatcgccattccagctatggtcaataacaccgccccaccttctcaaccgaacgccagtaccgagcgtcctagcactgatagccagggttattggaacgaaaccctcaaagaatttaaggctatggcccctgcatacgattggagcccagaaatccaggggattatactgtcctccctgaattacggcagcttcctggctccaattcccagcgggtacgtggccggaatctttggtgccaagtatgtggtgggcgctggattgttcatcagctctttcttgactctcttcatccccttagcagcgaatgccggagtggccttgctgatcgtcctgagaattgtccaaggaatcgcacaagtgatggtgcttacaggccagtattccatttgggtcaaatgggctcccccactggaacgttcccagctgactaccattgctgggagtggctccatgcttggtagcttcatcgttctgttggccggagggcttctgtgccagacaataggctggccttacgttttttacatcttcgggggaatcggttgtgcctgttgtcctctgtggttcccgcttatttatgatgacccagtgaaccacccctttattagcgcgggagagaaacgctatattgtgtgcagcctggctcagcaggactgttcacctggatggagtctgccaatccgggcaatgatcaaaagcctcccattatgggcaatcctggtttcttacttctgcgagtattggctgttttataccataatggcctatacacctacctacataagttcagtcctccaggctaacttgagagatagcgggatcctttctgccctgccttttgtcgtgggatgcatctgtatcattctcggcggattactcgccgatttcctactgtcacggaaaatccttagactaatcacaattcgtaagcttttcaccgcaatcggcgttctatttccatcagtcattctggtctccttgccctgggtgcgatccagccatagcatgaccatgacattcttagtgctgagtagcgcgatcagcagcttttgcgaaagcggtgccctggtgaactttctagatatagctccgagatacacaggatttctgaaaggactgcttcaagtgttcgcacacattgcaggtgctatctctccaaccgctgcaggattttttatttcccaggatagcgagttcggatggagaaacgtcttcttactaagcgcagcggtgaatatctctggcctggtattttacctgattttcggtcgagctgacgtgcaggattgggcgaaagagcagaccttcacccacctgtag

SEQ ID NO: 156710 - DNA, 3616 bp, Artificial Sequence
  derived and/or modified sequence
ttacctcccagaattagacaattgcaaagagcttagaatatttatttgaaaggaatgaggatcctgcactcttcctccctcagtaagtaaatgccagtccctaggaagagagaaccaaaatgtctaccggaccagatgtcaaggctacagtgggggacatttccagtgatggcaatttaaacgtggctcaagaggaatgctccaggaaaggtttttgttcagtccgacatgggctggccctcatcttgcagctctgtaatttttcaatttacacccaacaaatgaacttgagcattgccatcccagctatggtgaacaacacagccccacctagccagcccaatgcttccacagaacggccctccactgactcccagggctactggaatgaaactctaaaagaatttaaagcaatggcccctgcatatgactggagtcctgaaatccagggaatcatcctcagctccctcaactatggctcattcttggctccaatccccagtggctatgtggctggaatatttggagccaagtatgtggttggtgctggcttgtttatttcctcattcctgaccctcttcattccactggcagctaatgcgggagtggccttgctcattgtcctccggattgtacaaggcatagcccaggttatggtattaactggtcagtattcaatttgggtcaaatgggctcccccactggaaaggagtcaactcaccaccattgctggatcagggtcaatgctggggtccttcattgttctacttgctggtggtctcctctgccagaccataggatggccttacgtcttctatatctttggaggaattggctgtgcttgttgtcctctctggtttcctctcatttatgatgatcctgtgaatcatccctttatcagtgctggtgagaagagatacattgtgtgttcattggctcagcaggactgttcaccaggctggtctcttcccattagggctatgatcaaatccttaccactctgggccattttagtctcttatttctgtgaatactggcttttttataccattatggcgtacacaccaacgtacatcagctcggtacttcaagccaacctcagagatagtgggatcctgtctgccttgccgtttgttgttggatgtatctgcattatccttggaggtctactggcagactttcttctctccagaaaaatcctcagactcatcaccatcaggaaactcttcactgccattggggttctcttcccatccgtgatcctcgtgtccctgccctgggtcagatccagccacagcatgaccatgaccttcttggtgctgtcttctgccatcagcagcttctgtgaatcaggagcccttgttaacttcttggatattgctcctcggtacactggctttctcaaaggactattgcaagtctttgcacacatagctggagccatctctcctactgctgctggatttttcatcagtcaggattcagagtttggttggagaaatgtcttcttgctttcagctgctgttaacatatcgggcctggttttctacctcatctttggccgagcagatgtgcaggactgggctaaagagcagacattcacccacctctgagcaaaccgagagatgtgctagatcctggtgcttagttcatcattgttttccctcacagacatttctctttcatgcctgcttgactgataagccattagctagaccctgactatgtaacgctaaagattttaccatgcctggaaattttacaggggaagaaaacacgctagttatttaactgcaagctactaaaagcataggtgtgttgagatttctgtgttctccactcttccactgttatcctagtaaaagcatcaggggctggggacaatttctttccaaagcaaaagaggaagccagaccttgggaccgagaactgagaatcacaagggagttgcgcccaacatgcagaacatgaatcctctgagctgtcctcaaaagaaagccccaaacaacagaaagcatagtgttttccattgttggtgaaaaatgtcaaggaggaaagaacaataatgattccatcatgataagaggaatgaacgtgtctgcaactaatgggagcaagatagtacactttaactctttcagacaacttgcattctgtggatgccagctttggaatcagagccgcctctggaatacctgtgcttccagagttagcttttggacagttaccttctttctggccatcttgacttctgccccacatctgctttttggctttgtgcagatctttaacatgttagtgaacagacattgcccagtgtctcttctagcccctccaacagttcttcatgtagcactgcttttggacagtgacccatgatatctgccttcgtttgcccctctgactgttggaatcccacgcaccattcagtaggattcaattcaatgtggaaccattcaacattcacctcattaacctaaaatgtctcccaaagatgtatgtaagacacacactgccctaacctcactccaaatgtctggagaaatgtgtgtagtgcttttgttaaagcccctatatgggcagcatggaggatcataagatagcaaaaccatttcaacactaaatgaatattaatgtacacacaccttgtgtggatggcagaaatcaaatcatacacagtattaaggagttcagtgtctcgggagggcagataactttaatcaaagtatcacacaagtgaatatgtaataacaactgtagaaataatgagtggttacatgggttatgagagtggatgataagtgcactaatctgagtgtaaggaagggccacccctgcaaagtttcagctgagctgggatctgaaggataatagttaactgttgtgggagactgagaggagaatattttaggaagaaagaacagcataagcaaaagtttcatggcaggagggagaaattagctatggccagagtatagagaataagggaagtatgatttgtgaggagactgtagaagaattaaggtcaggagcacacaggatgatgtaggcccagtgaagtgcgttggtctttattttgaaatcagtaggaagtgtcctggttttcaaaggcactctgcatgagagattaggttggagtaggagcttacagtgtagtccaggagagaacaatggcccctggcatgaggcaatagacatggtgagaggtgaatggattatttgatttaggtggattatttgatttagggaataaacctgacgggtcctattactaagtgagagagtgaaagatgtccagagtaactcctgagttttggtttgctattatattaatggggatgcctctaacacagacagcaacacagatagcaattatatccaagtgtagacaacaagaaggaaaatggacacatgactctggatttctcttgtgagacctgggctccatttacaaacgtataaatcatcttgatataggtagtgattacaatttttgcatggatgagtcatccatgggtgaaagtggcataagaaaaggaagcttgggaataagccttaaagaattccagtatttaatggtcagctggaggatgattagcagaaagaaagaaagaaa

SEQ ID NO: 156711 - DNA, 1494 bp, Artificial Sequence
  derived and/or modified sequence
atgagcaccggccccgacgtgaaggccaccgtgggcgacatcagcagcgacggcaacctgaacgtggcccaggaggagtgcagcagaaagggcttctgcagcgtgagacacggcctggccctgatcctgcagctgtgcaacttcagcatctacacccagcagatgaacctgagcatcgccatccccgccatggtgaacaacaccgccccccccagccagcccaacgccagcaccgagagacccagcaccgacagccagggctactggaacgagaccctgaaggagttcaaggccatggcccccgcctacgactggagccccgagatccagggcatcatcctgagcagcctgaactacggcagcttcctggcccccatccccagcggctacgtggccggcatcttcggcgccaagtacgtggtgggcgccggcctgttcatcagcagcttcctgaccctgttcatccccctggccgccaacgccggcgtggccctgctgatcgtgctgagaatcgtgcagggcatcgcccaggtgatggtgctgaccggccagtacagcatctgggtgaagtgggccccccccctggagagaagccagctgaccaccatcgccggcagcggcagcatgctgggcagcttcatcgtgctgctggccggcggcctgctgtgccagaccatcggctggccctacgtgttctacatcttcggcggcatcggctgcgcctgctgccccctgtggttccccctgatctacgacgaccccgtgaaccaccccttcatcagcgccggcgagaagagatacatcgtgtgcagcctggcccagcaggactgcagccccggctggagcctgcccatcagagccatgatcaagagcctgcccctgtgggccatcctggtgagctacttctgcgagtactggctgttctacaccatcatggcctacacccccacctacatcagcagcgtgctgcaggccaacctgagagacagcggcatcctgagcgccctgcccttcgtggtgggctgcatctgcatcatcctgggcggcctgctggccgacttcctgctgagcagaaagatcctgagactgatcaccatcagaaagctgttcaccgccatcggcgtgctgttccccagcgtgatcctggtgagcctgccctgggtgagaagcagccacagcatgaccatgaccttcctggtgctgagcagcgccatcagcagcttctgcgagagcggcgccctggtgaacttcctggacatcgcccccagatacaccggcttcctgaagggcctgctgcaggtgttcgcccacatcgccggcgccatcagccccaccgccgccggcttcttcatcagccaggacagcgagttcggctggagaaacgtgttcctgctgagcgccgccgtgaacatcagcggcctggtgttctacctgatcttcggcagagccgacgtgcaggactgggccaaggagcagaccttcacccacctgtag

SEQ ID NO: 156712 - protein, 1288 aa, Artificial Sequence
  derived and/or modified sequence
MPRKGTQPSTARRREEGPPPPSPDGASSDAEPEPPSGRTESPATAAETASEELDNRSLEEILNSIPPPPPPAMTNEAGAPRLMITHIVNQNFKSYAGEKILGPFHKRFSCIIGPNGSGKSNVIDSMLFVFGYRAQKIRSKKLSVLIHNSDEHKDIQSCTVEVHFQKIIDKEGDDYEVIPNSNFYVSRTACRDNTSVYHISGKKKTFKDVGNLLRSHGIDLDHNRFLILQGEVEQIAMMKPKGQTEHDEGMLEYLEDIIGCGRLNEPIKVLCRRVEILNEHRGEKLNRVKMVEKEKDALEGEKNIAIEFLTLENEIFRKKNHVCQYYIYELQKRIAEMETQKEKIHEDTKEINEKSNILSNEMKAKNKDVKDTEKKLNKITKFIEENKEKFTQLDLEDVQVREKLKHATSKAKKLEKQLQKDKEKVEEFKSIPAKSNNIINETTTRNNALEKEKEKEEKKLKEVMDSLKQETQGLQKEKESREKELMGFSKSVNEARSKMDVAQSELDIYLSRHNTAVSQLTKAKEALIAASETLKERKAAIRDIEGKLPQTEQELKEKEKELQKLTQEETNFKSLVHDLFQKVEEAKSSLAMNRSRGKVLDAIIQEKKSGRIPGIYGRLGDLGAIDEKYDVAISSCCHALDYIVVDSIDIAQECVNFLKRQNIGVATFIGLDKMAVWAKKMTEIQTPENTPRLFDLVKVKDEKIRQAFYFALRDTLVADNLDQATRVAYQKDRRWRVVTLQGQIIEQSGTMTGGGSKVMKGRMGSSLVIEISEEEVNKMESQLQNDSKKAMQIQEQKVQLEERVVKLRHSEREMRNTLEKFTASIQRLIEQEEYLNVQVKELEANVLATAPDKKKQKLLEENVSAFKTEYDAVAEKAGKVEAEVKRLHNTIVEINNHKLKAQQDKLDKINKQLDECASAITKAQVAIKTADRNLQKAQDSVLRTEKEIKDTEKEVDDLTAELKSLEDKAAEVVKNTNAAEESLPEIQKEHRNLLQELKVIQENEHALQKDALSIKLKLEQIDGHIAEHNSKIKYWHKEISKISLHPIEDNPIEEISVLSPEDLEAIKNPDSITNQIALLEARCHEMKPNLGAIAEYKKKEELYLQRVAELDKITYERDSFRQAYEDLRKQRLNEFMAGFYIITNKLKENYQMLTLGGDAELELVDSLDPFSEGIMFSVRPPKKSWKKIFNLSGGEKTLSSLALVFALHHYKPTPLYFMDEIDAALDFKNVSIVAFYIYEQTKNAQFIIISLRNNMFEISDRLIGIYKTYNITKSVAVNPKEIASKGLC

SEQ ID NO: 156713 - protein, 1230 aa, Artificial Sequence
  derived and/or modified sequence
MPRKGTQPSTARRREEGPPPPSPDGASSDAEPEPPSGRTESPATAAETASEELDNRSLEEILNSIPPPPPPAMTNEAGAPRLMITHIVNQNFKSYAGEKILGPFHKRFSCIIGPNGSGKSNVIDSMLFVFGYRAQKIRSKKLSVLIHNSDEHKDIQSCTVEVHFQKIIDKEGDDYEVIPNSNFYVSRTACRDNTSVYHISGKKKTFKDVGNLLRSHGIDLDHNRFLILQGEVEQIAMMKPKGQTEHDEGMLEYLEDIIGCGRLNEPIKVLCRRVEILNEHRGEKLNRVKMVEKEKDALEGEKNIAIEFLTLENEIFRKKNHVCQYYIYELQKRIAEMETQKEKIHEDTKEINEKSNILSNEMKAKNKDVKDTEKKLNKITKFIEENKEKFTQLDLEDVQVREKLKHATSKAKKLEKQLQKDKEKVEEFKSIPAKSNNIINETTTRNNALEKEKEKEEKKLKEVMDSLKQETQGLQKEKESREKELMGFSKSVNEARSKMDVAQSELDIYLSRHNTAVSQLTKAKEALIAASETLKERKAAIRDIEGKLPQTEQELKEKEKELQKLTQEETNFKSLVHDLFQKVEEAKSSLAMNRSRGKVLDAIIQEKKSGRIPGIYGRLGDLGAIDEKYDVAISSCCHALDYIVVDSIDIAQECVNFLKRQNIGVATFIGLDKMAVWAKKMTEIQTPENTPRLFDLVKVKDEKIRQAFYFALRDTLVADNLDQATRVAYQKDRRWRVVTLQGQIIEQSGTMTGGGSKVMKGRMGSSLVIEISEEEVNKMESQLQNDSKKAMQIQEQKVQLEERVVKLRHSEREMRNTLEKFTASIQRLIEQEEYLNVQVKELEANVLATAPDKKKQKLLEENVSAFKTEYDAVAEKAGKVEAEVKRLHNTIVEINNHKLKAQQDKLDKINKQLDECASAITKAQVAIKTADRNLQKAQDSVLRTEKEIKDTEKEVDDLTAELKSLEDKAAEVVKNTNAAEISKISLHPIEDNPIEEISVLSPEDLEAIKNPDSITNQIALLEARCHEMKPNLGAIAEYKKKEELYLQRVAELDKITYERDSFRQAYEDLRKQRLNEFMAGFYIITNKLKENYQMLTLGGDAELELVDSLDPFSEGIMFSVRPPKKSWKKIFNLSGGEKTLSSLALVFALHHYKPTPLYFMDEIDAALDFKNVSIVAFYIYEQTKNAQFIIISLRNNMFEISDRLIGIYKTYNITKSVAVNPKEIASKGLC

SEQ ID NO: 156714 - protein, 422 aa, Artificial Sequence
  derived and/or modified sequence
MPRKGTQPSTARRREEGPPPPSPDGASSDAEPEPPSGRTESPATAAETASEELDNRSLEEILNSIPPPPPPAMTNEAGAPRLMITHIVNQNFKSYAGEKILGPFHKRFSCIIGPNGSGKSNVIDSMLFVFGYRAQKIRSKKLSVLIHNSDEHKDIQSCTVEVHFQKIIDKEGDDYEVIPNSNFYVSRTACRDNTSVYHISGKKKTFKDVGNLLRSHGIDLDHNRFLILQGEVEQIAMMKPKGQTEHDEGMLEYLEDIIGCGRLNEPIKVLCRRVEILNEHRGEKLNRVKMVEKEKDALEGEKNIAIEFLTLENEIFRKKNHVCQYYIYELQKRIAEMETQKEKIHEDTKEINEKSNILSNEMKAKNKDVKDTEKKLNKITKFIEENKEKFTQLDLEDVQVREKLKHATSKAKTGETTSKRKK

SEQ ID NO: 156715 - protein, 170 aa, Artificial Sequence
  derived and/or modified sequence
MPRKGTQPSTARRREEGPPPPSPDGASSDAEPEPPSGRTESPATAAETASEELDNRSLEEILNSIPPPPPPAMTNEAGAPRLMITHIVNQNFKSYAGEKILGPFHKRFSCIIGPNGSGKSNVIDSMLFVFGYRAQKIRSKKLSVLIHNSDEHKDIQSCTVEVHFQKIIDK

SEQ ID NO: 156716 - protein, 173 aa, Artificial Sequence
  derived and/or modified sequence
MPRKGTQPSTARRREEGPPPPSPDGASSDAEPEPPSGRTESPATAAETASEELDNRSLEEILNSIPPPPPPAMTNEAGAPRLMITHIVNQNFKSYAGEKILGPFHKRFSCIIGPNGSGKSNVIDSMLFVFGYRAQKIRSKKLSVLIHNSDEHKDIQSCTVEVHFQKIIDKEGD

SEQ ID NO: 156717 - protein, 423 aa, Artificial Sequence
  derived and/or modified sequence
MPRKGTQPSTARRREEGPPPPSPDGASSDAEPEPPSGRTESPATAAETASEELDNRSLEEILNSIPPPPPPAMTNEAGAPRLMITHIVNQNFKSYAGEKILGPFHKRFSCIIGPNGSGKSNVIDSMLFVFGYRAQKIRSKKLSVLIHNSDEHKDIQSCTVEVHFQKIIDKEGDDYEVIPNSNFYVSRTACRDNTSVYHISGKKKTFKDVGNLLRSHGIDLDHNRFLILQGEVEQIAMMKPKGQTEHDEGMLEYLEDIIGCGRLNEPIKVLCRRVEILNEHRGEKLNRVKMVEKEKDALEGEKNIAIEFLTLENEIFRKKNHVCQYYIYELQKRIAEMETQKEKIHEDTKEINEKSNILSNEMKAKNKDVKDTEKKLNKITKFIEENKEKFTQLDLEDVQVREKLKHATSKAKKLEKQLQKDKE

SEQ ID NO: 156718 - protein, 180 aa, Artificial Sequence
  derived and/or modified sequence
MPRKGTQPSTARRREEGPPPPSPDGASSDAEPEPPSGRTESPATAAETASEELDNRSLEEILNSIPPPPPPAMTNEAGAPRLMITHIVNQNFKSYAGEKILGPFHKRFSCIIGPNGSGKSNVIDSMLFVFGYRAQKIRSKKLSVLIHNSDEHKDIQSCTVEVHFQKIIDKEGDDYEVIPN

SEQ ID NO: 156719 - DNA, 3867 bp, Artificial Sequence
  derived and/or modified sequence
atgcccagaaagggcacccagcccagcaccgccagaagaagagaggagggcccccccccccccagccccgacggcgccagcagcgacgccgagcccgagccccccagcggcagaaccgagagccccgccaccgccgccgagaccgccagcgaggagctggacaacagaagcctggaggagatcctgaacagcatcccccccccccccccccccgccatgaccaacgaggccggcgcccccagactgatgatcacccacatcgtgaaccagaacttcaagagctacgccggcgagaagatcctgggccccttccacaagagattcagctgcatcatcggccccaacggcagcggcaagagcaacgtgatcgacagcatgctgttcgtgttcggctacagagcccagaagatcagaagcaagaagctgagcgtgctgatccacaacagcgacgagcacaaggacatccagagctgcaccgtggaggtgcacttccagaagatcatcgacaaggagggcgacgactacgaggtgatccccaacagcaacttctacgtgagcagaaccgcctgcagagacaacaccagcgtgtaccacatcagcggcaagaagaagaccttcaaggacgtgggcaacctgctgagaagccacggcatcgacctggaccacaacagattcctgatcctgcagggcgaggtggagcagatcgccatgatgaagcccaagggccagaccgagcacgacgagggcatgctggagtacctggaggacatcatcggctgcggcagactgaacgagcccatcaaggtgctgtgcagaagagtggagatcctgaacgagcacagaggcgagaagctgaacagagtgaagatggtggagaaggagaaggacgccctggagggcgagaagaacatcgccatcgagttcctgaccctggagaacgagatcttcagaaagaagaaccacgtgtgccagtactacatctacgagctgcagaagagaatcgccgagatggagacccagaaggagaagatccacgaggacaccaaggagatcaacgagaagagcaacatcctgagcaacgagatgaaggccaagaacaaggacgtgaaggacaccgagaagaagctgaacaagatcaccaagttcatcgaggagaacaaggagaagttcacccagctggacctggaggacgtgcaggtgagagagaagctgaagcacgccaccagcaaggccaagaagctggagaagcagctgcagaaggacaaggagaaggtggaggagttcaagagcatccccgccaagagcaacaacatcatcaacgagaccaccaccagaaacaacgccctggagaaggagaaggagaaggaggagaagaagctgaaggaggtgatggacagcctgaagcaggagacccagggcctgcagaaggagaaggagagcagagagaaggagctgatgggcttcagcaagagcgtgaacgaggccagaagcaagatggacgtggcccagagcgagctggacatctacctgagcagacacaacaccgccgtgagccagctgaccaaggccaaggaggccctgatcgccgccagcgagaccctgaaggagagaaaggccgccatcagagacatcgagggcaagctgccccagaccgagcaggagctgaaggagaaggagaaggagctgcagaagctgacccaggaggagaccaacttcaagagcctggtgcacgacctgttccagaaggtggaggaggccaagagcagcctggccatgaacagaagcagaggcaaggtgctggacgccatcatccaggagaagaagagcggcagaatccccggcatctacggcagactgggcgacctgggcgccatcgacgagaagtacgacgtggccatcagcagctgctgccacgccctggactacatcgtggtggacagcatcgacatcgcccaggagtgcgtgaacttcctgaagagacagaacatcggcgtggccaccttcatcggcctggacaagatggccgtgtgggccaagaagatgaccgagatccagacccccgagaacacccccagactgttcgacctggtgaaggtgaaggacgagaagatcagacaggccttctacttcgccctgagagacaccctggtggccgacaacctggaccaggccaccagagtggcctaccagaaggacagaagatggagagtggtgaccctgcagggccagatcatcgagcagagcggcaccatgaccggcggcggcagcaaggtgatgaagggcagaatgggcagcagcctggtgatcgagatcagcgaggaggaggtgaacaagatggagagccagctgcagaacgacagcaagaaggccatgcagatccaggagcagaaggtgcagctggaggagagagtggtgaagctgagacacagcgagagagagatgagaaacaccctggagaagttcaccgccagcatccagagactgatcgagcaggaggagtacctgaacgtgcaggtgaaggagctggaggccaacgtgctggccaccgcccccgacaagaagaagcagaagctgctggaggagaacgtgagcgccttcaagaccgagtacgacgccgtggccgagaaggccggcaaggtggaggccgaggtgaagagactgcacaacaccatcgtggagatcaacaaccacaagctgaaggcccagcaggacaagctggacaagatcaacaagcagctggacgagtgcgccagcgccatcaccaaggcccaggtggccatcaagaccgccgacagaaacctgcagaaggcccaggacagcgtgctgagaaccgagaaggagatcaaggacaccgagaaggaggtggacgacctgaccgccgagctgaagagcctggaggacaaggccgccgaggtggtgaagaacaccaacgccgccgaggagagcctgcccgagatccagaaggagcacagaaacctgctgcaggagctgaaggtgatccaggagaacgagcacgccctgcagaaggacgccctgagcatcaagctgaagctggagcagatcgacggccacatcgccgagcacaacagcaagatcaagtactggcacaaggagatcagcaagatcagcctgcaccccatcgaggacaaccccatcgaggagatcagcgtgctgagccccgaggacctggaggccatcaagaaccccgacagcatcaccaaccagatcgccctgctggaggccagatgccacgagatgaagcccaacctgggcgccatcgccgagtacaagaagaaggaggagctgtacctgcagagagtggccgagctggacaagatcacctacgagagagacagcttcagacaggcctacgaggacctgagaaagcagagactgaacgagttcatggccggcttctacatcatcaccaacaagctgaaggagaactaccagatgctgaccctgggcggcgacgccgagctggagctggtggacagcctggaccccttcagcgagggcatcatgttcagcgtgagaccccccaagaagagctggaagaagatcttcaacctgagcggcggcgagaagaccctgagcagcctggccctggtgttcgccctgcaccactacaagcccacccccctgtacttcatggacgagatcgacgccgccctggacttcaagaacgtgagcatcgtggccttctacatctacgagcagaccaagaacgcccagttcatcatcatcagcctgagaaacaacatgttcgagatcagcgacagactgatcggcatctacaagacctacaacatcaccaagagcgtggccgtgaaccccaaggagatcgccagcaagggcctgtgctag

SEQ ID NO: 156720 - DNA, 3693 bp, Artificial Sequence
  derived and/or modified sequence
atgcccagaaagggcacccagcccagcaccgccagaagaagagaggagggcccccccccccccagccccgacggcgccagcagcgacgccgagcccgagccccccagcggcagaaccgagagccccgccaccgccgccgagaccgccagcgaggagctggacaacagaagcctggaggagatcctgaacagcatcccccccccccccccccccgccatgaccaacgaggccggcgcccccagactgatgatcacccacatcgtgaaccagaacttcaagagctacgccggcgagaagatcctgggccccttccacaagagattcagctgcatcatcggccccaacggcagcggcaagagcaacgtgatcgacagcatgctgttcgtgttcggctacagagcccagaagatcagaagcaagaagctgagcgtgctgatccacaacagcgacgagcacaaggacatccagagctgcaccgtggaggtgcacttccagaagatcatcgacaaggagggcgacgactacgaggtgatccccaacagcaacttctacgtgagcagaaccgcctgcagagacaacaccagcgtgtaccacatcagcggcaagaagaagaccttcaaggacgtgggcaacctgctgagaagccacggcatcgacctggaccacaacagattcctgatcctgcagggcgaggtggagcagatcgccatgatgaagcccaagggccagaccgagcacgacgagggcatgctggagtacctggaggacatcatcggctgcggcagactgaacgagcccatcaaggtgctgtgcagaagagtggagatcctgaacgagcacagaggcgagaagctgaacagagtgaagatggtggagaaggagaaggacgccctggagggcgagaagaacatcgccatcgagttcctgaccctggagaacgagatcttcagaaagaagaaccacgtgtgccagtactacatctacgagctgcagaagagaatcgccgagatggagacccagaaggagaagatccacgaggacaccaaggagatcaacgagaagagcaacatcctgagcaacgagatgaaggccaagaacaaggacgtgaaggacaccgagaagaagctgaacaagatcaccaagttcatcgaggagaacaaggagaagttcacccagctggacctggaggacgtgcaggtgagagagaagctgaagcacgccaccagcaaggccaagaagctggagaagcagctgcagaaggacaaggagaaggtggaggagttcaagagcatccccgccaagagcaacaacatcatcaacgagaccaccaccagaaacaacgccctggagaaggagaaggagaaggaggagaagaagctgaaggaggtgatggacagcctgaagcaggagacccagggcctgcagaaggagaaggagagcagagagaaggagctgatgggcttcagcaagagcgtgaacgaggccagaagcaagatggacgtggcccagagcgagctggacatctacctgagcagacacaacaccgccgtgagccagctgaccaaggccaaggaggccctgatcgccgccagcgagaccctgaaggagagaaaggccgccatcagagacatcgagggcaagctgccccagaccgagcaggagctgaaggagaaggagaaggagctgcagaagctgacccaggaggagaccaacttcaagagcctggtgcacgacctgttccagaaggtggaggaggccaagagcagcctggccatgaacagaagcagaggcaaggtgctggacgccatcatccaggagaagaagagcggcagaatccccggcatctacggcagactgggcgacctgggcgccatcgacgagaagtacgacgtggccatcagcagctgctgccacgccctggactacatcgtggtggacagcatcgacatcgcccaggagtgcgtgaacttcctgaagagacagaacatcggcgtggccaccttcatcggcctggacaagatggccgtgtgggccaagaagatgaccgagatccagacccccgagaacacccccagactgttcgacctggtgaaggtgaaggacgagaagatcagacaggccttctacttcgccctgagagacaccctggtggccgacaacctggaccaggccaccagagtggcctaccagaaggacagaagatggagagtggtgaccctgcagggccagatcatcgagcagagcggcaccatgaccggcggcggcagcaaggtgatgaagggcagaatgggcagcagcctggtgatcgagatcagcgaggaggaggtgaacaagatggagagccagctgcagaacgacagcaagaaggccatgcagatccaggagcagaaggtgcagctggaggagagagtggtgaagctgagacacagcgagagagagatgagaaacaccctggagaagttcaccgccagcatccagagactgatcgagcaggaggagtacctgaacgtgcaggtgaaggagctggaggccaacgtgctggccaccgcccccgacaagaagaagcagaagctgctggaggagaacgtgagcgccttcaagaccgagtacgacgccgtggccgagaaggccggcaaggtggaggccgaggtgaagagactgcacaacaccatcgtggagatcaacaaccacaagctgaaggcccagcaggacaagctggacaagatcaacaagcagctggacgagtgcgccagcgccatcaccaaggcccaggtggccatcaagaccgccgacagaaacctgcagaaggcccaggacagcgtgctgagaaccgagaaggagatcaaggacaccgagaaggaggtggacgacctgaccgccgagctgaagagcctggaggacaaggccgccgaggtggtgaagaacaccaacgccgccgagatcagcaagatcagcctgcaccccatcgaggacaaccccatcgaggagatcagcgtgctgagccccgaggacctggaggccatcaagaaccccgacagcatcaccaaccagatcgccctgctggaggccagatgccacgagatgaagcccaacctgggcgccatcgccgagtacaagaagaaggaggagctgtacctgcagagagtggccgagctggacaagatcacctacgagagagacagcttcagacaggcctacgaggacctgagaaagcagagactgaacgagttcatggccggcttctacatcatcaccaacaagctgaaggagaactaccagatgctgaccctgggcggcgacgccgagctggagctggtggacagcctggaccccttcagcgagggcatcatgttcagcgtgagaccccccaagaagagctggaagaagatcttcaacctgagcggcggcgagaagaccctgagcagcctggccctggtgttcgccctgcaccactacaagcccacccccctgtacttcatggacgagatcgacgccgccctggacttcaagaacgtgagcatcgtggccttctacatctacgagcagaccaagaacgcccagttcatcatcatcagcctgagaaacaacatgttcgagatcagcgacagactgatcggcatctacaagacctacaacatcaccaagagcgtggccgtgaaccccaaggagatcgccagcaagggcctgtgctag

SEQ ID NO: 156721 - DNA, 5356 bp, Artificial Sequence
  derived and/or modified sequence
ccttaattagaaatgcgttagcgaatattatacgcttatactatgggcggacgggtggagagccttaaaaacaacaacaacaaactaagcagttgctcaatcgttgattgatcctcaggcacgtctagattttcccacttacataggtcttgttaagaaaccagtcctgccttcttgccactcgtgtctttcgatggctcccttcccgaagtcccgctgcctctaagcggagtgttaagcggggctctcggaagccggtggaccgagatttccccgggtggggcgggcgcggtgtagcggcccgcgggctgacttgctcccggctgtcccccggccccagcgaccatgccccgtaaaggcacccagccctccactgcccggcgcagagaggaagggccgccgccgccgtcccctgacggcgccagcagcgacgcggagcctgagccgccgtccggccgcacggagagcccagccaccgccgcagagactgcaagtgaggaacttgataatagaagtttagaagagattttgaacagcattcctcctcccccgcctccagcaatgaccaatgaagctggagctcctcggcttatgataactcatattgtaaaccagaacttcaaatcctatgctggggagaaaattctgggacctttccataagcgcttttcctgtattatcgggccaaatggcagtggcaaatccaatgttattgattctatgctttttgtgtttggctatcgagcacaaaaaataagatctaaaaaactctcagtattaatacataattctgatgaacacaaggacattcagagttgtacagtagaagttcattttcaaaagataattgataaggaaggggatgattatgaagtcattcctaacagtaatttctatgtatccagaacggcctgcagagataatacttctgtctatcacataagtggaaagaaaaagacatttaaggatgttggaaatcttcttcgaagccatggaattgacttggaccataatagatttttaattttacagggtgaagttgaacaaattgctatgatgaaaccaaaaggccagactgaacacgatgagggtatgcttgaatatttagaagatataattggttgtggacggctaaatgaacctattaaagtcttgtgtcggagagttgaaatattaaatgaacacagaggagagaagttaaacagggtaaagatggtggaaaaggaaaaggatgccttagaaggagagaaaaacatagctatcgaatttcttaccttggaaaatgaaatatttagaaaaaagaatcatgtttgtcaatattatatttatgagttgcagaaacgaattgctgaaatggaaactcaaaaggaaaaaattcatgaagataccaaagaaattaatgagaagagcaatatactatcaaatgaaatgaaagctaagaataaagatgtaaaagatacagaaaagaaactgaataaaattacaaaatttattgaggagaataaagaaaaatttacacagctagatttggaagatgttcaagttagagaaaagttaaaacatgccacgagtaaagccaaaaaactggagaaacaacttcaaaaagataaagaaaaggttgaagaatttaaaagtatacctgccaagagtaacaatatcattaatgaaacaacaaccagaaacaatgccctcgagaaggaaaaagagaaagaagaaaaaaaattaaaggaagttatggatagccttaaacaggaaacacaagggcttcagaaagaaaaagaaagtcgagagaaagaacttatgggtttcagcaaatcggtaaatgaagcacgttcaaagatggatgtagcccagtcagaacttgatatctatctcagtcgtcataatactgcagtgtctcaattaactaaggctaaggaagctctaattgcagcttctgagactctcaaagaaaggaaagctgcaatcagagatatagaaggaaaactccctcaaactgaacaagaattaaaggagaaagaaaaagaacttcaaaaacttacacaagaagaaacaaactttaaaagtttggttcatgatctctttcaaaaagttgaagaagcaaagagctcattagcaatgaatcgaagtagggggaaagtccttgatgcaataattcaagaaaaaaaatctggcaggattccaggaatatatggaagattgggggacttaggagccattgatgaaaaatacgacgtggctatatcatcctgttgtcatgcactggactacattgttgttgattctattgatatagcccaagaatgtgtaaacttccttaaaagacaaaatattggagttgcaacctttataggtttagataagatggctgtatgggcgaaaaagatgaccgaaattcaaactcctgaaaatactcctcgtttatttgatttagtaaaagtaaaagatgagaaaattcgccaagctttttattttgctttacgagataccttagtagctgacaacttggatcaagccacaagagtagcatatcaaaaagatagaagatggagagtggtaactttacagggacaaatcatagaacagtcaggtacaatgactggtggtggaagcaaagtaatgaaaggaagaatgggttcctcacttgttattgaaatctctgaagaagaggtaaacaaaatggaatcacagttgcaaaacgactctaaaaaagcaatgcaaatccaagaacagaaagtacaacttgaagaaagagtagttaagttacggcatagtgaacgagaaatgaggaacacactagaaaaatttactgcaagcatccagcgtttaatagagcaagaagaatatttgaatgtccaagttaaggaacttgaagctaatgtacttgctacagcccctgacaaaaaaaagcagaaattgctagaagaaaacgttagtgctttcaaaacagaatatgatgctgtggctgagaaagctggtaaagtagaagctgaggttaaacgcttacacaataccatcgtagaaatcaataatcataaactcaaggcccaacaagacaaacttgataaaataaataagcaattagatgaatgtgcttctgctattactaaagcccaagtagcaatcaagactgctgacagaaaccttcaaaaggcacaagactctgtcttgcgtacagagaaagaaataaaagatactgagaaagaggtggatgacctaacagcagagctgaaaagtcttgaggacaaagcagcagaggtcgtaaagaatacaaatgctgcagaggaatccttaccagagatccagaaagaacatcgcaatctgcttcaagaattaaaagttattcaagaaaatgaacatgctcttcaaaaagatgcacttagtattaagttgaaacttgaacaaatagatggtcacattgctgaacataattctaaaataaaatattggcacaaagagatttcaaaaatatcactgcatcctatagaagataatcctattgaagagatttcggttctaagcccagaggatcttgaagcgatcaagaatccagattctataacaaatcaaattgcacttttggaagcccggtgtcatgaaatgaaaccaaacctcggtgccatcgcagagtataaaaagaaggaagaattgtatttgcaacgggtagcagaattggacaaaattacttatgaaagagacagttttagacaggcatatgaagatcttcggaaacaaaggcttaatgaatttatggcaggtttttatataataacaaataaattaaaggaaaattaccaaatgcttactttgggaggggacgccgaactcgagcttgtagacagcttggatcctttctctgaaggaatcatgttcagtgttcgaccacctaagaaaagttggaaaaagatcttcaacctttcgggaggagagaaaacacttagttcattggctttagtatttgctcttcaccactacaagcccactcccctttacttcatggatgagattgatgcagcccttgattttaaaaatgtgtccattgttgcattttatatatatgaacaaacaaaaaatgcacagttcataataatttctcttcgaaataatatgtttgagatttcggatagacttattggaatttacaagacatacaacataacaaaaagtgttgctgtaaatccaaaagaaattgcatctaagggactttgttgaactttatgctgaagattcttcaagttgattcagtgtattactgatttttttctatttgtaaaggattatgagttgtataaaatacatactccctaaactagatcatgaaactggtttctgttttatgcagttgtcatttgtaaagtctaataaaatattctctataattgcttctagattacaaaaatatgacaatcttgtaagtagcagactatggagaaaaatgagttacctggagggtcaggtaacttgccaaactaaaaagtatgttagttgaggcaaagtcctaagcaaggttgtgctatcaaggctcagcataccttcgtgggcctttgatttaccaacactggaaatgcctgccaactaatcttggatagattctttaaggcattccacttagcttgccagttgagacaatcaccacagttattacccaaatactatgaacatatttttgtaaaccagtcattctgaattatagtgatgagaatttaaatatatgcttttctagaatttgatgtttgaccatttatgacttaattaccagagagccagtaaattaggacagtgtttcaacaagcctaggctatctcgtaagttgaaaaatatcccactatagttgcttcatgagtatgaagtaagatggcctctgatttacactggttcaatttacaaattttcaactttatgataggtttatccgggtactaaatgcatttcaacttgatagtttcaacttatgataggtttaccaggatgtagtcccactgttgaggagcatctatttaggggttaattactttagtaataagtggaaagtaagataccttgagtaatgtttgcctataaaattgtcagcgtatttttacactattggctcaagaatgttataatgctaagggacataagttggcaaccacttggtttttggaaggactttcggtattgtattagaagtctgccctagctgttaaatttctgggtatttatcctaaggaattaattaaagagttaattgttcctttcttcagtgggccattgttttagatatttaaaaaatccaacagtttctatcataatgtaactgtaaaaatgtaaacacattattagcatggacttttaaataaagatttaaagaaagcaa

SEQ ID NO: 156722 - DNA, 2649 bp, Artificial Sequence
  derived and/or modified sequence
atgcccagagtgaagcccaagctggagaagcagctgcagaaggacaaggagaaggtggaggagttcaagagcatccccgccaagagcaacaacatcatcaacgagaccaccaccagaaacaacgccctggagaaggagaaggagaaggaggagaagaagctgaaggaggtgatggacagcctgaagcaggagacccagggcctgcagaaggagaaggagagcagagagaaggagctgatgggcttcagcaagagcgtgaacgaggccagaagcaagatggacgtggcccagagcgagctggacatctacctgagcagacacaacaccgccgtgagccagctgaccaaggccaaggaggccctgatcgccgccagcgagaccctgaaggagagaaaggccgccatcagagacatcgagggcaagctgccccagaccgagcaggagctgaaggagaaggagaaggagctgcagaagctgacccaggaggagaccaacttcaagagcctggtgcacgacctgttccagaaggtggaggaggccaagagcagcctggccatgaacagaagcagaggcaaggtgctggacgccatcatccaggagaagaagagcggcagaatccccggcatctacggcagactgggcgacctgggcgccatcgacgagaagtacgacgtggccatcagcagctgctgccacgccctggactacatcgtggtggacagcatcgacatcgcccaggagtgcgtgaacttcctgaagagacagaacatcggcgtggccaccttcatcggcctggacaagatggccgtgtgggccaagaagatgaccgagatccagacccccgagaacacccccagactgttcgacctggtgaaggtgaaggacgagaagatcagacaggccttctacttcgccctgagagacaccctggtggccgacaacctggaccaggccaccagagtggcctaccagaaggacagaagatggagagtggtgaccctgcagggccagatcatcgagcagagcggcaccatgaccggcggcggcagcaaggtgatgaagggcagaatgggcagcagcctggtgatcgagatcagcgaggaggaggtgaacaagatggagagccagctgcagaacgacagcaagaaggccatgcagatccaggagcagaaggtgcagctggaggagagagtggtgaagctgagacacagcgagagagagatgagaaacaccctggagaagttcaccgccagcatccagagactgatcgagcaggaggagtacctgaacgtgcaggtgaaggagctggaggccaacgtgctggccaccgcccccgacaagaagaagcagaagctgctggaggagaacgtgagcgccttcaagaccgagtacgacgccgtggccgagaaggccggcaaggtggaggccgaggtgaagagactgcacaacaccatcgtggagatcaacaaccacaagctgaaggcccagcaggacaagctggacaagatcaacaagcagctggacgagtgcgccagcgccatcaccaaggcccaggtggccatcaagaccgccgacagaaacctgcagaaggcccaggacagcgtgctgagaaccgagaaggagatcaaggacaccgagaaggaggtggacgacctgaccgccgagctgaagagcctggaggacaaggccgccgaggtggtgaagaacaccaacgccgccgaggagagcctgcccgagatccagaaggagcacagaaacctgctgcaggagctgaaggtgatccaggagaacgagcacgccctgcagaaggacgccctgagcatcaagctgaagctggagcagatcgacggccacatcgccgagcacaacagcaagatcaagtactggcacaaggagatcagcaagatcagcctgcaccccatcgaggacaaccccatcgaggagatcagcgtgctgagccccgaggacctggaggccatcaagaaccccgacagcatcaccaaccagatcgccctgctggaggccagatgccacgagatgaagcccaacctgggcgccatcgccgagtacaagaagaaggaggagctgtacctgcagagagtggccgagctggacaagatcacctacgagagagacagcttcagacaggcctacgaggacctgagaaagcagagactgaacgagttcatggccggcttctacatcatcaccaacaagctgaaggagaactaccagatgctgaccctgggcggcgacgccgagctggagctggtggacagcctggaccccttcagcgagggcatcatgttcagcgtgagaccccccaagaagagctggaagaagatcttcaacctgagcggcggcgagaagaccctgagcagcctggccctggtgttcgccctgcaccactacaagcccacccccctgtacttcatggacgagatcgacgccgccctggacttcaagaacgtgagcatcgtggccttctacatctacgagcagaccaagaacgcccagttcatcatcatcagcctgagaaacaacatgttcgagatcagcgacagactgatcggcatctacaagacctacaacatcaccaagagcgtggccgtgaaccccaaggagatcgccagcaagggcctgtgctag

SEQ ID NO: 156723 - DNA, 5471 bp, Artificial Sequence
  derived and/or modified sequence
gccctcttctgaagaggcgtttctggaccactgagccccgcctcccactgtgagcggaaccctaccgtttttaaaaaaatctttttcaaaacttgccaggttgtctttccaaatatttttaataatagtgctgctgctgtagaccacagagaaaagaatccctcgctcttccttttcacttagtagaaacttctaccgcgtaggtcccgccaggagttcgcgcatgcgcaggagcgacaataagatggcggtgataatcgccgcactttttttcaaattagtggatcccagaaatcattgcgcgcatttgtaacgaatttccgttcgagtttgtattttaggcgccattttcgagtgaaggacccggagccgaaacaccggtaggagcggggaggtgggtactacacaaccgtctccagccttggtctgagtggactgtcctgcagcgaccatgccccgtaaaggcacccagccctccactgcccggcgcagagaggaagggccgccgccgccgtcccctgacggcgccagcagcgacgcggagcctgagccgccgtccggccgcacggagagcccagccaccgccgcagagactgcaagtgaggaacttgataatagaagtttagaagagattttgaacagcattcctcctcccccgcctccagcaatgaccaatgaagctggagctcctcggcttatgataactcatattgtaaaccagaacttcaaatcctatgctggggagaaaattctgggacctttccataagcgcttttcctgtattatcgggccaaatggcagtggcaaatccaatgttattgattctatgctttttgtgtttggctatcgagcacaaaaaataagatctaaaaaactctcagtattaatacataattctgatgaacacaaggacattcagagttgtacagtagaagttcattttcaaaagataattgataaggaaggggatgattatgaagtcattcctaacagtaatttctatgtatccagaacggcctgcagagataatacttctgtctatcacataagtggaaagaaaaagacatttaaggatgttggaaatcttcttcgaagccatggaattgacttggaccataatagatttttaattttacagggtgaagttgaacaaattgctatgatgaaaccaaaaggccagactgaacacgatgagggtatgcttgaatatttagaagatataattggttgtggacggctaaatgaacctattaaagtcttgtgtcggagagttgaaatattaaatgaacacagaggagagaagttaaacagggtaaagatggtggaaaaggaaaaggatgccttagaaggagagaaaaacatagctatcgaatttcttaccttggaaaatgaaatatttagaaaaaagaatcatgtttgtcaatattatatttatgagttgcagaaacgaattgctgaaatggaaactcaaaaggaaaaaattcatgaagataccaaagaaattaatgagaagagcaatatactatcaaatgaaatgaaagctaagaataaagatgtaaaagatacagaaaagaaactgaataaaattacaaaatttattgaggagaataaagaaaaatttacacagctagatttggaagatgttcaagttagagaaaagttaaaacatgccacgagtaaagccaaaaaactggagaaacaacttcaaaaagataaagaaaaggttgaagaatttaaaagtatacctgccaagagtaacaatatcattaatgaaacaacaaccagaaacaatgccctcgagaaggaaaaagagaaagaagaaaaaaaattaaaggaagttatggatagccttaaacaggaaacacaagggcttcagaaagaaaaagaaagtcgagagaaagaacttatgggtttcagcaaatcggtaaatgaagcacgttcaaagatggatgtagcccagtcagaacttgatatctatctcagtcgtcataatactgcagtgtctcaattaactaaggctaaggaagctctaattgcagcttctgagactctcaaagaaaggaaagctgcaatcagagatatagaaggaaaactccctcaaactgaacaagaattaaaggagaaagaaaaagaacttcaaaaacttacacaagaagaaacaaactttaaaagtttggttcatgatctctttcaaaaagttgaagaagcaaagagctcattagcaatgaatcgaagtagggggaaagtccttgatgcaataattcaagaaaaaaaatctggcaggattccaggaatatatggaagattgggggacttaggagccattgatgaaaaatacgacgtggctatatcatcctgttgtcatgcactggactacattgttgttgattctattgatatagcccaagaatgtgtaaacttccttaaaagacaaaatattggagttgcaacctttataggtttagataagatggctgtatgggcgaaaaagatgaccgaaattcaaactcctgaaaatactcctcgtttatttgatttagtaaaagtaaaagatgagaaaattcgccaagctttttattttgctttacgagataccttagtagctgacaacttggatcaagccacaagagtagcatatcaaaaagatagaagatggagagtggtaactttacagggacaaatcatagaacagtcaggtacaatgactggtggtggaagcaaagtaatgaaaggaagaatgggttcctcacttgttattgaaatctctgaagaagaggtaaacaaaatggaatcacagttgcaaaacgactctaaaaaagcaatgcaaatccaagaacagaaagtacaacttgaagaaagagtagttaagttacggcatagtgaacgagaaatgaggaacacactagaaaaatttactgcaagcatccagcgtttaatagagcaagaagaatatttgaatgtccaagttaaggaacttgaagctaatgtacttgctacagcccctgacaaaaaaaagcagaaattgctagaagaaaacgttagtgctttcaaaacagaatatgatgctgtggctgagaaagctggtaaagtagaagctgaggttaaacgcttacacaataccatcgtagaaatcaataatcataaactcaaggcccaacaagacaaacttgataaaataaataagcaattagatgaatgtgcttctgctattactaaagcccaagtagcaatcaagactgctgacagaaaccttcaaaaggcacaagactctgtcttgcgtacagagaaagaaataaaagatactgagaaagaggtggatgacctaacagcagagctgaaaagtcttgaggacaaagcagcagaggtcgtaaagaatacaaatgctgcagaggaatccttaccagagatccagaaagaacatcgcaatctgcttcaagaattaaaagttattcaagaaaatgaacatgctcttcaaaaagatgcacttagtattaagttgaaacttgaacaaatagatggtcacattgctgaacataattctaaaataaaatattggcacaaagagatttcaaaaatatcactgcatcctatagaagataatcctattgaagagatttcggttctaagcccagaggatcttgaagcgatcaagaatccagattctataacaaatcaaattgcacttttggaagcccggtgtcatgaaatgaaaccaaacctcggtgccatcgcagagtataaaaagaaggaagaattgtatttgcaacgggtagcagaattggacaaaattacttatgaaagagacagttttagacaggcatatgaagatcttcggaaacaaaggcttaatgaatttatggcaggtttttatataataacaaataaattaaaggaaaattaccaaatgcttactttgggaggggacgccgaactcgagcttgtagacagcttggatcctttctctgaaggaatcatgttcagtgttcgaccacctaagaaaagttggaaaaagatcttcaacctttcgggaggagagaaaacacttagttcattggctttagtatttgctcttcaccactacaagcccactcccctttacttcatggatgagattgatgcagcccttgattttaaaaatgtgtccattgttgcattttatatatatgaacaaacaaaaaatgcacagttcataataatttctcttcgaaataatatgtttgagatttcggatagacttattggaatttacaagacatacaacataacaaaaagtgttgctgtaaatccaaaagaaattgcatctaagggactttgttgaactttatgctgaagattcttcaagttgattcagtgtattactgatttttttctatttgtaaaggattatgagttgtataaaatacatactccctaaactagatcatgaaactggtttctgttttatgcagttgtcatttgtaaagtctaataaaatattctctataattgcttctagattacaaaaatatgacaatcttgtaagtagcagactatggagaaaaatgagttacctggagggtcaggtaacttgccaaactaaaaagtatgttagttgaggcaaagtcctaagcaaggttgtgctatcaaggctcagcataccttcgtgggcctttgatttaccaacactggaaatgcctgccaactaatcttggatagattctttaaggcattccacttagcttgccagttgagacaatcaccacagttattacccaaatactatgaacatatttttgtaaaccagtcattctgaattatagtgatgagaatttaaatatatgcttttctagaatttgatgtttgaccatttatgacttaattaccagagagccagtaaattaggacagtgtttcaacaagcctaggctatctcgtaagttgaaaaatatcccactatagttgcttcatgagtatgaagtaagatggcctctgatttacactggttcaatttacaaattttcaactttatgataggtttatccgggtactaaatgcatttcaacttgatagtttcaacttatgataggtttaccaggatgtagtcccactgttgaggagcatctatttaggggttaattactttagtaataagtggaaagtaagataccttgagtaatgtttgcctataaaattgtcagcgtatttttacactattggctcaagaatgttataatgctaagggacataagttggcaaccacttggtttttggaaggactttcggtattgtattagaagtctgccctagctgttaaatttctgggtatttatcctaaggaattaattaaagagttaattgttcctttcttcagtgggccattgttttagatatttaaaaaatccaacagtttctatcataatgtaactgtaaaaatgtaaacacattattagcatggacttttaaataaagatttaaagaaagcaagatcggaaa

SEQ ID NO: 156724 - DNA, 3867 bp, Artificial Sequence
  derived and/or modified sequence
atgcctcgtaaggggacgcagcccagtactgccagacgaagggaagagggcccaccccccccaagtccagatggcgcctcgtccgacgccgaacccgaaccaccttcaggccgtactgagtccccggctacagcggcagaaacagcttcagaggagttggataaccgctccttggaagaaatccttaactccattcctcccccccctcctcctgccatgacaaacgaagccggagcccccagactcatgatcacgcatattgtgaatcagaacttcaaatcctatgcaggggagaagatcctcgggccgtttcacaaacgctttagctgtattattggtccaaacggctcagggaaatcaaatgtaattgatagcatgctctttgtgttcggctaccgcgcccaaaaaatccgatctaaaaaactgtccgtcctgatccataactctgacgagcacaaagacatacagtcctgcacagttgaagtacactttcaaaagattatcgataaggagggagatgactatgaagtgatcccaaactccaatttttacgtctcaaggactgcgtgtcgcgataatacatctgtttaccacatctcgggtaagaaaaagacttttaaagacgtgggaaatctgttgcgctcacacgggatcgacttggaccataacagattcttgattctccagggggaggtagagcaaatcgccatgatgaaaccaaagggccagaccgaacacgatgaaggtatgctggagtatctggaggatattataggctgcggccggttaaacgagccgataaaggtcctgtgcagaagagtcgagattcttaacgaacaccggggcgagaagctgaatcgagttaaaatggtagagaaagagaaggacgccctcgagggtgaaaagaacattgcaatcgagtttctgacgctggagaacgagattttcagaaagaagaaccatgtgtgccagtattatatatatgaactgcagaaacggatcgccgagatggagacccaaaaagaaaagatccacgaagatactaaggaaattaacgagaagagcaatattctgtccaatgagatgaaggccaaaaacaaagacgtaaaggacaccgaaaaaaagctcaacaaaataacgaagttcattgaggagaacaaggaaaaatttactcaactagacctagaagacgtgcaggtccgtgagaagcttaagcacgcaacatccaaagcaaaaaagctggaaaagcaactacagaaggacaaagagaaagtagaagaatttaaatcaattccagccaaaagcaataacatcatcaacgaaaccacgacaagaaacaacgccctggaaaaagagaaagagaaggaagagaaaaagctcaaagaagtaatggatagtcttaagcaggaaacacaaggcctgcagaaggagaaagaatccagggagaaagagttaatgggattttccaaatcggtgaacgaggctcgcagtaagatggatgtggctcagtccgaactcgacatctatctctctcgccacaacacagcagttagccagctgacgaaggcaaaagaggcattgatagctgctagtgagacacttaaggaaagaaaagctgccatcagagatatcgaaggtaagctgcctcagaccgagcaggagctgaaagagaaggaaaaggaacttcaaaaactgacacaggaagagactaacttcaagtctctggtccatgacttgttccagaaggtcgaggaagctaaatcaagcctagcaatgaacaggtcccggggaaaagtgctcgatgcaatcattcaggaaaagaagagtggccgaattcccggcatttacggtcgattaggcgacctcggagccattgatgaaaaatatgacgtggcgatctcctcttgctgtcacgcactggattacattgtcgtggactccatcgacattgcccaagagtgtgtaaactttttgaaaagacagaacattggcgttgccactttcattggcctcgacaaaatggccgtctgggcgaagaaaatgactgaaatacaaacacccgagaacacaccaaggctgttcgatctagtgaaggtcaaggatgagaagatcaggcaggccttctactttgccctccgcgacaccctggtggcggacaatctggaccaggccacccgggtcgcatatcagaaggatcggaggtggcgcgtcgtcacactccaggggcagatcatcgagcagagcggaaccatgacaggggggggatcgaaggtgatgaaaggtaggatggggtcgtcactggtcatagagattagcgaggaggaggtcaataagatggagagccagctgcagaatgactcaaaaaaggcaatgcagatccaagagcagaaggtccaactcgaggaaagggtggttaaactgaggcactccgagcgcgagatgaggaacacgctggagaagtttacggcctctatacagaggcttattgagcaagaagaatacctgaatgtgcaggtcaaggaactggaagcgaatgtattggccaccgcacccgataagaagaagcaaaagctgcttgaggaaaacgtctcagctttcaaaacagaatacgatgccgtggcagagaaggccggaaaggtggaagcggaggtaaagcggctgcacaataccatcgtcgaaataaacaatcataaactgaaagcccagcaggataagttggacaaaatcaacaagcaactggatgagtgcgcaagtgccatcactaaggcccaagtggccatcaagacagcagatcgaaaccttcaaaaggcgcaggatagtgtgctcagaacagagaaggagatcaaagacactgagaaggaggtggacgaccttacagctgagctgaaatccttggaggacaaggctgcggaggtagtaaagaacactaatgcggctgaggagtcacttcccgagattcagaaggaacatagaaacttgctccaggaactgaaagtgattcaggagaacgagcatgctctacagaaggatgcattgtccataaagctgaagctcgagcagattgatggccacattgcagagcataactcaaaaatcaagtactggcacaaggagatcagcaagatctcacttcacccgattgaagataatccaatcgaggagatcagcgtcctgtcccctgaggacttggaagcaatcaagaatccggacagcattaccaaccaaattgcacttctcgaggctcgatgccatgagatgaagcccaacctgggtgcaatcgccgagtacaagaagaaggaggagctctatctccagcgcgtggccgaactggacaaaatcacatacgagagagactccttccgtcaggcctacgaggatctgcgcaagcagagactcaacgagttcatggctggcttctacatcattacaaataagcttaaagaaaactaccagatgctcaccctcggcggagatgccgagttggagctcgtcgactcactggacccgttttctgagggcatcatgttctcagtgaggcccccaaaaaagtcctggaagaaaatcttcaacctcagtgggggagagaagaccctctcttctctagccctcgttttcgctctgcaccactataaaccaacgcctctttacttcatggacgaaattgacgcagccttggacttcaaaaatgtttccatcgtagctttctacatttacgagcagacaaaaaacgctcagttcatcattatttcactgcggaacaacatgttcgagatttccgaccggctgattgggatttacaagacctacaacattactaaatctgttgctgtgaacccaaaggagatcgctagcaagggtctttgttag

SEQ ID NO: 156725 - DNA, 4948 bp, Artificial Sequence
  derived and/or modified sequence
taggcgccattttcgagtgaaggacccggagccgaaacaccggtaggagcggggaggtgggtactacacaaccgtctccagccttggtctgagtggactgtcctgcagcgaccatgccccgtaaaggcacccagccctccactgcccggcgcagagaggaagggccgccgccgccgtcccctgacggcgccagcagcgacgcggagcctgagccgccgtccggccgcacggagagcccagccaccgccgcagagactgcaagtgaggaacttgataatagaagtttagaagagattttgaacagcattcctcctcccccgcctccagcaatgaccaatgaagctggagctcctcggcttatgataactcatattgtaaaccagaacttcaaatcctatgctggggagaaaattctgggacctttccataagcgcttttcctgtattatcgggccaaatggcagtggcaaatccaatgttattgattctatgctttttgtgtttggctatcgagcacaaaaaataagatctaaaaaactctcagtattaatacataattctgatgaacacaaggacattcagagttgtacagtagaagttcattttcaaaagataattgataaggaaggggatgattatgaagtcattcctaacagtaatttctatgtatccagaacggcctgcagagataatacttctgtctatcacataagtggaaagaaaaagacatttaaggatgttggaaatcttcttcgaagccatggaattgacttggaccataatagatttttaattttacagggtgaagttgaacaaattgctatgatgaaaccaaaaggccagactgaacacgatgagggtatgcttgaatatttagaagatataattggttgtggacggctaaatgaacctattaaagtcttgtgtcggagagttgaaatattaaatgaacacagaggagagaagttaaacagggtaaagatggtggaaaaggaaaaggatgccttagaaggagagaaaaacatagctatcgaatttcttaccttggaaaatgaaatatttagaaaaaagaatcatgtttgtcaatattatatttatgagttgcagaaacgaattgctgaaatggaaactcaaaaggaaaaaattcatgaagataccaaagaaattaatgagaagagcaatatactatcaaatgaaatgaaagctaagaataaagatgtaaaagatacagaaaagaaactgaataaaattacaaaatttattgaggagaataaagaaaaatttacacagctagatttggaagatgttcaagttagagaaaagttaaaacatgccacgagtaaagccaaaaaactggagaaacaacttcaaaaagataaagaaaaggttgaagaatttaaaagtatacctgccaagagtaacaatatcattaatgaaacaacaaccagaaacaatgccctcgagaaggaaaaagagaaagaagaaaaaaaattaaaggaagttatggatagccttaaacaggaaacacaagggcttcagaaagaaaaagaaagtcgagagaaagaacttatgggtttcagcaaatcggtaaatgaagcacgttcaaagatggatgtagcccagtcagaacttgatatctatctcagtcgtcataatactgcagtgtctcaattaactaaggctaaggaagctctaattgcagcttctgagactctcaaagaaaggaaagctgcaatcagagatatagaaggaaaactccctcaaactgaacaagaattaaaggagaaagaaaaagaacttcaaaaacttacacaagaagaaacaaactttaaaagtttggttcatgatctctttcaaaaagttgaagaagcaaagagctcattagcaatgaatcgaagtagggggaaagtccttgatgcaataattcaagaaaaaaaatctggcaggattccaggaatatatggaagattgggggacttaggagccattgatgaaaaatacgacgtggctatatcatcctgttgtcatgcactggactacattgttgttgattctattgatatagcccaagaatgtgtaaacttccttaaaagacaaaatattggagttgcaacctttataggtttagataagatggctgtatgggcgaaaaagatgaccgaaattcaaactcctgaaaatactcctcgtttatttgatttagtaaaagtaaaagatgagaaaattcgccaagctttttattttgctttacgagataccttagtagctgacaacttggatcaagccacaagagtagcatatcaaaaagatagaagatggagagtggtaactttacagggacaaatcatagaacagtcaggtacaatgactggtggtggaagcaaagtaatgaaaggaagaatgggttcctcacttgttattgaaatctctgaagaagaggtaaacaaaatggaatcacagttgcaaaacgactctaaaaaagcaatgcaaatccaagaacagaaagtacaacttgaagaaagagtagttaagttacggcatagtgaacgagaaatgaggaacacactagaaaaatttactgcaagcatccagcgtttaatagagcaagaagaatatttgaatgtccaagttaaggaacttgaagctaatgtacttgctacagcccctgacaaaaaaaagcagaaattgctagaagaaaacgttagtgctttcaaaacagaatatgatgctgtggctgagaaagctggtaaagtagaagctgaggttaaacgcttacacaataccatcgtagaaatcaataatcataaactcaaggcccaacaagacaaacttgataaaataaataagcaattagatgaatgtgcttctgctattactaaagcccaagtagcaatcaagactgctgacagaaaccttcaaaaggcacaagactctgtcttgcgtacagagaaagaaataaaagatactgagaaagaggtggatgacctaacagcagagctgaaaagtcttgaggacaaagcagcagaggtcgtaaagaatacaaatgctgcagagatttcaaaaatatcactgcatcctatagaagataatcctattgaagagatttcggttctaagcccagaggatcttgaagcgatcaagaatccagattctataacaaatcaaattgcacttttggaagcccggtgtcatgaaatgaaaccaaacctcggtgccatcgcagagtataaaaagaaggaagaattgtatttgcaacgggtagcagaattggacaaaattacttatgaaagagacagttttagacaggcatatgaagatcttcggaaacaaaggcttaatgaatttatggcaggtttttatataataacaaataaattaaaggaaaattaccaaatgcttactttgggaggggacgccgaactcgagcttgtagacagcttggatcctttctctgaaggaatcatgttcagtgttcgaccacctaagaaaagttggaaaaagatcttcaacctttcgggaggagagaaaacacttagttcattggctttagtatttgctcttcaccactacaagcccactcccctttacttcatggatgagattgatgcagcccttgattttaaaaatgtgtccattgttgcattttatatatatgaacaaacaaaaaatgcacagttcataataatttctcttcgaaataatatgtttgagatttcggatagacttattggaatttacaagacatacaacataacaaaaagtgttgctgtaaatccaaaagaaattgcatctaagggactttgttgaactttatgctgaagattcttcaagttgattcagtgtattactgatttttttctatttgtaaaggattatgagttgtataaaatacatactccctaaactagatcatgaaactggtttctgttttatgcagttgtcatttgtaaagtctaataaaatattctctataattgcttctagattacaaaaatatgacaatcttgtaagtagcagactatggagaaaaatgagttacctggagggtcaggtaacttgccaaactaaaaagtatgttagttgaggcaaagtcctaagcaaggttgtgctatcaaggctcagcataccttcgtgggcctttgatttaccaacactggaaatgcctgccaactaatcttggatagattctttaaggcattccacttagcttgccagttgagacaatcaccacagttattacccaaatactatgaacatatttttgtaaaccagtcattctgaattatagtgatgagaatttaaatatatgcttttctagaatttgatgtttgaccatttatgacttaattaccagagagccagtaaattaggacagtgtttcaacaagcctaggctatctcgtaagttgaaaaatatcccactatagttgcttcatgagtatgaagtaagatggcctctgatttacactggttcaatttacaaattttcaactttatgataggtttatccgggtactaaatgcatttcaacttgatagtttcaacttatgataggtttaccaggatgtagtcccactgttgaggagcatctatttaggggttaattactttagtaataagtggaaagtaagataccttgagtaatgtttgcctataaaattgtcagcgtatttttacactattggctcaagaatgttataatgctaagggacataagttggcaaccacttggtttttggaaggactttcggtattgtattagaagtctgccctagctgttaaatttctgggtatttatcctaaggaattaattaaagagttaattgttcctttcttcagtgggccattgttttagatatttaaaaaatccaacagtttctatcataatgtaactgtaaaaatgtaaacacattattagcatggacttttaaataaagatttaaagaaagc

SEQ ID NO: 156726 - DNA, 3867 bp, Artificial Sequence
  derived and/or modified sequence
atgccacgcaagggcacccaaccctctacagcaagaagaagggaagaagggcctccgcctccttcccccgatggggccagctctgatgccgagcctgaaccgccttcggggcgaactgaatccccagcaacagcagccgaaacggcaagcgaggagcttgataataggtccctagaggaaattttgaattctatccctccacccccaccacccgctatgaccaacgaggctggcgctccgcgactgatgatcacccatatagtgaatcaaaactttaagagttacgccggcgaaaagattctcgggccctttcataaaaggttcagttgtattataggtcctaacggatcaggtaaaagtaatgtcatcgactcaatgctgtttgttttcgggtacagggcacaaaagatcagatctaaaaagctctccgtccttatccataatagcgacgagcacaaagacatccagagctgtaccgtggaggttcatttccagaaaatcatagataaggagggtgatgactacgaggtgatccccaattctaacttttatgtgtctaggaccgcatgccgcgataacacaagcgtctaccatatttccggaaaaaagaaaactttcaaggatgtcggcaatctgttgaggtcccatgggatcgatctagatcataacagatttctgattctgcagggcgaggtcgagcagatcgccatgatgaagcccaaaggacagactgaacacgacgaggggatgttggaatatctcgaagatataatcggttgtggtagacttaacgagcctatcaaggttctttgtcggcgagtggaaattctcaatgagcaccgtggcgaaaagttgaatagggtcaagatggtcgaaaaggagaaagatgctcttgagggggagaaaaacattgccattgaattcttgacactcgaaaacgaaatttttcggaaaaaaaatcacgtgtgtcagtattacatttacgagctgcagaaaagaatcgcagagatggaaacacagaaggaaaagatccacgaagatactaaagaaatcaatgaaaagtcaaacatcctctccaacgaaatgaaggcaaaaaataaggatgtaaaagacactgagaagaaactgaataagattacgaagttcatcgaagaaaacaaagaaaagttcacacagcttgatctcgaggatgtgcaggtaagggagaaacttaaacacgccacaagcaaagcgaaaaaactggaaaagcagctgcagaaagataaagaaaaggtcgaagaattcaaatccatcccagccaagtctaacaacatcatcaacgaaaccacaacacgaaacaatgcacttgagaaggagaaagagaaggaagaaaagaagcttaaagaggtgatggattcactgaaacaggaaactcaggggttacagaaagagaaagagagccgcgaaaaggaacttatgggtttctcaaaatctgtcaatgaagcccgatcgaaaatggacgttgcccagagtgagctcgatatttacctgtcccgtcataacaccgccgtttcccagttaacaaaggcaaaggaggcactaatcgccgcctctgaaactctaaaagagcggaaagctgccatcagggacatcgagggcaaattgcctcagaccgagcaagaacttaaagaaaaggaaaaggagctccagaagctcacgcaggaagagacaaatttcaaatccttggtccatgacttatttcagaaggtggaggaggctaagagctctctagctatgaacagatcccgggggaaggtactcgacgccatcattcaagagaagaagtctggcagaattcccggcatctatgggcggctaggagatctcggggcaatagacgaaaagtacgatgtggcaatatccagttgctgccatgccttggactacattgtcgtggactcaatcgacatagcccaagagtgtgtcaattttctgaaacgtcagaatatcggcgtagctacattcataggccttgataagatggccgtctgggctaaaaaaatgaccgagatacaaacacctgagaatacaccccgcctctttgacttagtaaaggtgaaggacgaaaagatccgtcaggctttttacttcgctctgcgcgacactctagttgcagataacctcgatcaagcaaccagagtagcttaccagaaggatcgtagatggcgggtggtaaccctgcagggccagattatcgagcaaagcggcaccatgacgggcggggggtccaaggtcatgaaggggcgcatggggagttctcttgtgatagaaatttcagaggaggaggtgaacaagatggaatcccagttacagaacgattcaaaaaaggcgatgcagatccaagagcaaaaagttcagttggaagagcgggtggtcaagctacgtcattctgaacgggaaatgagaaacactctggagaagttcactgcatctattcagaggctgatcgaacaggaggaatatctaaatgtgcaggtgaaggagttggaggccaatgtgctggccaccgctcctgacaaaaagaaacagaagttgcttgaggagaacgtttctgcattcaagaccgagtatgacgccgtcgccgaaaaagcagggaaagtagaggcagaagttaagcgcctacacaacacaatcgtggaaattaataaccataagcttaaggcacagcaggataaactggacaagattaataagcaactcgacgagtgcgccagtgccataactaaagcccaggtcgctatcaaaaccgcagataggaatttgcagaaagcccaggatagtgtattaaggactgagaaagagattaaggatacagaaaaggaagtggacgatctgacagctgaattaaagtctcttgaagataaggctgccgaagtcgtgaaaaatactaatgctgccgaagagtcccttcccgaaatacagaaggagcacaggaatttgctacaagagctgaaggtcattcaggagaacgagcacgcactgcaaaaagatgccctgtcaatcaaactgaaactagagcaaatcgatgggcacatcgcagagcataattctaagatcaagtactggcacaaagagatctcgaaaatatctctgcaccctattgaggacaatcccatcgaagagatctccgtgctcagccccgaggaccttgaagccatcaagaatcccgattcaatcactaatcagattgcattactggaggctcgatgtcatgagatgaagcctaatctgggcgctatcgcggagtataagaagaaagaggaactgtacctacagagggtagccgagttggataagatcacttacgagcgggattcctttcgacaggcttacgaggatcttaggaagcaacggctgaacgagtttatggccgggttctacatcatcacgaataagctcaaggagaactaccagatgctcactctaggcggagatgccgagctggaactggtggatagtcttgatcctttcagcgaaggaattatgttcagcgtgcggccccctaagaagtcatggaagaagatctttaatctctcagggggtgagaagaccttatcaagcctggcactcgtctttgctctccaccattacaagccaacccccttgtacttcatggacgaaatcgatgccgcccttgatttcaaaaatgtttcaatagtggcattctacatttatgaacagacgaaaaatgcacagtttatcatcatctcgctgagaaataacatgtttgagatttccgacagactgattggtatatacaagacttataatataacgaaatcagtcgccgtcaatcccaaggagatcgctagcaaggggctgtgctag

SEQ ID NO: 156727 - DNA, 3693 bp, Artificial Sequence
  derived and/or modified sequence
atgccaagaaaaggaacgcagccttctactgcgaggagaagagaagaggggccaccccccccttctccagacggcgcctccagcgatgccgagcccgaacctcccagtgggcgaactgaatcacccgccaccgcggccgagacagcatcagaggaactggacaacagatctctggaagagatattaaattctatccccccccccccaccccccgcaatgaccaacgaggccggcgctcctagattaatgattacccatatcgtcaaccagaacttcaagagctacgctggggagaagatactcgggccgtttcacaagaggttcagctgcattatcggacccaatgggagtggaaagtccaatgtgattgattcgatgctgttcgtctttggctacagagctcaaaaaatcagatcaaaaaaactgtctgtactgatacataatagcgatgagcacaaggacatccagagctgcacggtagaagtgcacttccagaagattatcgacaaagaaggggatgactatgaagtgatcccaaacagcaacttttacgtcagcagaactgcatgtagggataatacgagtgtgtatcacatctctgggaaaaagaaaactttcaaggacgttggcaacctcctcagaagccatggcatcgatctcgatcacaatcgatttctgatcctgcagggcgaagtggagcagatagccatgatgaagcctaaaggacagaccgaacatgacgaaggtatgctggagtacctggaggatattattggatgtggtcggctgaacgaacccattaaggtgctctgcagacgagtggagatcctgaatgagcaccggggcgagaaattaaacagagtgaagatggttgaaaaagaaaaagacgccctggaaggcgaaaagaacattgccatcgagttcctcaccctggagaatgaaattttccggaaaaagaaccacgtgtgccaatactacatttatgaactgcaaaagcgcatcgcggaaatggaaacccaaaaggagaaaatccatgaagatactaaggaaattaatgaaaaatctaatatacttagtaatgagatgaaagccaagaacaaagatgtcaaagatacggagaaaaaactcaacaaaattacaaagtttatcgaagaaaacaaagaaaagttcacccagctcgacctagaagacgtgcaggtccgcgaaaaactcaagcacgcgacctctaaggctaagaaactcgagaaacagcttcagaaggataaagagaaggtagaagagttcaagtcaataccggcgaagtccaataacataatcaacgagacaaccactcgtaacaacgccctggagaaggaaaaggagaaggaagagaagaagctaaaggaagttatggattccctcaagcaagagacacaaggacttcagaaggaaaaggagagccgcgagaaagaattgatgggatttagcaagtctgtgaatgaggcgagaagcaagatggacgtcgcacagtccgaactcgacatctacctatcgaggcataataccgctgtgtcccagctgaccaaagctaaagaagcactgatcgcagcttctgagacattgaaagagaggaaggcagccattcgggacattgaaggaaagctgccccagactgagcaggagctgaaagaaaaggagaaggagttgcaaaaactgacccaggaagaaacaaattttaagagccttgtacatgatctctttcagaaggtggaggaggccaagtcctctttagctatgaatcggtcacggggcaaggttttagatgcgatcattcaggaaaagaagtcaggacgaattccgggtatctacggccgcctgggcgatcttggagcaatagatgagaaatacgacgtcgccattagtagttgctgtcacgctctcgattacatcgtggttgactccatcgatatagcccaagagtgtgtaaatttcttgaagaggcagaacatcggcgtggcgacttttattgggctggacaagatggcagtttgggccaaaaagatgaccgaaatccagacccctgaaaatacacccaggctgttcgacctggtcaaagttaaggatgaaaagataagacaggctttctattttgcccttagagacaccctagttgcagacaacttagaccaggccactcgtgtagcttatcaaaaggacagaaggtggagagttgtgacactgcagggccagatcatagaacagtccggcacaatgaccggtggcggctcaaaggtgatgaaaggcaggatgggttcaagtctggtcatagagattagcgaggaagaagtgaataaaatggagtcacaactgcagaacgacagcaagaaggctatgcagatccaggaacaaaaagtccagctggaagaaagagtcgtgaagctgcggcattcagagagggagatgagaaacacattggaaaagtttaccgcgagcattcagaggctaattgaacaagaggaatatctgaacgtccaggtgaaggagctcgaggcaaacgttctggccactgcccccgataaaaagaaacagaaactgctggaggagaatgtttcggcattcaaaaccgaatacgatgccgtggcagaaaaagcaggaaaagtcgaggcagaagtcaagcgattacataacacaatcgtggagatcaataaccacaaacttaaggcccagcaagataagcttgacaaaatcaataagcagctggatgaatgtgcctctgccatcactaaagctcaagtggccattaagactgccgaccgaaacctgcagaaagcccaggattccgtcctaagaaccgagaaggagattaaagacacagagaaggaggtggatgatttaaccgccgagctaaagtcattagaagataaagccgctgaggtggtcaagaatactaatgccgcagagattagcaaaatctccttacatcccattgaagacaacccaatcgaggaaatttccgtgttgtcacccgaggatctggaggcaatcaagaaccctgattccataacaaatcagattgcactcctagaagcgagatgccacgagatgaagcctaacctgggcgccatcgccgagtacaagaagaaggaggagctctatctgcagcgcgtcgcggaactggataaaataacctacgaaagggattccttccgccaagcgtacgaggacttacggaagcagaggctgaacgagttcatggccggattttacataattactaacaagctgaaggaaaattatcagatgttaaccctgggcggtgacgccgaattggaacttgtggactcgctggaccccttttccgaggggatcatgttctctgtgcggcccccaaagaaatcttggaaaaagatctttaatctgtccgggggggaaaaaactcttagcagccttgcactcgtcttcgcactccaccactataaacccacacccctctactttatggatgaaatcgatgctgccttagacttcaaaaacgtatctatcgtggcattctatatctatgagcagacgaagaatgctcagtttatcattatctccttgcggaacaacatgttcgagatatctgacagactcatcgggatctacaagacctataatatcaccaaaagtgtagccgtgaaccccaaagaaatagctagcaagggtttatgttag

SEQ ID NO: 156728 - DNA, 3693 bp, Artificial Sequence
  derived and/or modified sequence
atgcctcgaaaggggacgcagccctctactgcccgcaggagggaagaaggccctcctcctccttctccagatggggccagctctgatgctgaaccagaacctcccagcggccggaccgaaagtcccgccactgcggcggagactgccagcgaagagcttgataatcgaagcctggaggagattttgaactcaataccacccccacctccaccagcaatgactaacgaagctggggccccccgtcttatgattacacacatcgtcaaccagaactttaagagctatgcaggggagaaaattctgggccctttccacaagcgattcagctgtattattgggcccaatggctctggcaagagcaacgtgatcgactctatgctctttgtatttggctaccgcgcccagaagatcaggtccaagaaactgtccgtcctgattcataattccgacgagcataaggacatccagtcatgcaccgtggaggtacacttccagaaaattattgacaaggagggggatgactacgaggtgattccaaattctaatttctacgtttcaagaacagcctgcagagataacacatccgtctaccacatctccggaaagaagaagaccttcaaagacgtcggcaatctcctgaggagtcacggtatcgatcttgaccacaataggttcctgatcctgcagggcgaggtggagcaaattgccatgatgaagccgaaaggccagactgagcatgacgaaggcatgctggaatacctggaggacattattggatgtggaagattgaacgaaccaatcaaggtactatgcagacgagtagagatcctgaacgagcaccgaggcgagaaactgaaccgggtcaagatggtagagaaagaaaaagatgccctggagggagagaaaaacatcgcaatcgagtttcttacattggagaatgaaatcttcaggaagaagaaccacgtgtgccagtactacatctacgaactgcagaagagaattgctgagatggagacacagaaagagaaaattcatgaggatacaaaggaaattaacgaaaagagcaacatactgtccaatgagatgaaagccaagaacaaagatgtcaaggacacagaaaaaaagctgaacaagatcacgaaatttatcgaagagaataaagagaagttcacacagctcgatctggaggatgttcaagtccgggagaaacttaaacacgccacgtcaaaagctaaaaagttagaaaagcagctacagaaggacaaagagaaggtggaggagttcaaaagcatacccgccaaatccaataacattatcaatgaaacaaccactcggaacaatgctcttgagaaggaaaaagagaaggaagaaaaaaagctgaaggaggtaatggatagtctaaaacaggagacacagggcttacagaaagagaaagagagtcgggaaaaagaactcatgggttttagcaaaagtgttaatgaagcccggtcaaagatggacgtggcccagtcggagcttgatatttacctgagccggcacaacaccgctgtgtcccaactaaccaaagctaaggaggccctgatcgctgcaagcgagaccctgaaagagcgcaaggcagcaattagagacatcgaggggaagctgccacagactgagcaggagctgaaagaaaaagagaaggagctgcagaaacttacccaagaagagaccaactttaagtcattggtccacgacctatttcaaaaagtggaggaggcaaaaagcagtctcgccatgaataggagtcgcggaaaggtgttggatgcaatcatccaggagaaaaagagcggacgcatccctgggatttatggccgtctaggagacctcggtgctattgacgagaagtatgatgtggccatctctagctgctgccacgccctggactatatcgtggttgactctatcgatattgcccaggagtgtgtaaatttcctgaaacggcaaaacattggggtcgctacgttcatcgggctggacaaaatggcggtctgggctaaaaaaatgaccgagattcaaactcctgagaataccccaaggttgtttgacctcgtcaaggtgaaagacgagaagatccggcaagcattttatttcgccctgagggacacgctggtggcagataatttggatcaggctacacgggtggcttatcagaaggaccgacggtggcgagtcgtgaccctgcagggacagatcatcgaacagagtggcacgatgacgggcggcggatcaaaagtgatgaaggggcggatgggctcatcactcgtgatcgagatcagcgaagaagaggtaaataagatggagtctcaactgcagaatgactctaagaaagcaatgcaaatccaggagcagaaggttcagctcgaagaaagggtcgttaaacttcgccactccgagcgagaaatgagaaatacactcgaaaaattcaccgcctccatccagagactcattgaacaggaagaatacttaaatgtacaagtaaaggagctggaggctaatgtgctcgccactgcaccagacaagaaaaaacaaaagctgctggaggagaacgtgagtgccttcaaaactgagtacgacgcagtcgcagaaaaggccggcaaagtagaggccgaagtgaagaggttacacaataccattgtggagattaataaccacaaactgaaagcccaacaggataaattggacaaaataaacaagcaactggacgagtgcgccagtgcaatcacgaaggcccaggtggccattaagaccgcagaccgcaatctgcagaaggcccaggatagtgtgctgcgaactgagaaggaaatcaaagacaccgagaaggaagtggacgacctgacggcagaactgaagagcctggaagataaggcagccgaagtggtcaagaatactaatgctgcggagataagtaagatttccctgcaccctatcgaggacaatcctattgaggaaatctcggtactgtccccagaggatctggaagcaattaagaacccggatagcatcaccaatcagatcgcgctcctcgaagcacgctgccacgaaatgaagcccaatttgggcgcaatcgctgaatacaagaagaaggaagaactttacttacagcgcgtggccgagctggacaagatcacgtatgagcgtgattctttcaggcaggcctatgaagaccttcgaaaacaacgactgaatgaatttatggccggattctacataatcacaaacaagcttaaagagaactaccaaatgctgaccctagggggggatgcggaacttgagcttgttgatagcctggacccatttagtgaggggattatgttctcggttcgccctcccaaaaaaagttggaaaaagatattcaatctgtccggcggggagaaaacactatcaagtctcgctctggttttcgcgctgcaccactacaaacctacacccctctattttatggacgagatcgatgctgctctggatttcaaaaatgtctcgatcgttgcattctacatttatgagcagaccaaaaacgcccagttcatcattatctcacttcgcaacaacatgttcgaaatttctgatagattgattgggatttacaaaacctataatattactaagagtgtggccgtgaatcccaaagaaatcgccagcaagggactatgctag

SEQ ID NO: 156729 - DNA, 2649 bp, Artificial Sequence
  derived and/or modified sequence
atgcccagagtgaagcccaaactcgagaagcagctgcagaaggataaagaaaaggtggaggaatttaagagtatcccggctaagagtaacaacatcattaacgagactaccaccaggaataacgcactggaaaaggagaaagagaaagaggagaaaaagctcaaagaagtaatggatagcctcaagcaagaaacacagggcctacagaaagagaaagaaagcagggagaaggagctgatgggattttctaagagtgttaacgaggcccgatccaaaatggatgtggcccagagcgaactggacatctatctgtcacggcataacacagcggtatcccagctaacaaaggccaaagaggcccttatagctgctagtgagacactgaaagagcggaaggctgcaatcagagatattgagggcaagctccctcaaacggagcaagaactgaaagaaaaggaaaaagagctccagaaactaactcaggaggagaccaatttcaagtcgctggtccatgatctgtttcagaaagtcgaggaagccaaatcttcgctggccatgaatcggtccagaggcaaagtgctagatgcaatcatccaggagaaaaaatcggggaggatacctggcatctacggtcgcctcggtgacctaggagccatcgatgaaaaatatgacgtggccatatcctcttgctgccacgccctcgattacatcgttgtcgactctatcgacatcgcacaggagtgcgtgaactttctaaagagacagaacatcggagtggcaacgtttataggtctcgacaagatggccgtatgggcaaagaaaatgaccgagattcagacacccgagaatacaccacgactgttcgatttggttaaagtgaaggatgagaagattcgacaggccttctatttcgcactgcgagataccctcgtcgcggataatctggaccaagccactcgcgtcgcctaccagaaagaccggcgttggagagtggtgactctgcaggggcaaattatcgagcagtccggtacaatgaccggcggcggctccaaggtgatgaagggcaggatggggtccagtttagtgatagagatcagtgaggaggaagtgaataagatggagtcacagttgcaaaatgattccaagaaggccatgcagattcaagaacagaaggtacaactggaagagagagttgtgaaactgaggcatagcgaaagggaaatgcgtaatactctggaaaaatttaccgctagcatccagaggttgatcgaacaagaagaatacctcaatgtccaagtcaaagagctggaggcaaatgtccttgcaacagcaccggataagaagaagcagaagctactggaggagaacgtgtcagcctttaaaaccgaatatgacgccgtcgctgaaaaagctggtaaagttgaggctgaggtgaagcgactgcataacactattgttgagatcaataaccataagctcaaggcccaacaggacaaactagacaagattaataaacaactggacgagtgcgccagcgccataactaaggcccaagtagctatcaagactgccgatcggaaccttcagaaggctcaggactccgtgctgagaaccgagaaagaaatcaaggacacagagaaggaagtggatgacctaacagcggagctgaagtccctggaagataaggcagccgaggttgtcaaaaacactaacgcagccgaggagagccttcctgaaatacagaaggaacaccgcaacctattgcaggagttaaaggttatccaggaaaatgaacatgctttacagaaagatgcactgtcgattaagttaaaactcgaacaaatcgatggacacattgccgagcacaactcaaaaataaaatactggcataaggaaatctctaagatctccttacacccgattgaagacaacccaattgaagaaatttctgttctgtccccagaggaccttgaggcaataaaaaatccagattctatcacaaatcagatcgccctgttggaggctaggtgccatgagatgaaacccaacctcggcgctatagctgagtataagaagaaagaggagctctacctacaacgcgtcgcagagctggacaagatcacctacgaaagggacagcttccgacaggcctacgaggaccttcggaaacagaggctcaatgagttcatggcaggattttatatcataacgaacaagctgaaagaaaactaccagatgcttaccctaggcggagacgcagagctcgaactggtcgatagcctggatcccttttctgagggaatcatgttcagcgtgcgcccacctaaaaagtcttggaaaaaaatttttaacctgtctggcggggaaaagactctgtccagcctcgcccttgtgttcgcactccatcactacaagcctactccattgtactttatggatgagattgatgccgcactggatttcaagaacgtctcgatcgtcgcgttctatatttacgaacagacaaagaatgctcaattcataatcataagcttacggaacaacatgttcgagatatctgaccgtcttatcggaatctacaagacttacaacatcaccaagtctgtagccgttaaccctaaagagatagcatccaagggcttatgctag

SEQ ID NO: 156730 - DNA, 3867 bp, Artificial Sequence
  derived and/or modified sequence
atgcccaggaagggcacccagcccagcacagccaggagaagagaggagggccccccaccacccagcccagatggagccagcagtgatgctgagcctgagccccccagcggccgcacagagagccctgccacagctgctgagacagccagcgaggagctggacaacagaagcctggaggagatcctgaacagcatccccccacctcctcctccagccatgaccaatgaagctggggccccccggctgatgatcacccacatcgtgaaccagaacttcaagagctatgctggggagaagatcctgggccccttccacaagcgcttcagctgcatcatcggccccaatggaagtggcaagagcaatgtgattgacagcatgctgtttgtgtttggctaccgggcccagaagatccgcagcaagaagctgtctgtgctgatccacaacagtgatgagcacaaggacatccagagctgcaccgtggaggtgcacttccagaagatcatcgacaaggagggagatgattatgaagtcatccccaacagcaacttctacgtgtccaggacagcctgccgggacaacacctctgtgtaccacatcagcggcaagaagaagaccttcaaggatgtgggcaacctgctgcggagccacggcatcgacctggaccacaaccgcttcctgatcctgcagggcgaggtggagcagatcgccatgatgaagcccaagggccagacagaacatgatgagggcatgctggagtacctggaggacatcatcggctgcggccgcctgaatgagcccatcaaggtgctgtgccggcgggtggagatcctgaatgagcacagaggagagaagctgaacagagtgaagatggtggagaaggagaaggatgccctggagggggagaagaacatcgccatcgagttcctgaccctggagaatgagatcttcaggaagaagaaccacgtgtgccagtactacatctatgagctgcagaagagaattgctgagatggagacccagaaggagaagatccacgaggacaccaaggagatcaatgagaagagcaacatcctgagcaatgagatgaaggccaagaacaaggatgtgaaggacacagagaagaagctgaacaagatcaccaagttcatcgaggagaacaaggagaagttcacccagctggacctggaggatgtgcaggtgcgggagaagctgaagcacgccaccagcaaggccaagaagctggagaagcagctgcagaaggacaaggagaaggtggaggagttcaagagcatcccagccaagagcaacaacatcatcaatgagaccaccaccagaaataatgccctggagaaggagaaggagaaggaggagaagaagctgaaggaggtgatggacagcctgaagcaggagacccagggcctgcagaaggagaaggagagccgggagaaggagctgatgggcttcagcaagtctgtgaatgaggcccggagcaagatggatgtggcccagagcgagctggacatctacctgagccgccacaacacagctgtgtcccagctgaccaaggccaaggaggccctgattgctgccagcgagaccctgaaggagaggaaggccgccatccgggacatcgagggcaagctgccccagacagagcaggagctgaaggagaaggagaaggagctgcagaagctgacccaggaggagaccaacttcaagagcctggtgcatgacctcttccagaaggtggaggaggccaagagcagcctggccatgaacagaagccggggcaaggtgctggatgccatcatccaggagaagaagagcggccgcatccctggcatctacggccgcctgggggacctgggcgccattgatgagaagtatgatgtggccatcagcagctgctgccacgccctggactacatcgtggtggacagcattgacatcgcccaggagtgtgtgaacttcctgaagaggcagaacattggagtggccaccttcatcggcctggacaagatggctgtgtgggccaagaagatgacagagatccagaccccagagaacaccccccggctgtttgacctggtgaaggtgaaggatgagaagatccggcaggccttctactttgccctgcgggacaccctggtggccgacaacctggaccaggccaccagggtggcctaccagaaggaccggcgctggagggtggtgaccctgcagggccagatcatcgagcagagcggcaccatgactggaggcggcagcaaggtgatgaagggccgcatgggcagcagcctggtgattgagatcagcgaggaggaggtgaacaagatggagagccagctgcagaatgacagcaagaaggccatgcagatccaggagcagaaggtgcagctggaggagcgggtggtgaagctgcggcacagcgagcgggagatgaggaacaccctggagaagttcaccgccagcatccagaggctgattgagcaggaggagtacctgaatgtgcaggtgaaggagctggaggccaacgtgctggccacagccccagacaagaagaagcagaagctgctggaggagaatgtgtctgccttcaagacagaatatgatgctgtggccgagaaggccggcaaggtggaggccgaggtgaagaggctgcacaacaccatcgtggagatcaacaaccacaagctgaaggcccagcaggacaagctggacaagatcaacaagcagctggatgaatgtgccagcgccatcaccaaggcccaggtggccatcaagacagctgacaggaacctgcagaaggcccaggacagcgtgctgaggacagagaaggagatcaaggacacagagaaggaggtggatgacctgacagctgagctgaagagcctggaggacaaggctgctgaggtggtgaagaacaccaatgctgctgaggagagcctgcctgagatccagaaggagcacaggaacctgctgcaggagctgaaggtgatccaggagaatgaacatgccctgcagaaggatgccctgagcatcaagctgaagctggagcagattgatggccacatcgccgagcacaacagcaagatcaagtactggcacaaggagatcagcaagatcagcctgcaccccatcgaggacaaccccatcgaggagatctctgtgctgagccctgaggacctggaggccatcaagaacccagacagcatcaccaaccagatcgccctgctggaggcccgctgccacgagatgaagcccaacctgggcgccatcgccgagtacaagaagaaggaggagctgtacctgcagagggtggccgagctggacaagatcacctatgagcgggacagcttccggcaggcctatgaggacctgaggaagcagaggctgaatgagttcatggccggcttctacatcatcaccaacaagctgaaggagaactaccagatgctgaccctgggcggagatgctgagctggagctggtggacagcctggaccccttcagcgagggcatcatgttttctgtgcggccccccaagaagtcctggaagaagatcttcaacctgagcggcggggagaagaccctgagcagcctggccctggtgtttgccctgcaccactacaagcccacccccctgtacttcatggatgaaattgatgctgccctggacttcaagaatgtgtccatcgtggccttctacatctatgagcagaccaagaatgcccagttcatcatcatcagcctgaggaacaacatgtttgagatcagtgaccggctgattggcatctacaagacctacaacatcaccaagtctgtggccgtgaaccccaaggagatcgccagcaagggcctgtgctag

SEQ ID NO: 156731 - DNA, 3693 bp, Artificial Sequence
  derived and/or modified sequence
atgcccaggaagggcacccagcccagcacagccaggagaagagaggagggccccccaccacccagcccagatggagccagcagtgatgctgagcctgagccccccagcggccgcacagagagccctgccacagctgctgagacagccagcgaggagctggacaacagaagcctggaggagatcctgaacagcatccccccacctcctcctccagccatgaccaatgaagctggggccccccggctgatgatcacccacatcgtgaaccagaacttcaagagctatgctggggagaagatcctgggccccttccacaagcgcttcagctgcatcatcggccccaatggaagtggcaagagcaatgtgattgacagcatgctgtttgtgtttggctaccgggcccagaagatccgcagcaagaagctgtctgtgctgatccacaacagtgatgagcacaaggacatccagagctgcaccgtggaggtgcacttccagaagatcatcgacaaggagggagatgattatgaagtcatccccaacagcaacttctacgtgtccaggacagcctgccgggacaacacctctgtgtaccacatcagcggcaagaagaagaccttcaaggatgtgggcaacctgctgcggagccacggcatcgacctggaccacaaccgcttcctgatcctgcagggcgaggtggagcagatcgccatgatgaagcccaagggccagacagaacatgatgagggcatgctggagtacctggaggacatcatcggctgcggccgcctgaatgagcccatcaaggtgctgtgccggcgggtggagatcctgaatgagcacagaggagagaagctgaacagagtgaagatggtggagaaggagaaggatgccctggagggggagaagaacatcgccatcgagttcctgaccctggagaatgagatcttcaggaagaagaaccacgtgtgccagtactacatctatgagctgcagaagagaattgctgagatggagacccagaaggagaagatccacgaggacaccaaggagatcaatgagaagagcaacatcctgagcaatgagatgaaggccaagaacaaggatgtgaaggacacagagaagaagctgaacaagatcaccaagttcatcgaggagaacaaggagaagttcacccagctggacctggaggatgtgcaggtgcgggagaagctgaagcacgccaccagcaaggccaagaagctggagaagcagctgcagaaggacaaggagaaggtggaggagttcaagagcatcccagccaagagcaacaacatcatcaatgagaccaccaccagaaataatgccctggagaaggagaaggagaaggaggagaagaagctgaaggaggtgatggacagcctgaagcaggagacccagggcctgcagaaggagaaggagagccgggagaaggagctgatgggcttcagcaagtctgtgaatgaggcccggagcaagatggatgtggcccagagcgagctggacatctacctgagccgccacaacacagctgtgtcccagctgaccaaggccaaggaggccctgattgctgccagcgagaccctgaaggagaggaaggccgccatccgggacatcgagggcaagctgccccagacagagcaggagctgaaggagaaggagaaggagctgcagaagctgacccaggaggagaccaacttcaagagcctggtgcatgacctcttccagaaggtggaggaggccaagagcagcctggccatgaacagaagccggggcaaggtgctggatgccatcatccaggagaagaagagcggccgcatccctggcatctacggccgcctgggggacctgggcgccattgatgagaagtatgatgtggccatcagcagctgctgccacgccctggactacatcgtggtggacagcattgacatcgcccaggagtgtgtgaacttcctgaagaggcagaacattggagtggccaccttcatcggcctggacaagatggctgtgtgggccaagaagatgacagagatccagaccccagagaacaccccccggctgtttgacctggtgaaggtgaaggatgagaagatccggcaggccttctactttgccctgcgggacaccctggtggccgacaacctggaccaggccaccagggtggcctaccagaaggaccggcgctggagggtggtgaccctgcagggccagatcatcgagcagagcggcaccatgactggaggcggcagcaaggtgatgaagggccgcatgggcagcagcctggtgattgagatcagcgaggaggaggtgaacaagatggagagccagctgcagaatgacagcaagaaggccatgcagatccaggagcagaaggtgcagctggaggagcgggtggtgaagctgcggcacagcgagcgggagatgaggaacaccctggagaagttcaccgccagcatccagaggctgattgagcaggaggagtacctgaatgtgcaggtgaaggagctggaggccaacgtgctggccacagccccagacaagaagaagcagaagctgctggaggagaatgtgtctgccttcaagacagaatatgatgctgtggccgagaaggccggcaaggtggaggccgaggtgaagaggctgcacaacaccatcgtggagatcaacaaccacaagctgaaggcccagcaggacaagctggacaagatcaacaagcagctggatgaatgtgccagcgccatcaccaaggcccaggtggccatcaagacagctgacaggaacctgcagaaggcccaggacagcgtgctgaggacagagaaggagatcaaggacacagagaaggaggtggatgacctgacagctgagctgaagagcctggaggacaaggctgctgaggtggtgaagaacaccaatgctgctgagatcagcaagatcagcctgcaccccatcgaggacaaccccatcgaggagatctctgtgctgagccctgaggacctggaggccatcaagaacccagacagcatcaccaaccagatcgccctgctggaggcccgctgccacgagatgaagcccaacctgggcgccatcgccgagtacaagaagaaggaggagctgtacctgcagagggtggccgagctggacaagatcacctatgagcgggacagcttccggcaggcctatgaggacctgaggaagcagaggctgaatgagttcatggccggcttctacatcatcaccaacaagctgaaggagaactaccagatgctgaccctgggcggagatgctgagctggagctggtggacagcctggaccccttcagcgagggcatcatgttttctgtgcggccccccaagaagtcctggaagaagatcttcaacctgagcggcggggagaagaccctgagcagcctggccctggtgtttgccctgcaccactacaagcccacccccctgtacttcatggatgaaattgatgctgccctggacttcaagaatgtgtccatcgtggccttctacatctatgagcagaccaagaatgcccagttcatcatcatcagcctgaggaacaacatgtttgagatcagtgaccggctgattggcatctacaagacctacaacatcaccaagtctgtggccgtgaaccccaaggagatcgccagcaagggcctgtgctag

SEQ ID NO: 156732 - DNA, 2649 bp, Artificial Sequence
  derived and/or modified sequence
atgccccgggtgaagcccaagctggagaagcagctgcagaaggacaaggagaaggtggaggagttcaagagcatcccagccaagagcaacaacatcatcaatgagaccaccaccagaaataatgccctggagaaggagaaggagaaggaggagaagaagctgaaggaggtgatggacagcctgaagcaggagacccagggcctgcagaaggagaaggagagccgggagaaggagctgatgggcttcagcaagtctgtgaatgaggcccggagcaagatggatgtggcccagagcgagctggacatctacctgagccgccacaacacagctgtgtcccagctgaccaaggccaaggaggccctgattgctgccagcgagaccctgaaggagaggaaggccgccatccgggacatcgagggcaagctgccccagacagagcaggagctgaaggagaaggagaaggagctgcagaagctgacccaggaggagaccaacttcaagagcctggtgcatgacctcttccagaaggtggaggaggccaagagcagcctggccatgaacagaagccggggcaaggtgctggatgccatcatccaggagaagaagagcggccgcatccctggcatctacggccgcctgggggacctgggcgccattgatgagaagtatgatgtggccatcagcagctgctgccacgccctggactacatcgtggtggacagcattgacatcgcccaggagtgtgtgaacttcctgaagaggcagaacattggagtggccaccttcatcggcctggacaagatggctgtgtgggccaagaagatgacagagatccagaccccagagaacaccccccggctgtttgacctggtgaaggtgaaggatgagaagatccggcaggccttctactttgccctgcgggacaccctggtggccgacaacctggaccaggccaccagggtggcctaccagaaggaccggcgctggagggtggtgaccctgcagggccagatcatcgagcagagcggcaccatgactggaggcggcagcaaggtgatgaagggccgcatgggcagcagcctggtgattgagatcagcgaggaggaggtgaacaagatggagagccagctgcagaatgacagcaagaaggccatgcagatccaggagcagaaggtgcagctggaggagcgggtggtgaagctgcggcacagcgagcgggagatgaggaacaccctggagaagttcaccgccagcatccagaggctgattgagcaggaggagtacctgaatgtgcaggtgaaggagctggaggccaacgtgctggccacagccccagacaagaagaagcagaagctgctggaggagaatgtgtctgccttcaagacagaatatgatgctgtggccgagaaggccggcaaggtggaggccgaggtgaagaggctgcacaacaccatcgtggagatcaacaaccacaagctgaaggcccagcaggacaagctggacaagatcaacaagcagctggatgaatgtgccagcgccatcaccaaggcccaggtggccatcaagacagctgacaggaacctgcagaaggcccaggacagcgtgctgaggacagagaaggagatcaaggacacagagaaggaggtggatgacctgacagctgagctgaagagcctggaggacaaggctgctgaggtggtgaagaacaccaatgctgctgaggagagcctgcctgagatccagaaggagcacaggaacctgctgcaggagctgaaggtgatccaggagaatgaacatgccctgcagaaggatgccctgagcatcaagctgaagctggagcagattgatggccacatcgccgagcacaacagcaagatcaagtactggcacaaggagatcagcaagatcagcctgcaccccatcgaggacaaccccatcgaggagatctctgtgctgagccctgaggacctggaggccatcaagaacccagacagcatcaccaaccagatcgccctgctggaggcccgctgccacgagatgaagcccaacctgggcgccatcgccgagtacaagaagaaggaggagctgtacctgcagagggtggccgagctggacaagatcacctatgagcgggacagcttccggcaggcctatgaggacctgaggaagcagaggctgaatgagttcatggccggcttctacatcatcaccaacaagctgaaggagaactaccagatgctgaccctgggcggagatgctgagctggagctggtggacagcctggaccccttcagcgagggcatcatgttttctgtgcggccccccaagaagtcctggaagaagatcttcaacctgagcggcggggagaagaccctgagcagcctggccctggtgtttgccctgcaccactacaagcccacccccctgtacttcatggatgaaattgatgctgccctggacttcaagaatgtgtccatcgtggccttctacatctatgagcagaccaagaatgcccagttcatcatcatcagcctgaggaacaacatgtttgagatcagtgaccggctgattggcatctacaagacctacaacatcaccaagtctgtggccgtgaaccccaaggagatcgccagcaagggcctgtgctag

SEQ ID NO: 156733 - DNA, 3867 bp, Artificial Sequence
  derived and/or modified sequence
atgccccggaagggcacccagcccagcaccgcccggcggcgggaggaagggccccccccccctagccccgacggtgcatctagtgatgctgagccggagcccccatcagggagaactgagtcccccgcgactgcagcggaaacggcgtctgaggagctcgataacagatccctggaagaaatcttgaattctatcccaccccctccaccacctgcgatgaccaatgaggccggcgcaccacggctcatgattacccacatcgtcaatcaaaatttcaagagttacgcaggcgaaaaaatactcggaccatttcataagagattctcttgtattattggtcccaacgggagtggtaagtcaaacgtgattgatagcatgctattcgtgtttgggtatagggcgcaaaaaatccgttcgaagaagttatccgtgctcattcataattccgatgagcacaaagatatccaaagctgcaccgtcgaagtccacttccaaaaaatcatcgataaggagggagacgattatgaggtgatcccgaactccaatttctacgtcagccgaactgcgtgtcgtgacaacacgagtgtctaccatatcagtggcaagaagaagacattcaaggacgtcggtaacctgctgagatcccatggaattgatcttgatcataacaggtttctcattctccaaggcgaagtggagcagatcgcaatgatgaaaccaaagggacaaacagagcatgacgaggggatgctagaatacctggaagacattatcggttgtggcagactcaacgaacccataaaagttttgtgcagacgcgtggagatactcaatgagcaccgcggcgaaaagctgaaccgtgtaaaaatggtagaaaaagagaaggacgcacttgaaggtgaaaagaatatcgcaatagagtttctgacacttgaaaacgaaattttccgaaagaaaaaccacgtctgccagtattacatatatgagctgcagaaaaggattgccgaaatggagacacaaaaagagaaaattcatgaggataccaaggagatcaatgagaagtctaacatcctgtctaatgaaatgaaggccaagaacaaagatgtgaaagacaccgagaaaaagctaaacaaaataacgaaattcatcgaggagaacaaagagaaattcacgcagcttgatctcgaagacgtgcaagtgcgggaaaaactgaaacacgccacgagtaaggccaaaaaactggagaagcaacttcagaaggacaaggagaaagtagaagaatttaaaagcattccggccaagtctaacaacatcataaacgagaccacaacccggaataacgcactagagaaggagaaggagaaggaggagaaaaagctgaaagaggtgatggactccctcaagcaggagactcaaggactgcagaaggaaaaagagagcagagagaaagagctgatgggatttagcaagtctgtgaacgaggcaaggtccaagatggacgtggcgcagagcgagctagacatctacctgagccggcataatacggccgtttcccagctgacaaaggccaaagaggcactcattgcggcatccgaaacactgaaggaaagaaaggccgctatccgagacattgaggggaagctcccacagaccgaacaggaactcaaggaaaaggagaaggaattgcagaagctcactcaggaggaaaccaacttcaagtccttggtgcacgatctgttccagaaggtggaggaggctaaaagctctctggcaatgaaccgatcccggggaaaggtattggacgcaatcatccaagaaaagaaatctggaagaattcccggcatttatggccgactgggagacctcggcgccatcgacgagaaatatgacgtagcaatctcaagctgctgccacgcgcttgactatattgttgtcgactcaattgatattgcgcaggagtgtgtcaacttcttgaagagacagaacattggcgtggcaacctttattggtctggataaaatggctgtgtgggccaagaagatgactgaaatacaaacgcccgaaaacaccccgcgcctgttcgatctagttaaagttaaagatgagaagatccgacaagccttttactttgctctgagggacacgctggtcgccgacaatttggaccaggctacgcgcgtggcttatcaaaaagatcgtcgctggcgggtagtgaccctgcagggccagatcatcgagcagagcggaaccatgaccgggggaggatccaaggtgatgaaagggcggatgggtagctctctggttatcgaaatatctgaggaagaagtcaataaaatggaatcacaacttcagaacgattctaaaaaggccatgcagatccaagagcagaaggttcaattagaagagcgggtagttaagcttaggcacagtgagagggaaatgcggaacacgcttgaaaagtttactgcctccatccagaggctgattgagcaggaagagtatctgaacgttcaagtgaaagagctggaggcgaacgtcctggctacagcgcccgacaagaaaaaacagaagctgctcgaagagaacgtgagtgcctttaagaccgaatatgacgccgtcgccgaaaaagcaggcaaagtggaggctgaagtcaagcgtctacataacactatagtggaaatcaataatcacaaactgaaggctcagcaagataagctcgacaagatcaataagcaactcgacgagtgcgcctccgccataacaaaagcccaggtagcgatcaaaaccgcggaccggaatctgcaaaaggcccaggattccgtgctccgcacagaaaaggaaattaaggatactgagaaggaagtggatgatcttaccgctgagttgaagtcactagaagacaaggccgccgaggttgtcaaaaacactaatgcggcagaggaaagcctgcctgagatccaaaaggagcatcgtaacttgttgcaggaactcaaggttattcaggagaacgaacacgcccttcagaaggacgccttgtcaatcaagctgaaactcgagcagatagatggccacatcgctgagcacaactctaagatcaagtactggcacaaagagatcagtaagatatcactccaccccatcgaggataatcccatagaagagatttcggtgctctccccagaggacctcgaggcaattaagaacccagactccatcacaaaccagattgcactcttggaggcacgctgtcacgaaatgaagcccaatctgggtgccatagctgaatataagaaaaaagaggagctttatttacagcgagtcgcagaactggataagatcacgtacgagcgagactcctttaggcaggcctatgaggatctacgcaaacagcggctgaacgagttcatggcggggttttatataattaccaataagctgaaggaaaactaccagatgttgactctggggggggatgcggagctggaactcgtcgatagcttggacccattcagcgagggtattatgttctccgtgcgccctcccaaaaagtcctggaagaagatcttcaacttatccggaggcgaaaagaccctgagcagcctggcactggtatttgctctgcaccattataagcccacacctctgtacttcatggacgaaatcgacgccgccctagatttcaaaaatgtatcaatagtggctttttacatttatgaacaaacaaagaatgctcagttcatcataattagtctcaggaacaatatgttcgagatatcagaccgcctgattgggatctacaagacttacaatatcaccaagagcgtcgcagtgaaccccaaagagatcgcctccaaagggctgtgctag

SEQ ID NO: 156734 - DNA, 3867 bp, Artificial Sequence
  derived and/or modified sequence
atgccccggaagggcacccagcccagcaccgcccggcggcgggaggaaggacctccaccaccaagtcctgacggggctagctccgacgcagagccagagccgcccagcggcagaacagaatctcccgctacagccgctgaaaccgcttcagaagaactggataatcgcagtcttgaggagatcctgaacagcatacctcctcccccaccacctgctatgaccaacgaagccggagctccacggttaatgattacacatatcgtcaaccagaattttaagtcatacgcaggtgagaaaatcttaggaccttttcacaaaagattttcctgcattattggaccgaacggaagcgggaaatctaacgtgatagactcaatgctttttgtgttcgggtaccgtgcgcagaagatcagaagcaaaaaactcagtgtcctgatacacaacagtgacgagcataaggatatacaatcctgtaccgtggaggtccactttcagaaaatcattgacaaggagggtgatgattacgaggtgattcccaactccaacttttacgttagccggacagcctgcagggataatacttctgtttatcatattagcggcaagaagaaaaccttcaaggacgtcggtaacctgctccgttctcacggtattgatctcgaccacaaccgctttcttattttacagggggaggtcgagcagattgcgatgatgaaaccaaagggacagactgagcacgacgagggaatgctggaatacctcgaggatatcattggatgcggtcgccttaacgagcccatcaaggtactctgtaggcgcgtggaaatcctgaacgagcatcggggcgaaaagcttaatcgcgttaagatggtggagaaggagaaggatgccttggagggcgagaaaaacattgctatcgagtttcttacccttgaaaacgaaattttccggaagaaaaaccacgtctgtcagtactacatctacgagctacagaaaagaatagctgagatggagacgcagaaagagaaaattcatgaggacacaaaggaaattaatgagaaatctaacatcctgagcaacgagatgaaggcgaaaaataaagatgttaaggacacggaaaaaaagcttaataagatcaccaagtttatcgaggagaataaggagaaattcactcagcttgacttggaggatgttcaagtgcgcgagaagctgaagcacgcgacatctaaagcaaagaagcttgaaaaacagctccagaaggataaggaaaaagtggaagagttcaagtctatccccgccaaaagcaataatattattaatgagacgacgacccgcaataatgcgctggagaaggagaaagagaaggaggagaagaaattaaaggaagtaatggatagcctcaagcaggagactcagggactgcagaaggagaaagagtcccgggagaaagaactgatggggttttccaaatctgtgaatgaagcacgatccaagatggacgtggctcagtccgaactcgacatttaccttagccggcacaacaccgctgtctctcaactcacgaaggcaaaagaagctcttattgcagccagtgagacccttaaggagcgaaaggctgctatccgggacattgaaggtaaactgccacagaccgagcaggaacttaaggagaaggagaaagaattgcagaagcttacgcaggaggagacaaatttcaagtcgttagtgcatgacttgttccaaaaggtcgaagaggcaaaaagctctctcgccatgaatagaagccgtggcaaagttctagatgcaattatacaagagaagaagtccggccggattccagggatttatgggcggcttggcgaccttggcgcaatagacgaaaaatatgatgtggcgatctcttcgtgttgccacgcccttgattatatcgtggtggattccattgacatagctcaagaatgtgtgaactttctcaaacgtcagaacatcggtgtggccacttttatcggcctggataagatggcagtctgggccaagaaaatgaccgagattcagacccctgagaacacacccaggttattcgatctggtgaaagtcaaggacgagaagatccggcaagccttttacttcgcactccgcgacacgctggttgctgacaacttggaccaggctacaagagtcgcttaccaaaaagacaggcgttggcgggtcgtaacattgcagggtcaaataattgaacagtctggaacaatgaccggcggcggcagtaaagtgatgaaggggcgaatgggatcctcgctggttatagaaatctccgaggaggaagttaataagatggaaagccaactccaaaatgacagtaaaaaagcaatgcagatccaggaacagaaggtgcagctggaggagcgggttgtgaagctgcggcattcagaaagagagatgcgaaacactctggagaaattcaccgcaagcattcagagactcattgagcaagaggagtatctcaatgtgcaggtaaaggaactggaagcgaacgtactcgctacagcacctgacaagaaaaagcagaagctgctagaggaaaatgtgtccgccttcaaaactgagtacgacgcagttgcagagaaggccggcaaggtggaagctgaagtcaagagacttcacaacaccattgttgaaatcaataaccataagttaaaggcccagcaggacaagctcgataagataaataaacagttggacgagtgcgcctctgcaatcacaaaggcccaggtcgctatcaaaaccgctgataggaatctgcaaaaggctcaggattccgtgcttaggacagaaaaagaaatcaaagacactgagaaggaggttgatgatctaaccgctgagctcaagtcgctggaggataaagccgccgaagtggtcaagaacactaacgcagctgaggagagccttccagagatccagaaggaacatcgcaatctcttacaagaactgaaagtgattcaggagaacgaacacgccttgcagaaggacgccttgagtattaaactcaagctagaacagatcgacggacacattgctgaacataattccaaaatcaagtactggcacaaagagataagcaagatcagcctgcatccgattgaagataatcctatagaggagatttccgttctgtcgccggaggacctggaggcgataaaaaatcctgattccattaccaatcagattgcgctgctcgaagccaggtgccacgagatgaagcccaacctgggggctatcgcagaatacaagaaaaaggaggaactgtatttacaacgcgtggccgaacttgataaaatcacatatgaacgcgactccttcagacaagcctatgaggatctccggaagcagcggctgaacgaatttatggctggcttttacatcataactaataaactgaaggagaactaccagatgttaacgctcggaggggatgccgagcttgaactggtcgattctctggatccattctccgaaggaataatgttttctgttagacctccaaagaaatcatggaagaaaatctttaacctgagtggaggcgagaagactctctccagcctagccctggtgtttgcactccaccattacaagcctacgcctctttactttatggacgaaatcgacgccgcccttgatttcaagaacgttagcatcgtggccttttacatatatgagcagactaagaatgctcaattcattataatatccctgcgaaacaacatgttcgagatctccgacaggctcataggtatttataaaacatacaatattacaaaatccgtcgccgtcaaccccaaagaaatcgcctccaagggcttgtgttag

SEQ ID NO: 156735 - DNA, 3693 bp, Artificial Sequence
  derived and/or modified sequence
atgccccggaagggcacccagcccagcaccgcccggcggcgggaggagggccccccaccgccctctcccgacggggcgagctcggatgccgagcctgagccaccctccggcagaaccgaaagtccggcaacagccgctgagaccgcttctgaagagctggacaatagatctttggaagaaatcctgaacagcatcccgcctcccccccctcccgctatgacaaacgaggctggagccccccgtcttatgattacacacatagtaaatcagaattttaaaagctacgccggcgagaagattcttgggccttttcacaagagattctcttgcatcatcggcccaaacgggtcaggcaagagcaacgtgatcgactcaatgcttttcgttttcggataccgagcccagaagatcagatctaagaagctcagcgtgcttattcataattccgatgagcacaaggacatacagtcctgcactgtcgaggtacattttcaaaagattattgataaggagggggacgattacgaggtaatccctaattcaaacttttatgtgagcaggacagcttgcagggataacacgagcgtataccacatctctggcaaaaaaaagacgttcaaggacgttggcaatttactcagaagccacggaatcgacctggaccacaacagattcttaattctccagggagaggtagagcagatcgccatgatgaagccgaagggccagaccgaacacgacgaaggaatgcttgagtatctggaagatataatcggatgcgggaggctaaatgaacccattaaggtgttgtgcagaagagtggaaattttaaacgagcacaggggagagaagctgaaccgcgttaaaatggtggagaaagagaaagacgcactagagggcgaaaaaaatattgcaatagagtttctcactctggaaaacgagattttcagaaaaaagaaccacgtctgccagtactacatatatgagcttcaaaaacggatagcagagatggaaacgcaaaaagaaaagatacatgaggatacaaaagaaatcaacgagaagtcaaacattctgtctaacgaaatgaaagctaaaaataaagatgttaaagacaccgagaagaagttgaacaagataaccaaatttattgaggagaataaagagaagttcactcagttagacctagaagatgttcaagtgagagagaaactcaagcacgcaacctcaaaagccaagaagttggaaaaacagctgcagaaagataaagaaaaggtcgaagagtttaaatccattccagctaagagcaacaacataattaatgaaaccactacaaggaataatgccctcgagaaggagaaggaaaaggaggagaagaagctcaaggaagtaatggatagtctgaaacaggaaacgcagggactccagaaggagaaggagagccgggagaaagaactgatgggttttagtaagtccgtcaacgaagccaggtcaaagatggacgttgctcagtccgagttggacatttatctgagtcgtcataataccgctgtgagccaactgaccaaggccaaagaggcgttgatagctgcgtctgaaactttgaaggaaagaaaagctgctatacgtgatatagagggaaaactcccccaaaccgaacaggagcttaaggagaaggaaaaggaactccaaaagctaacgcaggaagagaccaactttaagtccctagtgcacgatctcttccagaaagttgaggaggcgaaaagctccctcgccatgaatcgatcaaggggcaaggttctggacgcgatcatccaggaaaagaaaagtggcagaattcctggcatttacggtaggttaggagatttaggggcgatcgacgaaaaatatgatgtagccatcagctcttgttgtcatgctctcgactatatcgtcgttgacagcatcgatattgcgcaggagtgtgtcaatttcctgaagaggcagaacatcggagttgccacttttatcggactagacaagatggctgtctgggcaaaaaagatgacggagatccagacccctgagaatacaccgagattattcgaccttgtgaaagtgaaggatgagaagatcagacaggccttttatttcgccctgcgagatacactcgtggctgataatctggatcaagccactcgagttgcctaccagaaagatcgccgctggcgggtcgtgactctccagggacagattatagagcaaagtggaaccatgaccggcggaggatctaaagtgatgaaagggaggatgggctcatccctcgtgatcgagatcagcgaagaggaggtgaacaaaatggagtcgcagctgcaaaatgatagcaagaaagcaatgcagattcaagagcaaaaagtacagctggaagaaagagtagttaagctgcggcatagcgagcgggaaatgcggaacaccctcgagaaatttacagcttcgatccagcggctcattgagcaagaggaatatctcaacgtgcaggtgaaggagttggaggcgaatgtcctggctactgcccccgacaaaaagaagcaaaaactgctggaggaaaatgtgagcgcttttaagaccgagtatgatgcggttgcagagaaggccggtaaagtggaggcggaagtaaaaagattgcataataccatagttgagatcaataatcataagctcaaggcgcaacaggataagttagataagattaataaacagctggatgaatgcgcgtcagccataacaaaggcccaggtcgccattaaaactgctgatcggaatttgcagaaggctcaggatagcgtgctccgaacggagaaggagataaaggacaccgagaaggaggtggatgacttaaccgcagagctcaaaagcttggaggataaggcagcagaagtggtaaagaacacaaacgccgcggaaataagtaaaatatcgctccatccaatcgaggacaatccaatcgaggagatatcagtactttctccagaagatctggaggctatcaagaacccagatagcatcacaaatcagattgctctgctggaagcgcggtgtcatgaaatgaaacctaacttaggtgctatcgctgagtataaaaaaaaagaagagctttaccttcagcgcgtggccgaattggataagattacttatgagcgtgacagctttaggcaagcttacgaagaccttcgaaaacagcgactcaatgagttcatggctgggttctacataataactaataagctgaaggagaattaccaaatgctaaccctgggaggagatgccgaacttgagctggtggacagcctcgatcccttctctgaaggaataatgttctctgtccgccctcccaagaaatcatggaagaaaatcttcaacctttctgggggcgaaaagactctcagttctctagctctagtcttcgctttacatcattacaagccaacaccactctacttcatggatgagatcgacgcggcactggattttaagaacgtctcgattgttgctttctatatatacgagcaaacaaaaaatgcacagtttatcattatctcattgagaaacaacatgttcgaaatctctgaccggttgattggtatttacaagacctacaacataacaaagtctgtggccgtcaaccctaaggaaatcgcaagcaaggggctgtgctag

SEQ ID NO: 156736 - DNA, 3693 bp, Artificial Sequence
  derived and/or modified sequence
atgccccggaagggcacccagcccagcaccgcccggcggcgggaggagggtccgcctcctccctcacctgacggcgcatcgagtgatgctgaaccagaaccgccgagcgggcggaccgagagcccggctaccgccgctgagactgcttctgaagagctagacaaccggagccttgaggaaattcttaacagtatccctcctcctccaccaccagcaatgacaaacgaagccggggctcctcggctcatgatcacgcacatcgtaaaccagaactttaagtcttatgcaggcgaaaagatcttaggacccttccataaaaggttctcctgcattattggcccgaatggcagtggcaagtcaaatgtgatcgactccatgctgttcgtgtttggctatcgcgcacagaagatcaggagtaagaaactttcggtgctgattcacaactccgacgagcacaaggatatccagtcttgtaccgtggaagtgcactttcaaaaaatcatagacaaggagggagacgactacgaagtgattcccaacagcaatttttacgtgtctcggaccgcctgcagggataacacaagcgtgtatcacatctccggtaagaagaagacctttaaggacgtcggcaatctcttgaggagccacggcatagatctcgaccataacaggttcctcatcttacagggagaagtggaacagattgctatgatgaagccaaagggccagaccgaacacgacgagggcatgttagagtatttagaggatattataggctgtggccggctgaatgagcccatcaaggttctttgcaggcgcgtggagattctgaacgaacatcggggcgaaaaacttaaccgcgttaaaatggtggaaaaggagaaagacgcgctggaaggtgaaaagaacatagcgatcgagtttctgactcttgaaaatgaaatttttaggaagaagaatcatgtctgccagtattatatttatgaactgcagaaaagaatagctgagatggagactcagaaggagaagatccacgaggacacaaaggagattaacgaaaaatctaacattttaagcaacgagatgaaagccaagaacaaggacgtaaaggatacagaaaagaaactgaacaagatcaccaaatttattgaggaaaataaggagaagtttactcagctggaccttgaggacgtgcaggttcgggagaagctcaagcatgccaccagtaaggcgaagaaactagagaagcagctgcaaaaagacaaggaaaaggttgaggagtttaagtctattcctgccaaatcaaataatattattaacgaaactactacaagaaataacgctctggaaaaggagaaggagaaagaagagaagaaactcaaagaagtgatggattctctgaaacaggaaactcagggcctccagaaagagaaggaatcaagagagaaggagctgatggggttcagcaagtcggtgaatgaagctcgttccaagatggacgttgcccagtccgaactggacatctacctttctcggcacaacactgccgtatcccagctgaccaaagccaaggaagcactcattgcagcatccgagacacttaaggagcggaaggccgctattcgggatattgagggaaaactgccccaaaccgaacaagaattaaaggaaaaggaaaaagagctgcaaaaactgacacaggaggagaccaacttcaagtcgctggttcacgacttattccagaaggtggaggaggcgaagagcagcctggctatgaaccgctcaaggggcaaggtgctcgatgcaattattcaggagaagaaaagtggtagaatcccagggatctatggcaggctcggagatctgggagccatcgatgaaaagtacgatgtggccatttcgagctgctgtcacgccctggactacatcgtggtggattctatcgacatcgctcaagagtgcgtgaacttcctcaagaggcagaatattggggtagcgacatttataggattggacaaaatggccgtctgggcgaaaaaaatgacagaaatccaaactccagagaatacaccccgcctgtttgatctagtgaaggttaaagacgagaagataagacaagcgttctacttcgccttaagggacacactcgtcgcggataacttggaccaggccacgcgagtggcttaccagaaagatagaagatggagggtcgtgaccctccagggccaaatcatcgagcagagcggcacaatgacaggcggcggtagcaaagtcatgaagggacgcatggggtccagccttgtaattgaaatttccgaagaggaggtcaataaaatggaatcccagctacagaacgactccaagaaagccatgcagatacaggagcaaaaggtgcagctcgaggagagagtggtcaaactcagacattccgagcgagagatgcgcaacactctggaaaaatttacagctagcatccagagactcatcgagcaggaggagtacttaaatgttcaggtaaaagagctagaggcaaacgtcctcgccaccgcccctgacaagaaaaagcagaaacttctagaagaaaatgtctccgcctttaagaccgaatacgacgccgtggcagagaaagccggcaaagttgaggcggaagtgaagagacttcacaatacaatcgtagagattaataaccacaaactcaaagcacagcaggacaaattggacaagataaacaagcagctggacgagtgcgcgtctgccatcaccaaagcgcaggtcgccattaagaccgctgataggaacctgcagaaggctcaggacagtgtcctgcgcacagagaaagagattaaggacactgagaaggaagtggatgacctgacagccgaactcaaatcactggaggataaagcagccgaagtcgtcaaaaataccaatgcagccgaaatcagtaagatttcactacatccaatagaagacaacccaattgaggagatctccgtgctaagcccagaagacctggaagctattaaaaaccccgacagcataaccaatcagatcgccttgctggaagcccgctgccacgagatgaaaccgaatttaggggccatcgcagagtacaagaagaaggaagagctgtacctccaaagagtggcagagctggacaagattacttacgaacgtgatagcttcaggcaggcatacgaggacctgagaaagcagcggctgaacgaattcatggctgggttctatattatcaccaataaattaaaggagaactaccagatgttgaccctgggaggggacgcggagcttgagttagtggatagtcttgatcccttctccgaaggaatcatgttcagcgtgaggcctccgaagaaaagttggaaaaaaatctttaacctaagcgggggggaaaagaccctatcaagcctagcccttgtctttgctctgcaccattacaagcctacacccctgtattttatggatgaaatcgacgctgcgctcgactttaagaacgtttctattgttgctttctatatttatgaacaaactaagaacgctcagtttatcattattagccttcgcaacaatatgtttgagatttctgataggctaattggcatatacaagacatacaatattacaaaaagtgttgcagtcaaccccaaagagatagctagcaagggcctgtgctag

SEQ ID NO: 156737 - DNA, 2649 bp, Artificial Sequence
  derived and/or modified sequence
atgccccgggtgaagcccaagctggagaagcagctgcagaaggacaaggaaaaagtggaggaattcaagagcattcctgccaagagcaacaatatcataaatgaaaccacaacccgtaataacgcactcgagaaggagaaggaaaaagaggaaaagaagcttaaggaggtgatggattccctcaaacaggagacccagggcctgcagaaggagaaagagagtcgggaaaaagaacttatgggcttctctaagtctgtcaatgaagcgcggtccaagatggacgttgcgcaatctgagttggacatttatctcagtcggcacaatacggctgtaagccaattgactaaagccaaggaagcactcatcgccgcatcagagacattaaaagaaaggaaagctgcaatcagggatatagaaggtaagcttccacagactgaacaggagctgaaagaaaaggaaaaggaactgcagaagctgacacaggaggagactaacttcaagtccctcgtgcatgacttgtttcagaaagtggaggaagccaaaagctcactggccatgaaccggtcacgtggcaaggtgctggacgcaatcatccaggagaaaaagagcggccgcatccccggaatctacggacgactcggcgacctgggtgcgatcgatgagaagtatgatgtggcgattagttcttgctgtcacgcgctggactatattgtggtcgatagcatcgatatagctcaggagtgtgtaaacttcttaaaacggcagaatattggcgtcgcgacattcatcgggctagataagatggcagtgtgggctaaaaaaatgaccgaaatccagaccccagagaataccccacggctgttcgacttggtgaaggtcaaggatgaaaaaattaggcaagccttctatttcgctttgcgggatacccttgtggccgacaacctcgatcaggcgactagggtggcataccagaaggatagaagatggcgggtcgtgactctgcaggggcagatcatcgaacagtctggtaccatgacgggcggcggttccaaggtaatgaaggggaggatgggatcgagtctagtgatcgaaatctctgaagaagaggtgaataaaatggaaagtcagctccagaacgactctaaaaaggctatgcagatccaagaacagaaagttcaacttgaagaaagggtagtgaaactgcgccatagtgagcgcgagatgcggaataccctggagaagttcacggctagcattcaacgattgattgaacaggaagagtaccttaacgtgcaagttaaagaactggaggcgaacgtgctcgccacggcccccgataagaaaaagcagaaactgctggaggaaaacgttagcgcattcaaaaccgagtatgacgctgtcgcagagaaggctggaaaagtggaagctgaggtcaaacgcttgcacaatactatcgtggagatcaacaatcataaacttaaagcccaacaagataaactcgataagatcaacaaacagctcgatgaatgtgcaagcgccattactaaggcccaggtcgcaatcaaaacggcggatcggaatctccaaaaagcccaggactccgtgttgaggactgagaaggagattaaggataccgaaaaggaggtcgacgacctcacagccgagctgaaatcgctggaggacaaggccgccgaagtcgtgaaaaacactaacgctgcggaagagagccttcctgagatccagaaggagcaccggaacctgctgcaagagcttaaggtgatccaggagaacgagcacgcactccagaaagacgctctctccataaagctgaaattggagcagatcgacgggcacatcgcggaacataactctaagatcaagtattggcataaggagatcagcaagatatcactgcatcccatcgaagataatcccattgaggagatctccgtcctgtcacccgaggatctagaagctatcaaaaatccggactcaataacaaaccagatcgcgcttctagaggcacgatgccatgaaatgaaacctaaccttggagccatcgcggagtataagaaaaaagaggagttgtacctacaacgggtggctgagcttgacaaaatcacatacgagcgcgattccttccgccaggcctatgaggacctgaggaagcagagattaaatgagtttatggcaggcttttacataattacgaataaactgaaggagaattatcagatgctcacacttggcggcgacgccgaattggagctggttgactccctggaccctttttcggagggtataatgtttagtgtgcgtccccctaagaaatcctggaagaagatcttcaacttgagcggcggggaaaaaacactctcctccttagcactggtgtttgctctgcaccattataagccgaccccgctgtacttcatggatgagattgacgcagccctcgattttaagaacgtgtctattgtggccttttacatctatgaacagaccaaaaacgcccagttcatcataatatctctccggaacaacatgttcgagataagcgatcgcctgatcgggatctacaagacctataatatcaccaaaagcgttgctgtcaatcctaaagagatcgcctctaaaggcctgtgctag

SEQ ID NO: 156738 - DNA, 3867 bp, Artificial Sequence
  derived and/or modified sequence
atgcccagaaaaggtacacagccttcaacagccagaaggagggaggaagggccacccccaccctcgcccgacggcgcttcgagcgacgcagagcccgaacccccaagcgggaggactgagtcacctgccacagctgcggaaaccgccagcgaagaactggataataggtcattggaggagatcctcaacagtattccccctccaccccctcccgcaatgacgaatgaggctggtgcccctcgccttatgatcactcatatcgtgaatcaaaacttcaaatcatatgccggagagaaaattctggggccattccacaagagatttagctgtatcatcggaccaaatggatccggcaagagtaacgtcattgattcaatgctgttcgtgttcggatatcgggctcagaagatccggagcaaaaagctgagcgtactgatccacaatagtgacgagcacaaagatattcagagctgcactgtcgaagtccacttccagaaaattattgacaaggagggtgacgattacgaagtgataccgaacagcaatttttacgtgagccgcaccgcgtgcagagacaacaccagtgtgtaccacattagcgggaagaagaaaactttcaaggacgtagggaacctgttgcgtagccatggaatcgatttggatcataaccggttcttgatcctccagggagaggtggaacagatcgcaatgatgaagccaaaagggcaaacagaacacgatgaaggtatgctcgaatatctggaggacataatcggctgtgggagactgaacgagccgattaaagtgctctgccgacgcgttgaaatactgaatgagcacagaggagagaaactgaaccgtgtcaagatggtggaaaaagagaaagatgctctggagggtgaaaaaaacatcgcgattgagtttctgaccctggaaaatgagatcttcaggaaaaaaaaccacgtctgccaatactacatctatgaactccaaaagcgcatcgcggagatggagacgcagaaagaaaagatccacgaggataccaaggagattaacgagaaatccaacattctgagcaatgaaatgaaagcaaagaacaaggatgtcaaagataccgaaaaaaagttaaataaaatcaccaagtttattgaggagaataaagaaaagtttacccagctggatctcgaggatgttcaagtgcgcgagaaactcaaacatgctactagtaaggccaagaaacttgagaagcagttgcagaaggataaggaaaaggtggaggagtttaaaagcatccctgcaaagagtaataacatcatcaatgagacgacgacccgcaacaacgcgctggagaaggaaaaggagaaggaggaaaagaaattaaaagaggtgatggattctctgaagcaggagactcagggcttgcaaaaggagaaagagtcgcgagagaaagagctcatgggtttctctaagtccgttaatgaggctagaagcaagatggatgtagcccagtccgagctggacatctatctatctcggcacaataccgccgtttctcaactgaccaaagcaaaagaagccctgatcgccgctagcgagactttgaaggagcgcaaagcagccattagagacatcgaggggaaactcccccagaccgagcaagaactcaaagaaaaggagaaagaattacaaaaacttacacaagaggaaactaattttaagtctctggtgcacgatctctttcaaaaggtggaagaagcgaagtcaagtctagccatgaacaggagccgaggcaaagttctggacgccatcattcaggaaaagaaaagtggccgaattccgggtatatatgggagactgggagatctgggagccattgacgagaaatacgatgtcgccattagttcctgctgccatgcgctcgactacatcgtggtagattccatagatatagcccaggaatgcgtcaacttcttgaagagacagaacatcggggtagctacgttcataggactagataaaatggctgtttgggcaaagaagatgacagagattcaaacgccagagaacactcccaggctctttgacttggtaaaggtcaaggacgaaaagattcgccaggctttttacttcgcactccgagatactctggtagccgataacttagaccaggccactagggtagcctaccagaaagatagaagatggcgcgtcgtgaccctgcaggggcagattatcgagcagagcggtacaatgaccggtggcggtagcaaggtcatgaaagggagaatggggagttctctggttatcgaaatctctgaagaggaagttaacaaaatggagagtcagctgcaaaatgactccaaaaaagctatgcagatccaggagcagaaagtgcagctcgaggagagagtggtgaaattaagacactcagagcgggaaatgaggaacactctggagaagttcaccgcctcaatccagcgtcttatcgagcaggaggagtatctgaacgtccaggtcaaagagctcgaagcaaatgtactcgctacagcgccagataagaagaagcagaagttactggaagagaacgtgtctgcctttaagactgagtatgatgcagtcgccgagaaggcaggcaaggtggaggccgaggtgaagcggctgcacaatactatcgttgagatcaataaccacaaattaaaagcccagcaggacaaactagataagatcaacaaacagctggacgagtgcgcctcggcgatcacaaaagcacaggtcgcgatcaagactgcggaccgtaatttacagaaagcacaagacagcgtgctgaggaccgagaaggaaatcaaagacaccgaaaaggaagtggatgatcttacagccgaactgaagtctctggaggataaagctgctgaggtggtcaagaacaccaatgctgccgaggagtccctgcctgaaatacaaaaggaacatcgtaacttgttgcaggagttaaaggtgattcaagaaaatgaacacgccctgcaaaaggacgcgctgagtatcaagctaaagctcgaacagattgacggtcacatagctgagcacaacagtaagatcaagtattggcacaaggagattagtaagatctccctgcacccaatcgaggacaatccaatcgaagagattagcgtgttgagccccgaggacttggaggccattaagaatccagattcaattacgaatcagatcgctctcttagaggccagatgccacgaaatgaagccaaatctcggcgcaatcgctgaatacaaaaagaaggaagagctctacctccaacgcgtagccgagctcgacaagataacatatgagagagattctttccgccaagcttacgaggatctgcgaaaacagagactgaatgaattcatggcaggattttatatcatcacaaacaagctgaaagagaattaccagatgctgactctgggaggagatgcagaactcgaacttgtagattccctagaccccttttcggaaggcatcatgttcagtgttagacctccgaaaaaaagctggaagaaaattttcaatttgtcagggggagagaaaactctcagttcactcgcactggtgttcgcactgcatcactacaagcctacccccctctacttcatggacgagatcgatgcagctctggattttaagaacgttagtatcgttgctttttacatttatgaacaaacaaagaacgcccagtttattattatctctctgcgaaacaacatgttcgaaataagcgaccgactgataggtatatataagacatacaatatcaccaaatctgttgccgttaatccaaaagagattgccagcaagggcttgtgttag

SEQ ID NO: 156739 - DNA, 3867 bp, Artificial Sequence
  derived and/or modified sequence
atgcctaggaagggaacacagccgtctaccgcacgcaggcgcgaggagggaccacctccaccgagccctgatggcgctagcagcgacgccgaaccagaacctccatccggcaggaccgaaagtcccgctaccgccgcagaaactgcgagcgaggaattggacaacaggagcctggaagagatactgaactctataccacctccccctccccctgccatgacaaatgaggctggggcacctaggctgatgatcacacacatcgtaaaccagaacttcaagagttatgcaggggagaagatcctcggccctttccataagagatttagctgtattattggaccaaatggctcaggcaaatctaatgtgattgacagtatgctcttcgtgtttggctatagagcacagaaaattcggtccaaaaaattatctgtgcttatccataacagcgacgagcacaaggacattcagagctgtacagtggaagtgcatttccagaaaataatcgacaaggagggggacgactatgaagtgatcccaaatagcaatttttacgtgagtaggaccgcttgtagagacaataccagcgtgtaccatatctcgggaaaaaaaaagacgttcaaggacgtgggaaatttgctcaggagccatggaatcgatctcgaccacaaccgcttccttatactgcaaggcgaagttgagcagattgccatgatgaagccaaagggacagaccgagcacgacgagggaatgctggagtatcttgaagatatcatcgggtgcggtcgtctgaatgaacctatcaaggttctctgcagacgcgtcgagattctgaatgagcatcggggagaaaagctgaatagggtgaaaatggttgaaaaagagaaggatgccctggaaggcgaaaaaaacatcgcaatcgaattcttaactctcgagaacgagatattccgaaagaaaaaccacgtgtgccagtactacatttatgaacttcagaagaggatagctgaaatggagacacaaaaggagaagatccacgaagatacaaaggaaattaacgagaagagtaatattctgagcaatgagatgaaggcaaagaataaagacgtcaaagacacagagaaaaaacttaacaagattactaagtttatcgaagagaacaaagaaaagttcacacagctggacctggaggatgtccaggtgcgcgagaaactaaagcacgctacctctaaggctaagaaactggagaaacagctgcagaaggataaggaaaaagtggaggagtttaagagtatacctgcgaagagcaacaatattatcaacgaaacgactactcgtaataacgctctcgaaaaggaaaaagagaaggaggaaaagaaacttaaggaggttatggattctctgaagcaagaaacccagggtctccaaaaggagaaggagagtagggagaaagaattgatgggattttctaagtctgtgaacgaggccagaagcaaaatggatgtggcacagtctgagcttgatatttacctaagcagacataacaccgccgtaagtcagctgaccaaagccaaagaggccctgattgcagccagcgaaaccctgaaagaacgcaaagctgctataagggacatcgaaggcaagctgcctcagaccgagcaggaattgaaagaaaaagaaaaagaattgcagaagctcacacaggaagaaaccaatttcaaaagcctggtgcacgacctctttcagaaagtggaagaagcgaagtcaagtctcgcgatgaacaggtcgcgaggaaaagtgctcgatgcaattatccaagagaagaaatccggtagaatccccggaatatacggccgattgggggatctaggggctatagatgaaaagtatgacgtggccatatccagctgctgccatgccctagattacatagtcgtggattccatcgatattgcccaagagtgcgtgaatttcctgaaacggcagaatattggtgttgccacctttatcggacttgataagatggccgtgtgggctaaaaagatgacagagattcagacaccagaaaacacacctcggctgtttgatttagttaaggtcaaggacgaaaagatccgacaggccttttacttcgctctgcgcgacactctggtagcagataatctggaccaggctactcgcgtggcttatcagaaggacagaagatggcgggtggtgactctgcaggggcaaatcatagagcaatcaggcacaatgacaggcggaggatctaaggtgatgaagggacgcatgggtagcagccttgttatcgagataagtgaggaagaggtgaacaaaatggagtcccagcttcagaatgacagtaagaaagcgatgcagattcaggagcaaaaggtacagctggaagagcgtgtggtcaagcttaggcactcggagcgtgaaatgagaaataccctcgaaaagttcacagcttctatccaacgactgattgagcaggaggaatatctcaacgtgcaggtgaaagagttggaagctaatgtattagccacagctccagacaagaagaagcagaaacttctcgaggagaacgttagtgcttttaagaccgagtacgacgccgtggcggagaaagcaggtaaggtggaggcagaggttaaacgactgcacaacaccattgttgagattaataatcataaactaaaggctcagcaggataaactggataaaattaacaagcagctggacgagtgtgcttccgcgatcactaaagcccaagtcgcgattaaaaccgcagataggaatctgcagaaggcccaggacagcgtgctgcgtacggaaaaagagatcaaggacaccgagaaggaggtggatgacctcacagcagagttgaaaagcctggaggacaaagcagccgaagtagtgaagaatactaatgccgctgaagaaagcctgccagagatacagaaggagcataggaacctgctacaggaacttaaggtgattcaggagaacgagcacgcgctacaaaaagacgcccttagcataaaactgaaactcgagcaaattgatgggcatattgccgagcataacagcaaaattaagtattggcataaggaaatttccaagatttcgttacatcccatagaggacaatcctatcgaggaaatctcagtcttgtcaccggaggacctggaagccatcaaaaatccggacagcatcactaatcagatagctctcctggaggccagatgccatgagatgaagccaaatctgggcgctattgcggaatataagaaaaaggaggagctgtatctacagcgcgtagcggagctggataagattacatatgaacgagactcatttcggcaagcatacgaggatctgcgcaaacagaggctaaacgagtttatggccggattttatatcattactaataagctgaaagaaaactatcagatgttaactctaggaggagacgcagagctcgaactcgtggatagccttgaccccttctcagagggaatcatgtttagcgtcagacctcccaaaaaatcatggaaaaagatttttaacttgtccgggggagagaagactttgagctccctagcattggtctttgcactccatcactataagcccacgccactctatttcatggacgaaattgacgcagctctggattttaaaaacgtttccatcgtcgccttttatatctacgaacagactaaaaatgctcagtttatcataattagtctgaggaataacatgtttgaaataagcgataggctgatcgggatttataagacctacaatatcaccaaaagcgtggcggtgaaccctaaggagatagcatcaaaaggcctgtgttag

SEQ ID NO: 156740 - DNA, 3693 bp, Artificial Sequence
  derived and/or modified sequence
atgcctaggaaaggcacgcaacccagcaccgccagacggcgtgaggagggtccccctcctcccagcccagacggcgcaagctccgatgcagagcccgagcctccgagcggtagaacagagtcccccgcaaccgctgccgaaactgcaagcgaggaacttgacaataggagcctcgaggagattctgaattcaattccccctccccctccgcctgccatgacaaacgaagccggagcacccagactcatgattacacacattgtgaatcagaattttaagagctacgctggtgaaaaaattctcggacctttccataagcggttttcctgcatcattggtcccaatggcagtggcaagagcaacgtgatcgatagcatgctgttcgtttttgggtatagggcacagaaaattagaagtaaaaaactgtccgtcctgatccacaacagcgacgaacataaggatattcaatcctgcacagtggaggtgcattttcagaagattatcgacaaagagggggacgactatgaggttatccccaactcgaacttctacgtctctaggactgcttgcagagataatacatctgtttatcacatatcaggaaagaagaagaccttcaaggatgttgggaatctgctgcggagccatgggattgatttggatcataatcggtttctgatattgcagggggaagtggagcaaattgcaatgatgaagcctaaaggacaaacagagcacgatgaaggcatgctggaatatttagaggatatcatcgggtgcggacggctgaatgaacccatcaaagtcttgtgtaggagagtggagatcctcaacgagcatcgaggagaaaagctgaaccgcgttaagatggtggagaaagaaaaagacgctctggagggagaaaaaaacatagccatagaatttcttaccctggagaatgaaattttccggaaaaagaatcacgtgtgccagtattacatttatgaattgcagaaaaggatagctgaaatggaaacccagaaggagaagatacacgaggacacaaaagagatcaacgagaaatccaacatattatcaaacgaaatgaaggctaagaacaaggacgttaaggacaccgagaaaaagttgaacaaaatcactaagttcatagaagaaaacaaggaaaaattcacacagctagatttagaggatgtacaggttcgcgaaaagctgaaacatgccacctctaaggccaaaaaacttgagaagcagctgcaaaaagacaaggaaaaagtggaggaatttaagagcattccagctaaaagcaataacataatcaatgaaacaaccacaagaaataacgccctggagaaggaaaaagaaaaggaagaaaagaaactgaaagaagttatggattcactgaaacaggagacacagggtctgcaaaaagagaaagagtctcgcgaaaaggagctcatggggttctccaagtctgtgaacgaggctcgatctaaaatggacgtggcgcagtcggaattggatatctatctgtctaggcacaataccgctgtctcgcagctaacaaaggcaaaggaggcactgatcgccgcttccgagacattaaaggagagaaaggctgcgattagagatattgaaggcaagttgccccagaccgaacaggagctgaaggaaaaggagaaagagctgcagaagttgactcaggaagaaactaactttaaatctcttgtccatgacctatttcagaaagtggaagaggcaaagtcaagcctcgccatgaatcggagtaggggaaaagttcttgatgccatcattcaggagaaaaagtcaggcaggatccctggtatctacggcagactaggggatctcggggcaattgatgagaaatacgatgtggcaatttcgagttgttgccatgcgttagattatattgtggtggactctatagatatcgcccaggagtgcgttaatttcctgaaacgacagaacattggcgtggccactttcataggactcgacaagatggcggtgtgggccaaaaaaatgaccgaaatacagacgcctgagaacacacctcggctgtttgatctggttaaagtaaaggatgaaaaaatccgtcaagctttctactttgcgcttagagacaccctggttgctgacaatctggaccaggccacacgggtggcctatcagaaagacaggcggtggcgagtcgtgactctgcagggacagattattgagcaaagcggcaccatgacaggcggagggagcaaagtaatgaagggcagaatggggagctctctggtgattgagatcagcgaagaagaggttaacaagatggagagtcagcttcagaacgattccaagaaggctatgcagatccaagagcagaaagtgcaactggaagagagagttgttaaattacgccacagcgaacgcgagatgcgcaatactctagagaagtttaccgctagtatccaacggctgatcgaacaggaggagtacctgaacgtccaagtgaaagagctggaagctaatgtcctggctactgcacccgacaagaaaaaacagaagttacttgaagagaatgtgagtgccttcaagaccgagtacgacgcggtggcagagaaggcaggaaaagtggaagcggaggtgaagcgcctccataatacaattgtggaaataaataatcataaactgaaggctcagcaggacaagcttgacaagatcaacaaacagctggatgaatgcgcctctgcgattacaaaggcacaggtggcaattaaaaccgctgaccggaatctccaaaaagctcaggactctgtactccggacagaaaaggaaataaaagacacggagaaagaggtggatgacctgacagcagagttaaagagcctggaagataaggctgcggaagtcgtgaagaataccaatgccgcagagatcagcaaaattagtcttcatccaatcgaggacaaccccatcgaagagatctctgttctctcccctgaggacctggaggccatcaagaatcccgacagcatcacaaatcagatcgccctgttggaagcgaggtgtcacgaaatgaagccgaacctcggggctatagcagaatataaaaagaaggaagaactgtatctccaaagagtggccgaactggacaaaattacctacgaacgggactctttcaggcaggcgtacgaagatctgcgaaaacagagactgaacgagttcatggctggtttttacattataaccaacaagttaaaggaaaactaccagatgctgactctgggcggagacgctgaactagagctggtggacagtctggatccattcagcgaaggcattatgttctctgttaggcctcccaaaaagtcctggaaaaaaatctttaatctgagtggtggggagaaaacgttgagcagccttgcgcttgtgtttgcactccaccactacaaacctacccccctctactttatggacgagattgacgccgcactggacttcaagaatgtgagtatcgtggccttctacatttatgagcagaccaaaaacgcccagttcattatcattagtctcaggaacaacatgttcgagatatccgatagacttattggtatatacaagacatataacattacaaaatctgtagccgttaacccgaaggagatcgcctctaaagggctgtgttag

SEQ ID NO: 156741 - DNA, 3693 bp, Artificial Sequence
  derived and/or modified sequence
atgcctcgaaaaggaacacagccctcgacagcgagaaggagagaggagggcccacctcctcccagccccgatggagcctcttctgatgccgagcccgagccccctagcggccgaactgagtcaccagccaccgctgccgagactgcctcggaagagctcgataatagatctctagaagaaattcttaacagtattcccccaccaccaccacctgccatgaccaacgaggccggagccccacgtctgatgatcacgcatattgtgaatcagaactttaaatcatacgctggggaaaagatacttgggccttttcacaaacgctttagctgtattatagggcctaacggctctggtaagtccaatgtgattgatagcatgctctttgtattcggatatagggcacagaagattcgatccaaaaagttgtcagttctcatccacaatagcgatgaacataaggatatacagtcttgtactgttgaagtgcactttcagaaaatcatagataaagagggcgatgactatgaagtgattcccaacagtaatttctacgtgtccagaaccgcatgtcgcgacaacacgtctgtttaccatataagcggtaagaagaagacctttaaagacgtaggtaatctgttgcgctcccacggcatcgacttggaccacaaccggtttctgattctgcaaggtgaagttgagcagattgccatgatgaagccgaaaggacagacagaacatgatgaaggcatgctagagtacctagaggacattatcggatgtggcaggctcaacgaacccattaaggtactttgccgacgggtggagatactcaatgagcaccgaggagaaaagctgaacagggtgaagatggtagaaaaggaaaaggatgccttggaaggagaaaagaacatcgcgatcgagttcctgacactggagaatgaaatttttagaaagaaaaaccatgtgtgtcaatactacatctatgagctccagaagcgtatcgcggagatggaaacacagaaagaaaagatacacgaagacaccaaggagattaacgagaagtcaaacatcctgagcaatgagatgaaagccaaaaacaaagacgtgaaagataccgaaaaaaagcttaacaagataactaaattcattgaagagaataaggaaaagttcacacaactggacctggaagatgtccaggttagggagaaactgaagcacgctacatcgaaggcaaagaaactggaaaaacagttgcagaaagacaaagaaaaggtggaggagtttaaatcgattccagccaaaagcaacaacatcatcaacgaaacaaccaccaggaataatgcactggagaaggagaaagaaaaggaagaaaagaagctcaaggaagtcatggactccctgaagcaggagacccaggggcttcagaaagaaaaggagtcaagagagaaggagctgatgggcttcagtaaatccgtgaatgaggctcggagcaagatggacgttgctcagagtgaattggatatttacctgagcagacataataccgccgtgtcacagctgaccaaagcgaaagaagccttgatcgccgcttcagaaacactgaaggagcggaaagcagccatccgggatatcgaaggcaagcttccgcagacagagcaagagctgaaggagaaagaaaaagagctccagaagcttactcaagaagagacgaactttaagtcattggtccacgatctgttccagaaggtagaggaagccaaaagcagcctggccatgaacagatcccgaggcaaagtgctcgatgcgatcattcaagaaaaaaagtccggccgtattccgggaatctacggcaggctgggagatttgggggcaattgacgaaaagtacgatgtggctatcagctcctgctgtcatgcgctggactatatcgtagtggacagtatcgatattgcacaggaatgtgtgaattttcttaaacgccagaacatcggcgtggcaacgttcattggcctggacaagatggccgtttgggccaagaagatgacagaaatccagactccggagaacaccccccgtttgtttgatctggtaaaagttaaggacgaaaaaatccgtcaggcattctacttcgccctgagagataccttggttgctgataatctcgatcaggccactagggtggcataccagaaggaccggagatggcgtgtcgttacactgcagggtcagattatcgaacagtctggtactatgacaggaggcggaagcaaggtgatgaaaggtcgaatggggagttccttagtaatcgaaatttctgaggaggaagtcaataagatggagtctcagctgcagaacgattcgaagaaggccatgcaaatccaagagcagaaagtgcagctggaggagagagtggtcaagctgcgccattctgagcgggagatgagaaacaccctcgagaaattcacggcatcaatccagagactcattgagcaagaagaatacttaaacgtgcaggtaaaagaactggaagccaatgtgctcgccactgcccctgataagaaaaagcagaagctcctggaagaaaatgtaagtgctttcaaaacagagtacgacgctgtcgcggagaaagccggtaaagtcgaggccgaggtaaagaggctgcataacactattgtggagataaacaatcacaagctaaaggcgcaacaggacaagttggacaaaatcaacaaacagctggacgagtgtgcctcagctataaccaaggcacaagtcgccattaagactgctgacaggaatctgcagaaggcccaggattcagttctgcgcaccgagaaggagatcaaagatacagagaaagaagtggacgacctaaccgcagaacttaaatcccttgaggataaagcagctgaagttgtgaaaaacaccaatgcagcagagatctccaagatttcactgcatccaattgaagataatccaattgaggagatttctgtgttaagtcccgaagatctggaagccattaagaaccccgattctatcaccaatcagattgcactcttggaagcacgctgccatgagatgaaaccaaaccttggcgctattgcagagtacaagaagaaggaggagttatatctgcagcgtgtggccgagctggacaaaatcacttacgaacgcgactcattccggcaggcttacgaagatctccgcaaacagcggttgaatgagttcatggctgggttttacatcatcaccaacaagctgaaagaaaattaccagatgcttacactagggggagatgccgagctggagctggtggactccttagacccttttagtgaggggattatgtttagtgtgagacctccgaaaaaatcctggaaaaagatctttaacctgtcggggggagaaaagacattgagcagcctggctctcgtcttcgcgttgcaccattacaagccaacacctttatactttatggatgaaattgacgccgcattggatttcaagaacgtttccattgtggcattttacatctatgagcagacaaagaatgcacagttcataattatttcactgcgaaataacatgtttgagatttcagatcggctcatcggaatttacaagacctataacataacgaaatcagtggctgtgaaccccaaagaaatcgcatccaaagggctttgctag

SEQ ID NO: 156742 - DNA, 2649 bp, Artificial Sequence
  derived and/or modified sequence
atgcccagagtcaagcccaaactggagaagcagttgcaaaaagataaagaaaaagtagaagagttcaagtcaattcccgctaagtctaacaacatcatcaatgaaacaaccactcgcaacaacgcactggaaaaggagaaagagaaggaagaaaaaaagctcaaagaagtcatggacagcctgaagcaggaaactcagggattgcagaaggaaaaagaatctcgggaaaaagaattgatggggtttagtaagtctgtgaatgaagccaggtctaagatggacgtcgctcaaagcgagctagacatttacttgtcccgacacaataccgcggtttcacagctcaccaaggccaaggaggccctgattgccgctagcgagaccctgaaggagcgaaaggctgctatcagagacatcgagggaaagctgccacagaccgaacaggaattaaaggagaaggagaaggaactgcagaagcttacccaggaagaaactaactttaaatctctggttcatgatctgttccagaaggtggaagaagccaagtcatctttagccatgaatcgctcaagggggaaggtgttagacgccattatacaggagaaaaagagcggccgaatccctggtatctacggaagattaggtgacctcggggctatcgatgaaaaatacgacgtagccataagttcatgttgccacgccctggactacattgtggtggacagcatcgacatagcccaggaatgtgtgaacttccttaaaagacaaaacatcggagtggcgactttcataggcctcgataaaatggccgtctgggctaagaaaatgacggaaattcagactcccgagaataccccccgactgttcgatctcgtcaaagtgaaggacgagaaaataagacaggccttttacttcgctctgagagatacacttgtggcagataatttagaccaggcgacgcgcgtggcatatcagaaggatagacggtggcgggttgtaactctccaaggacagattattgagcaatcggggaccatgacaggtgggggtagcaaggtcatgaagggtaggatggggtcatccctcgttattgagatcagcgaggaggaggtaaataagatggaaagccagcttcagaatgattcgaaaaaggcaatgcagattcaggagcagaaggtgcagttagaggaaagggtcgtcaagcttcggcactccgaacgagaaatgaggaatacactggagaaatttaccgcaagtatacagaggcttatcgagcaagaggaatacctgaatgtccaggtcaaggagttggaagctaacgttctggccactgcccctgacaagaagaagcagaagcttttggaagagaatgtgtcagcctttaagactgaatacgacgctgtcgctgagaaagccggtaaagtggaagccgaagtcaagcgactccataatactattgtagagattaacaatcacaaactgaaagcccagcaggacaagctcgataaaatcaataagcagttagacgagtgtgcaagcgccattaccaaagcacaagtcgcaattaagacagcagatcggaacctgcagaaggctcaggattctgtcctcagaaccgagaaagaaatcaaagacactgaaaaagaggttgacgacctgacagccgaactcaagtctctggaggataaagccgctgaggttgtgaagaacacgaacgccgcagaggagtctctccctgaaattcagaaggagcaccggaacctgttgcaggaattaaaagtaatacaagaaaacgagcatgctttacagaaggacgctctgagtatcaagctgaagcttgagcagatcgacggtcacatcgcggaacacaattccaaaattaagtactggcacaaggaaatctccaagatttctctccatcccatcgaagacaatccaatcgaggaaatctctgtgctctctcccgaagacctggaggcgattaagaatcccgactcaatcacaaaccagatcgcactgctagaagcccgatgtcacgaaatgaaacctaacttgggtgcaattgccgagtataagaagaaagaggagctctacctgcaacgtgttgcagagctggacaaaataacttatgaaagggacagctttcggcaggcctacgaggacttgagaaaacagaggctcaacgagtttatggcgggtttctatataatcactaataagctgaaagaaaactatcagatgctgacccttggaggtgacgctgaacttgaactggtcgactcactggaccctttcagcgaaggaattatgttttcggtgagaccccctaagaaatcttggaagaaaatttttaacctgtccggaggcgaaaaaaccctgtcaagcctggcgctggtattcgccttgcatcactacaagcccacccccctatatttcatggatgagatcgatgccgcactcgacttcaaaaatgtgtcgatcgtggccttctacatctatgagcagaccaaaaatgcccagtttataattatttccctgcgcaataacatgtttgagataagtgaccggctgattggaatctataaaacatataacataacaaaatcagtcgccgtgaaccccaaggagattgctagtaagggtctgtgttag

SEQ ID NO: 156743 - DNA, 5033 bp, Artificial Sequence
  derived and/or modified sequence
cggagccgaaacaccggtaggagcggggaggtgggtactacacaaccgtctccagccttggtctgagtggactgtcctgcaggtaaagtacttctcttcctggtcaggttgtcacgctcttacttcctgccttgtccgcgagcgcctggaaaatagaggccttgagcccgagcggcgaagtccgggcttgaagctgccgctgggagatttctcttgctgtcacccctcccccctcggccgctccccggcggcccgggctcccgcgcgcagctcccgggcgccacttttccaagctactcaaatgtctcggggaggccctgagcctcgcagatcttttctttaaaaaatcctagtctctatctggaaaagggcgtctccccctacccctcttccttctgccaacggactagtcaccgggtctcagccttcgctggtgacctttcatggtttactgtccaacgggactccgcctggggagctggagagacaaactcttgccactccaaaattagcaagcgctgccagcgtccgacttgaagttgctagtggttagtcccagccttcgcccttcgcggtccgaccgctgagaggagggagacttcgttatgccccgggccgtcaacggcgccaggagctaaagggcgggcagacgaaagcgggcggcgagtcgccagttagtcttcaccgctctggagagagttgctagccacgggatcctgacccggacacgaactcgtttctccacgtcggtgcgcgcttgcatccctggccccgaaagcgtgggaatgtccggaaatgctggcgtatgggagttccttaattagaaatgcgttagcgaatattatacgcttatactatgggcggacgggtggagagccttaaaaacaacaacaacaaactaagcagttgctcaatcgttgattgatcctcaggcacgtctagattttcccacttacataggtcttgttaagaaaccagtcctgccttcttgccactcgtgtctttcgatggctcccttcccgaagtcccgctgcctctaagcggagtgttaagcggggctctcggaagccggtggaccgagatttccccgggtggggcgggcgcggtgtagcggcccgcgggctgacttgctcccggctgtcccccggccccagcgaccatgccccgtaaaggcacccagccctccactgcccggcgcagagaggaagggccgccgccgccgtcccctgacggcgccagcagcgacgcggagcctgagccgccgtccggccgcacggagagcccagccaccgccgcagagactgcaagtgaggaacttgataatagaagtttagaagagattttgaacagcattcctcctcccccgcctccagcaatgaccaatgaagctggagctcctcggcttatgataactcatattgtaaaccagaacttcaaatcctatgctggggagaaaattctgggacctttccataagcgcttttcctgtattatcgggccaaatggcagtggcaaatccaatgttattgattctatgctttttgtgtttggctatcgagcacaaaaaataagatctaaaaaactctcagtattaatacataattctgatgaacacaaggacattcagagttgtacagtagaagttcattttcaaaagataattgataaggaaggggatgattatgaagtcattcctaacagtaatttctatgtatccagaacggcctgcagagataatacttctgtctatcacataagtggaaagaaaaagacatttaaggatgttggaaatcttcttcgaagccatggaattgacttggaccataatagatttttaattttacagggtgaagttgaacaaattgctatgatgaaaccaaaaggccagactgaacacgatgagggtatgcttgaatatttagaagatataattggttgtggacggctaaatgaacctattaaagtcttgtgtcggagagttgaaatattaaatgaacacagaggagagaagttaaacagggtaaagatggtggaaaaggaaaaggatgccttagaaggagagaaaaacatagctatcgaatttcttaccttggaaaatgaaatatttagaaaaaagaatcatgtttgtcaatattatatttatgagttgcagaaacgaattgctgaaatggaaactcaaaaggaaaaaattcatgaagataccaaagaaattaatgagaagagcaatatactatcaaatgaaatgaaagctaagaataaagatgtaaaagatacagaaaagaaactgaataaaattacaaaatttattgaggagaataaagaaaaatttacacagctagatttggaagatgttcaagttagagaaaagttaaaacatgccacgagtaaagccaaaaaactggagaaacaacttcaaaaagataaagaaaaggttgaagaatttaaaagtatacctgccaagagtaacaatatcattaatgaaacaacaaccagaaacaatgccctcgagaaggaaaaagagaaagaagaaaaaaaattaaaggaagttatggatagccttaaacaggaaacacaagggcttcagaaagaaaaagaaagtcgagagaaagaacttatgggtttcagcaaatcggtaaatgaagcacgttcaaagatggatgtagcccagtcagaacttgatatctatctcagtcgtcataatactgcagtgtctcaattaactaaggctaaggaagctctaattgcagcttctgagactctcaaagaaaggaaagctgcaatcagagatatagaaggaaaactccctcaaactgaacaagaattaaaggagaaagaaaaagaacttcaaaaacttacacaagaagaaacaaactttaaaagtttggttcatgatctctttcaaaaagttgaagaagcaaagagctcattagcaatgaatcgaagtagggggaaagtccttgatgcaataattcaagaaaaaaaatctggcaggattccaggaatatatggaagattgggggacttaggagccattgatgaaaaatacgacgtggctatatcatcctgttgtcatgcactggactacattgttgttgattctattgatatagcccaagaatgtgtaaacttccttaaaagacaaaatattggagttgcaacctttataggtttagataagatggctgtatgggcgaaaaagatgaccgaaattcaaactcctgaaaatactcctcgtttatttgatttagtaaaagtaaaagatgagaaaattcgccaagctttttattttgctttacgagataccttagtagctgacaacttggatcaagccacaagagtagcatatcaaaaagatagaagatggagagtggtaactttacagggacaaatcatagaacagtcaggtacaatgactggtggtggaagcaaagtaatgaaaggaagaatgggttcctcacttgttattgaaatctctgaagaagaggtaaacaaaatggaatcacagttgcaaaacgactctaaaaaagcaatgcaaatccaagaacagaaagtacaacttgaagaaagagtagttaagttacggcatagtgaacgagaaatgaggaacacactagaaaaatttactgcaagcatccagcgtttaatagagcaagaagaatatttgaatgtccaagttaaggaacttgaagctaatgtacttgctacagcccctgacaaaaaaaagcagaaattgctagaagaaaacgttagtgctttcaaaacagaatatgatgctgtggctgagaaagctggtaaagtagaagctgaggttaaacgcttacacaataccatcgtagaaatcaataatcataaactcaaggcccaacaagacaaacttgataaaataaataagcaattagatgaatgtgcttctgctattactaaagcccaagtagcaatcaagactgctgacagaaaccttcaaaaggcacaagactctgtcttgcgtacagagaaagaaataaaagatactgagaaagaggtggatgacctaacagcagagctgaaaagtcttgaggacaaagcagcagaggtcgtaaagaatacaaatgctgcagagatttcaaaaatatcactgcatcctatagaagataatcctattgaagagatttcggttctaagcccagaggatcttgaagcgatcaagaatccagattctataacaaatcaaattgcacttttggaagcccggtgtcatgaaatgaaaccaaacctcggtgccatcgcagagtataaaaagaaggaagaattgtatttgcaacgggtagcagaattggacaaaattacttatgaaagagacagttttagacaggcatatgaagatcttcggaaacaaaggcttaatgaatttatggcaggtttttatataataacaaataaattaaaggaaaattaccaaatgcttactttgggaggggacgccgaactcgagcttgtagacagcttggatcctttctctgaaggaatcatgttcagtgttcgaccacctaagaaaagttggaaaaagatcttcaacctttcgggaggagagaaaacacttagttcattggctttagtatttgctcttcaccactacaagcccactcccctttacttcatggatgagattgatgcagcccttgattttaaaaatgtgtccattgttgcattttatatatatgaacaaacaaaaaatgcacagttcataataatttctcttcgaaataatatgtttgagatttcggatagacttattggaatttacaagacatacaacataacaaaaagtgttgctgtaaatccaaaagaaattgcatctaagggactttgttgaactttatgctgaagattcttcaagttgattcagtgtattactgatttttttctatttgtaaaggattatgagttgtataaaatacatactccctaaactagatcatgaaactggtttctgttttatgcagttgtcatttgtaaagtctaataaaatattctctataattgcttctagatta

SEQ ID NO: 156744 - DNA, 4233 bp, Artificial Sequence
  derived and/or modified sequence
ttgtatagtaagtttattgtatagtaacttgtaagtatattcgtaaaaggtaaaaccaaaattttactcctatggtaaaatttttatatacctagacattgtagtcactggaaaatgtgttattttccctccaacttagaaaggcaaaatagctgtcataatcaaaaatacaggtgcttcttcaactatggggagagggatcatcttggaataaggagagttttaggatcctgccttattaagagcctggacatatttatagaggaagtgttccaggtaggaaatgtggttttaaaatatgtgcacattcaaaataatgacttacaatatacttgctttgctaggaaactgaataaaattacaaaatttattgaggagaataaagaaaaatttacacagctagatttggaagatgttcaagttagagaaaagttaaaacatgccacgagtaaagccaaaactggagaaacaacttcaaaaagataaagaaaaggttgaagaatttaaaagtatacctgccaagagtaacaatatcattaatgaaacaacaaccagaaacaatgccctcgagaaggaaaaagagaaagaagaaaaaaaattaaaggaagttatggatagccttaaacaggaaacacaagggcttcagaaagaaaaagaaagtcgagagaaagaacttatgggtttcagcaaatcggtaaatgaagcacgttcaaagatggatgtagcccagtcagaacttgatatctatctcagtcgtcataatactgcagtgtctcaattaactaaggctaaggaagctctaattgcagcttctgagactctcaaagaaaggaaagctgcaatcagagatatagaaggaaaactccctcaaactgaacaagaattaaaggagaaagaaaaagaacttcaaaaacttacacaagaagaaacaaactttaaaagtttggttcatgatctctttcaaaaagttgaagaagcaaagagctcattagcaatgaatcgaagtagggggaaagtccttgatgcaataattcaagaaaaaaaatctggcaggattccaggaatatatggaagattgggggacttaggagccattgatgaaaaatacgacgtggctatatcatcctgttgtcatgcactggactacattgttgttgattctattgatatagcccaagaatgtgtaaacttccttaaaagacaaaatattggagttgcaacctttataggtttagataagatggctgtatgggcgaaaaagatgaccgaaattcaaactcctgaaaatactcctcgtttatttgatttagtaaaagtaaaagatgagaaaattcgccaagctttttattttgctttacgagataccttagtagctgacaacttggatcaagccacaagagtagcatatcaaaaagatagaagatggagagtggtaactttacagggacaaatcatagaacagtcaggtacaatgactggtggtggaagcaaagtaatgaaaggaagaatgggttcctcacttgttattgaaatctctgaagaagaggtaaacaaaatggaatcacagttgcaaaacgactctaaaaaagcaatgcaaatccaagaacagaaagtacaacttgaagaaagagtagttaagttacggcatagtgaacgagaaatgaggaacacactagaaaaatttactgcaagcatccagcgtttaatagagcaagaagaatatttgaatgtccaagttaaggaacttgaagctaatgtacttgctacagcccctgacaaaaaaaagcagaaattgctagaagaaaacgttagtgctttcaaaacagaatatgatgctgtggctgagaaagctggtaaagtagaagctgaggttaaacgcttacacaataccatcgtagaaatcaataatcataaactcaaggcccaacaagacaaacttgataaaataaataagcaattagatgaatgtgcttctgctattactaaagcccaagtagcaatcaagactgctgacagaaaccttcaaaaggcacaagactctgtcttgcgtacagagaaagaaataaaagatactgagaaagaggtggatgacctaacagcagagctgaaaagtcttgaggacaaagcagcagaggtcgtaaagaatacaaatgctgcagaggaatccttaccagagatccagaaagaacatcgcaatctgcttcaagaattaaaagttattcaagaaaatgaacatgctcttcaaaaagatgcacttagtattaagttgaaacttgaacaaatagatggtcacattgctgaacataattctaaaataaaatattggcacaaagagatttcaaaaatatcactgcatcctatagaagataatcctattgaagagatttcggttctaagcccagaggatcttgaagcgatcaagaatccagattctataacaaatcaaattgcacttttggaagcccggtgtcatgaaatgaaaccaaacctcggtgccatcgcagagtataaaaagaaggaagaattgtatttgcaacgggtagcagaattggacaaaattacttatgaaagagacagttttagacaggcatatgaagatcttcggaaacaaaggcttaatgaatttatggcaggtttttatataataacaaataaattaaaggaaaattaccaaatgcttactttgggaggggacgccgaactcgagcttgtagacagcttggatcctttctctgaaggaatcatgttcagtgttcgaccacctaagaaaagttggaaaaagatcttcaacctttcgggaggagagaaaacacttagttcattggctttagtatttgctcttcaccactacaagcccactcccctttacttcatggatgagattgatgcagcccttgattttaaaaatgtgtccattgttgcattttatatatatgaacaaacaaaaaatgcacagttcataataatttctcttcgaaataatatgtttgagatttcggatagacttattggaatttacaagacatacaacataacaaaaagtgttgctgtaaatccaaaagaaattgcatctaagggactttgttgaactttatgctgaagattcttcaagttgattcagtgtattactgatttttttctatttgtaaaggattatgagttgtataaaatacatactccctaaactagatcatgaaactggtttctgttttatgcagttgtcatttgtaaagtctaataaaatattctctataattgcttctagattacaaaaatatgacaatcttgtaagtagcagactatggagaaaaatgagttacctggagggtcaggtaacttgccaaactaaaaagtatgttagttgaggcaaagtcctaagcaaggttgtgctatcaaggctcagcataccttcgtgggcctttgatttaccaacactggaaatgcctgccaactaatcttggatagattctttaaggcattccacttagcttgccagttgagacaatcaccacagttattacccaaatactatgaacatatttttgtaaaccagtcattctgaattatagtgatgagaatttaaatatatgcttttctagaatttgatgtttgaccatttatgacttaattaccagagagccagtaaattaggacagtgtttcaacaagcctaggctatctcgtaagttgaaaaatatcccactatagttgcttcatgagtatgaagtaagatggcctctgatttacactggttcaatttacaaattttcaactttatgataggtttatccgggtactaaatgcatttcaacttgatagtttcaacttatgataggtttaccaggatgtagtcccactgttgaggagcatctatttaggggttaattactttagtaataagtggaaagtaagataccttgagtaatgtttgcctataaaattgtcagcgtatttttacactattggctcaagaatgttataatgctaagggacataagttggcaaccacttggtttttggaaggactttcggtattgtattagaagtctgccctagctgttaaatttctgggtatttatcctaaggaattaattaaagagttaattgttcctttcttcagtgggccattgttttagatatttaaaaaatccaacagtttctatcataatgtaactgtaaaaatgtaaacacattattagcatggacttttaaataaagatttaaagaaagcaag

SEQ ID NO: 156745 - protein, 423 aa, Artificial Sequence
  derived and/or modified sequence
MSASAVFILDVKGKPLISRNYKGDVAMSKIEHFMPLLVQREEEGALAPLLSHGQVHFLWIKHSNLYLVATTSKNANASLVYSFLYKTIEVFCEYFKELEEESIRDNFVIVYELLDELMDFGFPQTTDSKILQEYITQQSNKLETGKSRVPPTVTNAVSWRSEGIKYKKNEVFIDVIESVNLLVNANGSVLLSEIVGTIKLKVFLSGMPELRLGLNDRVLFELTGRSKNKSVELEDVKFHQCVRLSRFDNDRTISFIPPDGDFELMSYRLSTQVKPLIWIESVIEKFSHSRVEIMVKAKGQFKKQSVANGVEISVPVPSDADSPRFKTSVGSAKYVPERNVVIWSIKSFPGGKEYLMRAHFGLPSVEKEEVEGRPPIGVKFEIPYFTVSGIQVRYMKIIEKSGYQALPWVRYITQSGDYQLRTS

SEQ ID NO: 156746 - DNA, 1751 bp, Artificial Sequence
  derived and/or modified sequence
aggcgcttccgcaggaagaaggaagcggcgccgccatcgcctcccggcgctccctccccgactcctaagtccttcggccgccaccatgtccgcctcggctgtcttcattctggacgttaagggcaagccattgatcagccgcaactacaagggcgatgtggccatgagcaagattgagcacttcatgcctttgctggtacagcgggaggaggaaggcgccctggccccgctgctgagccacggccaggtccacttcctatggatcaaacacagcaacctctacttggtggccaccacatcgaagaatgccaatgcctccctggtgtactccttcctgtataagacaatagaggtattctgcgaatacttcaaggagctggaggaggagagcatccgggacaactttgtcatcgtctacgagttgctggacgagctcatggactttggcttcccgcagaccaccgacagcaagatcctgcaggagtacatcactcagcagagcaacaagctggagacgggcaagtcacgggtgccacccactgtcaccaacgctgtgtcctggcgctccgagggtatcaagtataagaagaacgaggtcttcattgatgtcatagagtctgtcaacctgctggtcaatgccaacggcagcgtccttctgagcgaaatcgtcggtaccatcaagctcaaggtgtttctgtcaggaatgccagagctgcggctgggcctcaatgaccgcgtgctcttcgagctcactggccgcagcaagaacaaatcagtagagctggaggatgtaaaattccaccagtgcgtgcggctctctcgctttgacaacgaccgcaccatctccttcatcccgcctgatggtgactttgagctcatgtcataccgcctcagcacccaggtcaagccactgatctggattgagtctgtcattgagaagttctcccacagccgcgtggagatcatggtcaaggccaaggggcagtttaagaaacagtcagtggccaacggtgtggagatatctgtgcctgtacccagcgatgccgactcccccagattcaagaccagtgtgggcagcgccaagtatgtgccggagagaaacgtcgtgatttggagtattaagtctttcccggggggcaaggagtacttgatgcgagcccactttggcctccccagtgtggaaaaggaagaggtggagggccggccccccatcggggtcaagtttgagatcccctacttcaccgtctctgggatccaggtccgatacatgaagatcattgagaaaagtggttaccaggccctgccctgggttcgctacatcacccagagtggcgattaccaacttcgtaccagctagaagggagaagagatgggggcttgaacacggggcttccttacagccccggatgcagattttagagggagggcaggtgcgggctgtgtgtgtctgtgtgagggcaggtcctggacttggcagtttcttgctcccagcacccgccccttcctcacctcttccttattccataggctgggagagaaactctctctgcttccctcgcccttggagctttccccatccccctgattttatatgaagaaatagaagaggggcttgaagtcctcctcgcgagtgccttcttgcaattacctgccttagcgggtgttgcgggtccctccttcacagccgctgagcccagaggtcccgctggcccctcctctgaattttaggatgtcattaaaaagatgaatct

SEQ ID NO: 156747 - DNA, 1272 bp, Artificial Sequence
  derived and/or modified sequence
atgtccgcctccgcagtgttcattctagatgttaaaggcaaaccactgatctcccggaactacaaaggcgatgttgcgatgagcaagatagagcactttatgccgttgctcgtccagcgggaagaggagggggcacttgcgccccttttatcccacggccaagtccatttcctctggataaaacattcaaatctgtacctggttgcaacaaccagtaaaaacgcgaacgcgtccctagtctacagcttcttatacaagacaatcgaagtgttttgcgagtattttaaggagctcgaagaagaatccatccgtgacaacttcgttattgtttatgagctactggacgagctcatggactttgggttcccacaaaccactgactcgaaaatccttcaggaatacattacccagcagtctaataagctcgagacagggaaatctcgtgtgcctccgaccgtgacaaacgcagtgagttggcgaagtgagggcatcaaatacaagaaaaacgaggtatttatcgatgttattgagtctgttaacctgctggtgaatgcaaacggaagtgtgctgctgagtgagatagtgggcacaatcaagctgaaggtgtttctgtctggcatgcctgaactccgtctggggctgaatgatcgagtactctttgaactgacgggtcgctctaaaaacaaatctgtagaactggaggatgtcaaatttcatcagtgtgtacgcctgtcacgcttcgacaacgataggacaatctccttcatccctccggacggcgacttcgagctgatgtcataccggctatcgactcaagtgaagccccttatctggattgagtcagtcattgaaaaattctcacactctcgcgtggagatcatggtgaaggccaaaggccaattcaaaaaacagagcgtagcgaacggcgtggagatctcagtccccgtgcctagcgacgccgacagtccccgcttcaagacctccgtcggtagcgccaagtatgttccagagcgcaatgtcgtcatctggtccatcaagtcatttcccggcggcaaagagtaccttatgcgtgctcattttggccttccctccgtggaaaaggaagaggtagaagggcggcctcctatcggagttaaattcgagatcccgtatttcacggtgagtggcatacaggttagatatatgaaaattatagaaaagagcgggtaccaagctctaccttgggttcggtatatcacccaaagtggggattatcagctgcggacaagttag

SEQ ID NO: 156748 - DNA, 1272 bp, Artificial Sequence
  derived and/or modified sequence
atgtctgccagcgctgtgttcatcctggatgtgaagggcaagcccctcatcagcaggaactacaagggagatgtggccatgagcaagattgagcacttcatgcccctgctggtgcagcgggaggaggagggcgccctggcccccctgctgagccacggccaggtgcacttcctgtggatcaagcacagcaacctgtacctggtggccaccaccagcaagaatgccaatgccagcctggtgtacagcttcctgtacaagaccatcgaggtgttctgtgagtacttcaaggagctggaggaggagagcatccgggacaactttgtgattgtgtatgagctgctggatgagctgatggactttggcttcccccagaccacagacagcaagatcctgcaggagtacatcacccagcagagcaacaagctggagaccgggaagagccgggtgccccccaccgtgaccaatgctgtgtcctggaggtctgagggcatcaagtacaagaagaatgaggtgttcattgatgtgattgagagcgtgaacctgctggtgaatgccaacggctctgtgctgctgtctgagatcgtgggcaccatcaagctgaaggtgttcctgagcggcatgcctgagctgcggctgggcctgaatgacagagtgctgtttgagctgaccggccgcagcaagaacaagtctgtggagctggaggatgtgaagttccaccagtgtgtgcggctgagcagatttgacaatgacaggaccatctccttcatccccccagatggagactttgagctgatgagctaccgcctgagcacccaggtgaagcccctcatctggattgaatctgtgattgagaagttcagccacagccgggtggagatcatggtgaaggccaagggccagttcaagaagcagagcgtggccaacggggtggagatctctgtgcctgtgcccagtgatgctgacagcccccgcttcaagacctctgtgggcagcgccaagtatgtgcctgagagaaatgtggtgatctggagcatcaagagcttccctgggggcaaggagtacctgatgagggcccacttcggcctgcccagcgtggagaaggaggaggtggagggccggccccccatcggcgtgaagtttgagatcccctacttcaccgtgtctggcatccaggtgcgctacatgaagatcatcgagaagagcggctaccaggccctgccctgggtgcgctacatcacccagagcggggactaccagctgcggaccagctag

SEQ ID NO: 156749 - DNA, 1272 bp, Artificial Sequence
  derived and/or modified sequence
atgagcgccagcgccgtgttcatcctggacgtgaagggcaagcccttgatcagtcgcaactataagggggatgttgcaatgtccaaaatcgaacactttatgccacttcttgtgcaacgtgaagaagagggggctctggctccactcttgtctcacggccaagtccacttcttatggattaaacactcaaatctctacctcgtggccaccacctcaaaaaacgctaatgcctctctggtttactcattcctgtacaagacaattgaagtgttctgtgagtacttcaaagaactcgaggaagaaagcatccgcgacaactttgtcattgtgtatgaactgttggatgagctcatggatttcgggttcccccagacaacggactcgaaaatccttcaggaatatattacacagcaaagtaataaactcgagactggaaaaagccgagtccctccaaccgtgaccaacgccgtgagctggcggtcagaagggatcaaatacaagaagaatgaggttttcattgacgtcatcgaaagcgtgaacctcctggtgaacgcaaatggatcagtcctcttgagcgagatcgttggcacgattaagctgaaagtttttctctccggaatgcccgagttgcggctcggacttaatgatagagtgttgtttgagctcacgggacgctcgaaaaataagtctgttgagctagaggacgttaaattccaccaatgcgtgcggctgagtagatttgacaatgatcgaacaatctcctttatacctccagatggagactttgagctgatgtcttatcgcctttcaacccaggttaagccactgatttggatagagagtgtcattgaaaagttcagccatagtcgcgtcgaaatcatggtcaaggccaagggccaattcaagaaacagagcgttgctaatggcgtggagatctctgtcccggtcccatcagatgccgactcccctagattcaaaacctcagtgggcagcgcaaaatacgtacctgagaggaacgtcgtgatctggtcgatcaagagtttcccgggtggcaaagaatatttaatgagggcccattttggtctgccatccgtcgaaaaagaggaagtggaggggcgcccgcctatcggagtaaaattcgaaatcccctatttcacagtttctggcattcaagtaaggtacatgaagatcatcgaaaagagtgggtaccaagctctgccatgggtgagatatatcactcagtcaggggattatcagttgcggaccagctag

SEQ ID NO: 156750 - DNA, 1272 bp, Artificial Sequence
  derived and/or modified sequence
atgtctgccagtgctgtctttatactcgatgtgaaagggaagcctctgatctctcgcaactacaagggtgacgtggcaatgtctaagatcgagcactttatgccactgctcgtgcagcgggaagaggagggggctcttgcccctctactgagccacggccaagtgcattttctgtggattaagcatagtaatctgtacttagtcgctacaaccagtaagaatgccaacgcctcattagtgtacagctttctctacaaaaccatcgaagtgttttgtgaatacttcaaggaactagaggaggaatccatacgggacaatttcgtcatcgtttatgagctgttggatgagttaatggacttcgggtttccccagaccacagattcaaagattctgcaggaatacattactcagcagtcgaataagctagaaaccggaaaatcccgggtgcctcccactgtgaccaatgccgtgtcatggaggagcgaggggatcaaatataaaaagaatgaggtattcatagacgttatcgagagcgtcaacctgcttgtaaacgcaaatgggagcgtgttgttgagcgaaattgtggggacaatcaagctgaaagtgtttttaagcggaatgccagaactgaggttgggcctgaacgatcgcgtgctgttcgagctgacaggtaggtccaagaacaagtctgtggagctggaggacgtcaaattccaccagtgtgtccgcttatctagattcgataacgatcgtactatttccttcattccgccagacggagactttgagctgatgtcctaccggctatcaactcaggtaaaaccactcatttggattgaatcagtcatcgagaagttctcgcattcccgtgtggagatcatggtgaaagccaaaggacagttcaagaagcagtcggtggcaaacggcgtggaaattagcgtaccagtgccgtccgacgccgatagtcctaggtttaagaccagtgtcgggtctgccaagtacgtccctgaaaggaacgtcgttatatggtctattaagtcgttccccggaggcaaagaatatctgatgcgcgctcacttcggcttacccagcgtagaaaaagaggaggtggagggaaggcccccaataggagtaaagttcgagatcccttacttcacagtctcaggaatacaggtccgatacatgaagatcatcgagaaatcagggtatcaggcactgccctgggtccgctatattacccagtcaggcgactaccagcttcgcacatcgtag

SEQ ID NO: 156751 - DNA, 1272 bp, Artificial Sequence
  derived and/or modified sequence
atgagcgccagcgccgtgttcatcctggacgtgaagggcaagcccctgatcagcagaaactacaagggcgacgtggccatgagcaagatcgagcacttcatgcccctgctggtgcagagagaggaggagggcgccctggcccccctgctgagccacggccaggtgcacttcctgtggatcaagcacagcaacctgtacctggtggccaccaccagcaagaacgccaacgccagcctggtgtacagcttcctgtacaagaccatcgaggtgttctgcgagtacttcaaggagctggaggaggagagcatcagagacaacttcgtgatcgtgtacgagctgctggacgagctgatggacttcggcttcccccagaccaccgacagcaagatcctgcaggagtacatcacccagcagagcaacaagctggagaccggcaagagcagagtgccccccaccgtgaccaacgccgtgagctggagaagcgagggcatcaagtacaagaagaacgaggtgttcatcgacgtgatcgagagcgtgaacctgctggtgaacgccaacggcagcgtgctgctgagcgagatcgtgggcaccatcaagctgaaggtgttcctgagcggcatgcccgagctgagactgggcctgaacgacagagtgctgttcgagctgaccggcagaagcaagaacaagagcgtggagctggaggacgtgaagttccaccagtgcgtgagactgagcagattcgacaacgacagaaccatcagcttcatcccccccgacggcgacttcgagctgatgagctacagactgagcacccaggtgaagcccctgatctggatcgagagcgtgatcgagaagttcagccacagcagagtggagatcatggtgaaggccaagggccagttcaagaagcagagcgtggccaacggcgtggagatcagcgtgcccgtgcccagcgacgccgacagccccagattcaagaccagcgtgggcagcgccaagtacgtgcccgagagaaacgtggtgatctggagcatcaagagcttccccggcggcaaggagtacctgatgagagcccacttcggcctgcccagcgtggagaaggaggaggtggagggcagaccccccatcggcgtgaagttcgagatcccctacttcaccgtgagcggcatccaggtgagatacatgaagatcatcgagaagagcggctaccaggccctgccctgggtgagatacatcacccagagcggcgactaccagctgagaaccagctag

SEQ ID NO: 156752 - protein, 640 aa, Artificial Sequence
  derived and/or modified sequence
MALSRGLPRELAEAVAGGRVLVVGAGGIGCELLKNLVLTGFSHIDLIDLDTIDVSNLNRQFLFQKKHVGRSKAQVAKESVLQFYPKANIVAYHDSIMNPDYNVEFFRQFILVMNALDNRAARNHVNRMCLAADVPLIESGTAGYLGQVTTIKKGVTECYECHPKPTQRTFPGCTIRNTPSEPIHCIVWAKYLFNQLFGEEDADQEVSPDRADPEAAWEPTEAEARARASNEDGDIKRISTKEWAKSTGYDPVKLFTKLFKDDIRYLLTMDKLWRKRKPPVPLDWAEVQSQGEETNASDQQNEPQLGLKDQQVLDVKSYARLFSKSIETLRVHLAEKGDGAELIWDKDDPSAMDFVTSAANLRMHIFSMNMKSRFDIKSMAGNIIPAIATTNAVIAGLIVLEGLKILSGKIDQCRTIFLNKQPNPRKKLLVPCALDPPNPNCYVCASKPEVTVRLNVHKVTVLTLQDKIVKEKFAMVAPDVQIEDGKGTILISSEEGETEANNHKKLSEFGIRNGSRLQADDFLQDYTLLINILHSEDLGKDVEFEVVGDAPEKVGPKQAEDAAKSITNGSDDGAQPSTSTAQEQDDVLIVDSDEEDSSNNADVSEEERSRKRKLDEKENLSAKRSRIEQKEELDDVIALD

SEQ ID NO: 156753 - DNA, 1923 bp, Artificial Sequence
  derived and/or modified sequence
atggccctgagcagaggcctgcccagagagctggccgaggccgtggccggcggcagagtgctggtggtgggcgccggcggcatcggctgcgagctgctgaagaacctggtgctgaccggcttcagccacatcgacctgatcgacctggacaccatcgacgtgagcaacctgaacagacagttcctgttccagaagaagcacgtgggcagaagcaaggcccaggtggccaaggagagcgtgctgcagttctaccccaaggccaacatcgtggcctaccacgacagcatcatgaaccccgactacaacgtggagttcttcagacagttcatcctggtgatgaacgccctggacaacagagccgccagaaaccacgtgaacagaatgtgcctggccgccgacgtgcccctgatcgagagcggcaccgccggctacctgggccaggtgaccaccatcaagaagggcgtgaccgagtgctacgagtgccaccccaagcccacccagagaaccttccccggctgcaccatcagaaacacccccagcgagcccatccactgcatcgtgtgggccaagtacctgttcaaccagctgttcggcgaggaggacgccgaccaggaggtgagccccgacagagccgaccccgaggccgcctgggagcccaccgaggccgaggccagagccagagccagcaacgaggacggcgacatcaagagaatcagcaccaaggagtgggccaagagcaccggctacgaccccgtgaagctgttcaccaagctgttcaaggacgacatcagatacctgctgaccatggacaagctgtggagaaagagaaagccccccgtgcccctggactgggccgaggtgcagagccagggcgaggagaccaacgccagcgaccagcagaacgagccccagctgggcctgaaggaccagcaggtgctggacgtgaagagctacgccagactgttcagcaagagcatcgagaccctgagagtgcacctggccgagaagggcgacggcgccgagctgatctgggacaaggacgaccccagcgccatggacttcgtgaccagcgccgccaacctgagaatgcacatcttcagcatgaacatgaagagcagattcgacatcaagagcatggccggcaacatcatccccgccatcgccaccaccaacgccgtgatcgccggcctgatcgtgctggagggcctgaagatcctgagcggcaagatcgaccagtgcagaaccatcttcctgaacaagcagcccaaccccagaaagaagctgctggtgccctgcgccctggacccccccaaccccaactgctacgtgtgcgccagcaagcccgaggtgaccgtgagactgaacgtgcacaaggtgaccgtgctgaccctgcaggacaagatcgtgaaggagaagttcgccatggtggcccccgacgtgcagatcgaggacggcaagggcaccatcctgatcagcagcgaggagggcgagaccgaggccaacaaccacaagaagctgagcgagttcggcatcagaaacggcagcagactgcaggccgacgacttcctgcaggactacaccctgctgatcaacatcctgcacagcgaggacctgggcaaggacgtggagttcgaggtggtgggcgacgcccccgagaaggtgggccccaagcaggccgaggacgccgccaagagcatcaccaacggcagcgacgacggcgcccagcccagcaccagcaccgcccaggagcaggacgacgtgctgatcgtggacagcgacgaggaggacagcagcaacaacgccgacgtgagcgaggaggagagaagcagaaagagaaagctggacgagaaggagaacctgagcgccaagagaagcagaatcgagcagaaggaggagctggacgacgtgatcgccctggactag

SEQ ID NO: 156754 - DNA, 1923 bp, Artificial Sequence
  derived and/or modified sequence
atggcactgagcaggggcttgcccagggaactggctgaagctgtcgctggaggtagagtgttggtggtgggcgccgggggaatcggctgtgagctactcaagaatttggttctgaccggcttcagtcacatcgaccttatcgacctcgacaccatcgatgtgagcaatttgaaccgccaattcctcttccagaaaaagcacgttggccggagcaaggcccaggtggctaaggagtcagtactgcagttttaccctaaggccaatatcgtggcataccacgactcgatcatgaaccccgattataatgtggaatttttccgtcagttcatcttagtgatgaacgcactggataaccgggccgcccgcaaccacgtgaatcggatgtgcctggctgcagacgtccccctgatcgaatcaggcaccgccggctacctggggcaagtaaccacaatcaagaagggagtgacggagtgctatgaatgtcaccctaagcccacccagcgtactttccctggttgtacaataagaaatacccctagcgagcccattcactgtatcgtctgggctaaatatctgttcaatcagctgtttggcgaagaggatgctgatcaggaggtttccccagatcgagcagatcctgaggcggcttgggagcctacagaggcagaagcccgagcaagagcctccaacgaggacggggatatcaagcgtattagcactaaagaatgggccaaaagtacaggatacgatcccgtaaagctgtttacaaagctgttcaaggatgacatccggtacctgctgaccatggacaaactgtggcggaagcgcaagccgcccgtccccctcgattgggcagaggtccagagccaaggagaagagaccaatgcaagcgaccaacagaacgaaccccaactgggcctcaaagaccagcaagtcctcgatgtgaaaagttacgcccgcttattctccaagagcatcgagactctgcgcgtgcacttagcagaaaagggggacggcgcggagctgatatgggacaaggatgatccgagcgcgatggacttcgtgacctctgcagctaatttacgtatgcatattttcagcatgaacatgaaatcaagattcgacattaagtctatggccggcaatatcatacccgccattgccacaaccaatgccgtgatagcaggactgatcgtcctggaaggattgaaaatcttgagcgggaagattgatcagtgcaggacgatatttcttaacaagcaaccgaatcctaggaaaaaactcttggtgccatgcgcactggaccctccaaacccgaattgctatgtctgtgcatccaagcccgaggttactgtccgcctgaacgtgcacaaggtgaccgtgctcacgctgcaggataagatcgtcaaagaaaagttcgccatggtcgctccagacgtgcaaatcgaggacggaaagggcactattcttatctcgtctgaggagggagaaaccgaggcaaataaccacaagaagctcagcgagtttggcattcgtaatggcagccgcctacaggctgatgattttttgcaggattacactctgctgattaatatcctgcacagcgaagacctaggcaaggatgtggagtttgaggtggtcggggatgctcctgagaaggtgggcccaaagcaggcggaagatgcagcaaaaagcatcacaaacggctctgacgacggtgctcagccgtctacaagtaccgcacaggagcaggatgatgtactgattgtggattccgacgaggaagacagctctaataatgccgacgtgtcggaagaggagagaagccgcaaacgcaagctagatgagaaggagaatctctcagcaaaacggagcaggattgagcagaaggaggaactggacgacgtgatcgcactagattag

SEQ ID NO: 156755 - DNA, 1923 bp, Artificial Sequence
  derived and/or modified sequence
atggccctgagccggggcctgccccgggagctggccgaggccgtggccggcggccgggtgctggtggtgggcgccggcggcatcggctgtgagctgctgaagaacctggtgctgaccggcttcagccacatcgacctgattgacctggacaccattgatgtgagcaacctgaaccggcagttcctgttccagaagaagcacgtgggccgcagcaaggcccaggtggccaaggagagcgtgctgcagttctaccccaaggccaacatcgtggcctaccatgacagcatcatgaacccagactacaacgtggagttcttccggcagttcatcctggtgatgaatgccctggacaacagagctgccaggaaccacgtgaacaggatgtgcctggccgcagatgtgcccctgattgaaagtggcacagctggctacctgggccaggtgaccaccatcaagaagggcgtgacagaatgttatgagtgccaccccaagcccacccagaggaccttccctggctgcaccatccggaacacccccagcgagcccatccactgcatcgtgtgggccaagtacctgttcaaccagctgtttggagaggaggatgctgaccaggaggtgtccccagacagagctgaccctgaggccgcctgggagcccacagaggccgaggcccgggcccgggccagcaatgaagatggagacatcaagaggatcagcaccaaggagtgggccaagagcacaggctatgaccctgtgaagctgttcaccaagctgttcaaggatgacatccgctacctgctgaccatggacaagctgtggaggaagaggaagccccctgtgcccctggactgggccgaggtgcagagccagggcgaggagaccaatgccagtgaccagcagaatgagccccagctgggcctgaaggaccagcaggtgctggatgtgaagagctatgcccggctcttcagcaagagcattgagaccctgcgggtgcacctggccgagaagggagatggagctgagctgatctgggacaaggatgaccccagcgccatggactttgtgaccagcgctgccaacctgaggatgcacatcttctccatgaacatgaagagcagatttgacatcaagtccatggccggcaacatcatcccagccatcgccaccaccaatgctgtgattgctggcctcatcgtgctggagggcctgaagatcctgagcggcaagattgaccagtgcaggaccatcttcctgaacaagcagcccaaccccaggaagaagctgctggtgccctgtgccctggacccccccaaccccaactgctacgtgtgtgccagcaagccagaggtgacagtgcggctgaatgtgcacaaggtgacagtgctgaccctgcaggacaagatcgtgaaggagaagtttgccatggtggccccagatgtgcagattgaagatggcaagggcaccatcctgatcagcagcgaggagggggagacagaggccaacaaccacaagaagctgtctgaatttggcatcagaaatggcagccggctgcaggctgatgacttcctgcaggactacaccctgctgatcaacatcctgcacagcgaggacctgggcaaggatgtggagtttgaggtggtgggagatgcccctgagaaggtgggccccaagcaggccgaggatgctgccaagagcatcaccaacggcagtgatgatggagcccagcccagcaccagcacagcccaggagcaggatgatgtgctgattgtggacagtgatgaggaggacagcagcaacaatgctgatgtgtctgaggaggagaggagcaggaagaggaagctggatgagaaggagaacctgagcgccaagaggagcagaattgagcagaaggaggagctggatgatgtgattgccctggactag

SEQ ID NO: 156756 - DNA, 1923 bp, Artificial Sequence
  derived and/or modified sequence
atggccctgagccggggcctgccccgggagctggccgaggccgtggccggtggccgggtgctggtcgtgggggccggcggaatcggttgtgagttgctgaagaatcttgtcctcaccggtttctcccatattgatctcatcgacttagacaccattgacgtgtccaacctgaaccgacagtttctcttccaaaagaaacatgtgggccggagcaaggcgcaggttgccaaggagtctgtcctgcagttttatcccaaagccaacatcgtggcctaccatgactcgatcatgaatccggattataacgtagaattcttcaggcagttcatccttgtgatgaacgctctggacaacagggctgccaggaatcacgtgaatcgtatgtgtctcgccgcagatgtgccactgatcgaatccgggaccgctggctatctgggacaggtgacaacaatcaagaagggagtgacggaatgttatgaatgccaccctaaaccaactcaacggactttccctgggtgtactattaggaacaccccatctgaacctatccattgtatagtttgggctaagtacctgtttaaccagttattcggagaagaggatgcagaccaagaagtgagccccgatagagcagacccagaagctgcatgggagcccacagaagctgaggcccgtgccagggcttccaacgaggatggagatatcaagagaatctcgactaaggaatgggctaagagtacaggatacgatccagtgaaattgtttaccaaactgtttaaggatgacataaggtacttgttgacaatggacaaactatggcggaagcgaaagcccccggtgcccctcgattgggcagaggtgcagtcccaaggtgaagagacaaacgcgagcgaccagcagaacgagccgcaactcggactgaaggatcaacaggtgctggatgttaagagctatgcaagactgttttcgaagtctatcgaaaccctacgcgttcacctggccgagaagggcgatggtgccgagctcatttgggataaggacgacccatctgcgatggacttcgttacctccgccgccaatctcaggatgcatattttctctatgaacatgaaatcaagattcgacatcaaaagcatggcaggaaatataattcctgccattgctactaccaatgccgttattgctggccttattgtgctggagggcctgaagattcttagcggcaaaatcgaccaatgccgaaccatttttctcaataagcagccaaacccccgcaagaagttactggtgccatgcgctctcgatcccccaaacccgaattgctacgtgtgcgccagcaaaccagaagtgacagtcaggctgaatgttcacaaagtgacggttctcacgctacaggacaaaatcgttaaagagaaattcgccatggtggctccagatgtgcagatcgaggacggaaagggtaccatactgatctcctcggaggagggggagactgaagctaataatcataagaagctgtctgaattcgggatcagaaacggaagcagactgcaagctgacgactttttacaggactataccctgcttatcaacatcttgcactctgaggacctcggtaaagatgtcgagtttgaagtcgtaggggacgcaccagagaaagtgggaccaaaacaggccgaagacgccgcgaagagtatcacaaacgggagtgacgatggggcacagccatcaacctcgaccgcgcaggaacaagacgatgtcctgatcgtggatagtgatgaggaagacagttcaaacaacgcggatgtgtccgaagaggagcgctctagaaagagaaagctggacgaaaaggagaacctgtctgctaaacggtcgaggattgaacagaaggaggagctggacgatgtcatagccctggactag

SEQ ID NO: 156757 - DNA, 1923 bp, Artificial Sequence
  derived and/or modified sequence
atggcattgtcccgcggattgcctagggaactggctgaggccgtggccggagggcgagtgctcgtggtgggcgcaggcggtattgggtgcgaactcctaaagaatcttgtgcttacagggtttagtcatatcgatctgatcgatttggatacgatcgatgtgagcaacctaaaccgtcaatttctattccagaagaaacacgtgggaaggtcgaaggcccaggtggcaaaggaatccgtactccagttctaccccaaggccaacattgtggcctatcacgatagtattatgaatccagactataacgtggagttcttcaggcaattcattttagttatgaatgcgctggacaatcgagcagcgagaaaccacgtcaaccgcatgtgtctggctgccgatgtgccacttatcgaaagcggcaccgctggctatttagggcaggtaaccaccataaagaagggggtgacggagtgttatgagtgccatccaaaacccacccagcggacttttcccggatgcacgattcgcaacactccatccgaacccatccattgcatagtgtgggcgaaatatttgttcaatcagctctttggcgaagaggatgccgatcaagaggttagtccagacagagcagacccagaagcagcatgggagcccaccgaggccgaagcacgcgctcgggcaagtaatgaggatggtgatatcaagaggatcagtacgaaagagtgggccaaaagcactgggtacgatcccgtaaagctgttcacgaaactcttcaaggatgacatccggtatctgctgacgatggataagctttggcgcaagaggaagccaccagtgccccttgattgggctgaagttcagagccagggcgaagagacaaatgctagtgaccaacagaacgagcctcagctcggcctgaaggaccaacaggtactcgatgtgaagtcttatgccaggcttttttcgaaatcgatcgaaaccctgagggtgcacctcgctgaaaagggagacggggcagagctcatatgggacaaagatgatccttctgccatggattttgtgacaagtgcggcaaatctgcgcatgcatatcttcagtatgaacatgaagagcaggttcgatattaagtcaatggccggaaacattatcccagcaattgctactaccaatgctgttatagccggactgattgtgctcgaaggcctgaaaatcctgtcaggaaaaatagaccagtgtagaacaatctttctcaacaaacagcccaacccacgcaaaaagttgcttgtcccatgtgcgttagacccacctaatccaaactgctatgtttgcgcatccaaacctgaggtcacggtgcggttaaacgtgcataaggtgaccgtgctcaccttgcaagataagattgttaaagaaaagttcgcaatggtcgcacccgatgtacagattgaggacggcaagggtactatcctgataagcagcgaggaaggcgaaactgaggctaacaaccacaagaagctgtccgaatttggtattcggaacggctcccgcctgcaggcagacgattttttgcaggattacactctcctgattaacatcttgcattcggaagacctcgggaaggatgtggagttcgaggtcgtgggggacgcgccagaaaaggtgggccctaagcaagcagaagatgctgcaaagagtatcactaacggctctgacgacggtgcacaaccatcaacatccacagcacaagaacaggacgatgtcctcatcgtggactcagacgaagaggacagcagcaacaacgctgacgtgtccgaggaagagcgttcccggaaacggaaattagacgaaaaggaaaatctgagtgctaagcgcagtagaattgagcagaaggaagaacttgacgacgtgattgccctggattag

SEQ ID NO: 156758 - DNA, 2662 bp, Artificial Sequence
  derived and/or modified sequence
ccccacccgcttccggccgcggctcggttctcccgcctccgcctccgccgcggctcgtggttgtcccgccatggcactgtcgcgggggctgccccgggagctggctgaggcggtggccgggggccgggtgctggtggtgggggcgggcggcatcggctgcgagctcctcaagaatctcgtgctcaccggtttctcccacatcgacctgattgatctggatactattgatgtaagcaacctcaacagacagtttttgtttcaaaagaaacatgttggaagatcaaaggcacaggttgccaaggaaagtgtactgcagttttacccgaaagctaatatcgttgcctaccatgacagcatcatgaaccctgactataatgtggaatttttccgacagtttatactggttatgaatgctttagataacagagctgcccgaaaccatgttaatagaatgtgcctggcagctgatgttcctcttattgaaagtggaacagctgggtatcttggacaagtaactactatcaaaaagggtgtgaccgagtgttatgagtgtcatcctaagccgacccagagaacctttcctggctgtacaattcgtaacacaccttcagaacctatacattgcatcgtttgggcaaagtacttgttcaaccagttgtttggggaagaagatgctgatcaagaagtatctcctgacagagctgaccctgaagctgcctgggaaccaacggaagccgaagccagagctagagcatctaatgaagatggtgacattaaacgtatttctactaaggaatgggctaaatcaactggatatgatccagttaaactttttaccaagctttttaaagatgacatcaggtatctgttgacaatggacaaactatggcggaaaaggaaacctccagttccgttggactgggctgaagtacaaagtcaaggagaagaaacgaatgcatcagatcaacagaatgaaccccagttaggcctgaaagaccagcaggttctagatgtaaagagctatgcacgtcttttttcaaagagcatcgagactttgagagttcatttagcagaaaagggggatggagctgagctcatatgggataaggatgacccatctgcaatggattttgtcacctctgctgcaaacctcaggatgcatattttcagtatgaatatgaagagtagatttgatatcaaatcaatggcagggaacattattcctgctattgctactactaatgcagtaattgctgggttgatagtattggaaggattgaagattttatcaggaaaaatagaccagtgcagaacaatttttttgaataaacaaccaaacccaagaaagaagcttcttgtgccttgtgcactggatcctcccaaccccaattgttatgtatgtgccagcaagccagaggtgactgtgcggctgaatgtccataaagtgactgttctcaccttacaagacaagatagtgaaagaaaaatttgctatggtagcaccagatgtccaaattgaagatgggaaaggaacaatcctaatatcttccgaagagggagagacggaagctaataatcacaagaagttgtcagaatttggaattagaaatggcagccggcttcaagcagatgacttcctccaggactatactttattgatcaacatccttcatagtgaagacctaggaaaggacgttgaatttgaagttgttggtgatgccccggaaaaagtggggcccaaacaagctgaagatgctgccaaaagcataaccaatggcagtgatgatggagctcagccctccacctccacagctcaagagcaagatgacgttctcatagttgattcagatgaagaagattcttcaaataatgccgacgtcagtgaagaagagagaagccgcaagaggaaattagatgagaaagagaatctcagtgcaaagaggtcacgtatagaacagaaggaagagcttgatgatgtcatagcattagattgaacagaaatgcctctaaacagaaccctcttactatttagtttatctgggcagaaccagattgttatgtcctttgttccaaagggaaaaaattgacagcagtgacttgaaaatgattctgctccctttgaaagcattcattttgctagaactgttagacacattgcagtatgctgtattgaaagtaggaatatagttttaaaaaccctttgaacaaagtgtgtgcataaccagtcatgagataaaacaacacaatgcatgttgcctttttaatgtaaatacccgtaggtatcattaatagtttcaaaatattgtggtttagtaaagttgatacctggttataaatattatgcctttatttttggctagaagaagaattatttttagcctagatctaaccattttcatactcttaactgattgaaacagattcaaagaagtatcgagtgctatgcattgaaacttgtttttaaatgttagatggcactatgtatattaatgtaaaacaatgttaatttactcaagttttcagtttgtaccgcctggtatgtctgtgtaagaagccaatttttgtgtattgttacagtttcaggttatttatattcgatgttttgtaaaactcaaataacgactatacttatggaccaaataaatggcatctgcattcttgtt

SEQ ID NO: 156759 - protein, 346 aa, Artificial Sequence
  derived and/or modified sequence
MVEKEEAGGGISEEEAAQYDRQIRLWGLEAQKRLRASRVLLVGLKGLGAEIAKNLILAGVKGLTMLDHEQVTPEDPGAQFLIRTGSVGRNRAEASLERAQNLNPMVDVKVDTEDIEKKPESFFTQFDAVCLTCCSRDVIVKVDQICHKNSIKFFTGDVFGYHGYTFANLGEHEFVEEKTKVAKVSQGVEDGPDTKRAKLDSSETTMVKKKVVFCPVKEALEVDWSSEKAKAALKRTTSDYFLLQVLLKFRTDKGRDPSSDTYEEDSELLLQIRNDVLDSLGISPDLLPEDFVRYCFSEMAPVCAVVGGILAQEIVKALSQRDPPHNNFFFFDGMKGNGIVECLGPK

SEQ ID NO: 156760 - protein, 172 aa, Artificial Sequence [sequence omitted]

SEQ ID NO: 156761 - DNA, 1041 bp, Artificial Sequence
  derived and/or modified sequence
atggtggagaaggaggaggccggcggcggcatcagcgaggaggaggccgcccagtacgacagacagatcagactgtggggcctggaggcccagaagagactgagagccagcagagtgctgctggtgggcctgaagggcctgggcgccgagatcgccaagaacctgatcctggccggcgtgaagggcctgaccatgctggaccacgagcaggtgacccccgaggaccccggcgcccagttcctgatcagaaccggcagcgtgggcagaaacagagccgaggccagcctggagagagcccagaacctgaaccccatggtggacgtgaaggtggacaccgaggacatcgagaagaagcccgagagcttcttcacccagttcgacgccgtgtgcctgacctgctgcagcagagacgtgatcgtgaaggtggaccagatctgccacaagaacagcatcaagttcttcaccggcgacgtgttcggctaccacggctacaccttcgccaacctgggcgagcacgagttcgtggaggagaagaccaaggtggccaaggtgagccagggcgtggaggacggccccgacaccaagagagccaagctggacagcagcgagaccaccatggtgaagaagaaggtggtgttctgccccgtgaaggaggccctggaggtggactggagcagcgagaaggccaaggccgccctgaagagaaccaccagcgactacttcctgctgcaggtgctgctgaagttcagaaccgacaagggcagagaccccagcagcgacacctacgaggaggacagcgagctgctgctgcagatcagaaacgacgtgctggacagcctgggcatcagccccgacctgctgcccgaggacttcgtgagatactgcttcagcgagatggcccccgtgtgcgccgtggtgggcggcatcctggcccaggagatcgtgaaggccctgagccagagagaccccccccacaacaacttcttcttcttcgacggcatgaagggcaacggcatcgtggagtgcctgggccccaagtag

SEQ ID NO: 156762 - DNA, 519 bp, Artificial Sequence
  derived and/or modified sequence
atgctggagaagaccaaggtggccaaggtgagccagggcgtggaggacggccccgacaccaagagagccaagctggacagcagcgagaccaccatggtgaagaagaaggtggtgttctgccccgtgaaggaggccctggaggtggactggagcagcgagaaggccaaggccgccctgaagagaaccaccagcgactacttcctgctgcaggtgctgctgaagttcagaaccgacaagggcagagaccccagcagcgacacctacgaggaggacagcgagctgctgctgcagatcagaaacgacgtgctggacagcctgggcatcagccccgacctgctgcccgaggacttcgtgagatactgcttcagcgagatggcccccgtgtgcgccgtggtgggcggcatcctggcccaggagatcgtgaaggccctgagccagagagaccccccccacaacaacttcttcttcttcgacggcatgaagggcaacggcatcgtggagtgcctgggccccaagtag

SEQ ID NO: 156763 - DNA, 1041 bp, Artificial Sequence
  derived and/or modified sequence
atggttgaaaaggaggaggccggaggaggtataagcgaagaggaagcggcccagtacgaccggcagatcagactttggggactggaggcccagaagcggctgagggcctcaagggtcctcctagttggtcttaaaggcctgggtgccgagatcgccaagaaccttattctggccggagtgaagggactgacgatgttagaccatgaacaggtcacccccgaggatcccggtgctcagttcctgattaggacagggagcgttggacgcaaccgcgccgaggcctccctcgaacgtgcgcagaatctcaatcccatggttgatgttaaagttgacactgaagacatcgagaagaaacctgagtctttttttacacagttcgatgctgtgtgtctgacatgctgttctcgcgatgttattgtgaaagtggatcaaatctgtcacaagaactcaattaagttctttacgggagacgttttcgggtaccacggctacactttcgctaatctgggggagcacgagttcgtggaggaaaaaacaaaagtagctaaagtgagtcagggggtggaggatggaccagatacaaaaagggcaaaacttgatagcagtgagacaacaatggtgaagaaaaaggtcgtgttctgccctgtcaaggaggccctggaggttgattggagctctgaaaaagccaaggccgctctcaagcggacaacgtccgattacttcctgcttcaggtgctcctgaagtttcgtactgataagggccgggatccctcatctgatacctacgaggaagattctgagttgctccttcagatccggaacgatgtgctagatagcctgggcatatcaccagatctgctccccgaagacttcgtaaggtattgtttctccgaaatggcccccgtttgcgccgtagttggagggatcctggcccaggagatcgtcaaggctctgagccagagggacccacctcataacaactttttttttttcgacgggatgaagggcaacgggatagtagaatgtcttggtccgaaatag

SEQ ID NO: 156764 - DNA, 519 bp, Artificial Sequence
  derived and/or modified sequence
atgttagaaaagaccaaggtggctaaggtaagtcaaggagtggaagatggtcccgataccaaaagagctaagctggatagcagtgagactacaatggtgaagaaaaaggtcgtcttctgtccggtgaaggaggcccttgaggtggattggtcctccgaaaaggctaaggccgccctgaagagaacaaccagcgactactttctgctgcaagtgctactcaagttccggacagacaaaggacgcgacccatcttcagatacctatgaggaagactctgagctgttacttcagattcgcaacgatgtcctcgattcactcggtatttctcctgatctgcttccagaggactttgtccggtactgtttctctgagatggcgcccgtgtgtgccgtcgtgggtggtattctggcgcaagaaattgtgaaggccttgtcccaacgcgatccaccacataataacttctttttcttcgatggtatgaagggaaatgggattgtggagtgtctggggccaaagtag

SEQ ID NO: 156765 - DNA, 1041 bp, Artificial Sequence
  derived and/or modified sequence
atggtggagaaggaggaggccggcggcggcatcagcgaggaggaggccgcccagtatgaccggcagatccggctgtggggcctggaggcccagaagaggctgcgggccagccgggtgctgctggtgggcctgaagggcctgggcgctgagatcgccaagaacctgatcctggccggcgtgaagggcctgaccatgctggaccacgagcaggtgaccccagaggaccccggggcccagttcctgatcagaacaggctctgtgggcaggaacagagctgaggccagcctggagcgggcccagaacctgaaccccatggtggatgtgaaggtggacacagaagatattgagaagaagccagagagcttcttcacccagtttgatgctgtgtgcctgacctgctgcagcagagatgtgattgtgaaggtggaccagatctgccacaagaacagcatcaagttcttcaccggagatgtgtttggctaccacggctacacctttgccaacctgggggagcacgagtttgtggaggagaagaccaaggtggccaaggtgtcccagggcgtggaggatggccctgacaccaagagggccaagctggacagcagcgagaccaccatggtgaagaagaaggtggtgttctgccctgtgaaggaggccctggaggtggactggagcagcgagaaggccaaggccgccctgaagaggaccaccagtgactacttcctgctgcaggtgctgctgaagttcagaacagacaagggccgggaccccagcagtgacacctatgaggaggacagcgagctgctgctgcagatcagaaatgatgtgctggacagcctgggcatcagcccagacctgctgcctgaagattttgtgcgctactgcttcagcgagatggcccctgtgtgtgctgtggtgggcggcatcctggcccaggagatcgtgaaggccctgagccagagggaccccccccacaacaacttcttcttctttgatggcatgaagggaaatggaattgtggagtgcctgggccccaagtag

SEQ ID NO: 156766 - DNA, 519 bp, Artificial Sequence
  derived and/or modified sequence
atgctggagaagaccaaggtggccaaggtgtcccagggcgtggaggatggccctgacaccaagagggccaagctggacagcagcgagaccaccatggtgaagaagaaggtggtgttctgccctgtgaaggaggccctggaggtggactggagcagcgagaaggccaaggccgccctgaagaggaccaccagtgactacttcctgctgcaggtgctgctgaagttcagaacagacaagggccgggaccccagcagtgacacctatgaggaggacagcgagctgctgctgcagatcagaaatgatgtgctggacagcctgggcatcagcccagacctgctgcctgaagattttgtgcgctactgcttcagcgagatggcccctgtgtgtgctgtggtgggcggcatcctggcccaggagatcgtgaaggccctgagccagagggaccccccccacaacaacttcttcttctttgatggcatgaagggaaatggaattgtggagtgcctgggccccaagtag

SEQ ID NO: 156767 - DNA, 1041 bp, Artificial Sequence
  derived and/or modified sequence
atggtggagaaggaggaggccggcggcggcatcagcgaggaggaggccgctcagtatgaccgacagatccgcttgtggggactggaagctcagaaacgactgcgagcctcaagagtgctgctcgtgggcctcaaaggcctgggagcggaaattgctaagaacctgatcctggctggcgttaagggccttaccatgctggaccacgaacaagtcaccccggaagacccaggcgcccagtttttgatccggactggcagcgtgggtcggaatcgggctgaagcctctcttgagcgggcacagaacctcaaccccatggttgacgtcaaggtggatactgaggatatcgaaaagaaacccgagtccttcttcacccagttcgacgccgtgtgcctgacctgttgcagtagggatgtgatagttaaggtcgaccagatttgccacaagaatagtatcaaattcttcacaggtgatgtgttcggataccacggctacacttttgccaacttgggcgaacacgagtttgtggaggaaaagacaaaggtggcaaaagtctcccagggcgtggaagacgggcctgacactaagcgcgccaaactcgattcctccgagaccacaatggtgaagaagaaggtcgtcttctgccccgttaaggaagcccttgaggtggactggtcttcagagaaggccaaggcagctctaaagcgaaccactagcgattatttcctcctacaggtgctgctcaaattcagaactgacaagggcagagatccaagctcggatacttatgaggaggatagcgagttgctcttacagatccgcaatgatgtactggattcgttaggaattagcccagacctcttaccagaggattttgtacgctattgttttagcgagatggcccctgtgtgcgctgttgtgggcggaatccttgcccaggagatagtaaaagcattgtctcagcgcgacccaccgcataataatttcttttttttcgatgggatgaagggcaatggtatcgtcgagtgtcttgggccaaagtag

SEQ ID NO: 156768 - DNA, 519 bp, Artificial Sequence
  derived and/or modified sequence
atgctggagaagaccaaggtggccaaggtgagccagggcgtggaggatggtccggatacaaagcgcgctaaactggacagcagcgagacaactatggtgaaaaagaaagtggtcttctgtccagttaaggaagcattggaagttgactggtcgtctgagaaggccaaagccgcactaaaacgcactaccagtgattatttcctactccaggtgctcctgaagttcaggaccgacaagggaagagacccttcctccgacacttatgaggaggattccgagctcctcttgcagatccgtaatgacgtgctcgattcactaggcatttcacctgacctgctgcccgaggatttcgtgaggtactgcttctctgagatggctccagtctgcgcggttgtgggaggcatccttgcccaggagatagttaaggcactcagccagagggatccaccccacaataatttctttttcttcgatggaatgaagggcaatggtatcgtggaatgcctgggacctaaatag

SEQ ID NO: 156769 - DNA, 1041 bp, Artificial Sequence
  derived and/or modified sequence
atggtggaaaaggaagaggctggcggtggtatttccgaggaagaggccgctcagtatgacaggcagatccggttatggggcctcgaggcacagaaaaggttacgcgcatcccgagtgctgctggtgggactaaaaggtctgggagccgaaatcgccaagaacctcattctcgcgggtgtgaagggcttaactatgcttgaccacgaacaggtcactccggaagatccgggtgctcagtttctgattcggacagggtctgtaggtagaaatcgggcagaggcctcacttgaacgggctcagaacttgaaccccatggtggatgtcaaagtggataccgaggacattgaaaaaaaaccagagtcttttttcactcagtttgacgctgtttgtttgacgtgctgctctcgcgatgtcattgtcaaagtggaccagatctgtcacaagaactctatcaaattttttactggcgacgttttcgggtatcatggttacacatttgccaaccttggcgagcacgagttcgtggaagaaaagaccaaggtagccaaggtctcgcagggcgtggaggacgggcctgataccaagcgggcaaaactggactctagcgagactacaatggttaagaaaaaggttgtgttttgtccagtgaaagaagccctagaggtggactggagttcagagaaagccaaagcagccctgaagcgcacgacttccgactactttctgttacaagtcctattaaaatttagaaccgacaaaggtagggacccatcaagtgacacatacgaagaagactctgagctgcttctgcaaatccgcaatgatgtgttggactccctgggaatatcacctgatctgctgccggaggactttgtcaggtattgtttttccgaaatggccccagtctgtgctgtggtgggcggaattttggcacaggaaattgtaaaggcccttagccaaagggacccacctcataacaactttttttttttcgacggaatgaaaggaaacggcatcgtcgagtgtctaggacccaagtag

SEQ ID NO: 156770 - DNA, 519 bp, Artificial Sequence
  derived and/or modified sequence
atgctcgagaaaactaaggtcgcaaaggtcagtcagggagtcgaggatgggccagacaccaaaagggccaagttggattcctctgagaccactatggtgaaaaaaaaggtggtgttctgccctgtcaaagaggccctcgaagttgattggtcctctgaaaaggccaaggcagctctgaagcggactacttctgattactttctgctacaggtcctcctaaagtttcggactgataagggtcgggatccttcatccgatacttacgaagaagactccgagctcttgttgcagatccgcaatgacgtactggacagtttgggcatttcaccagatctactccccgaggactttgtgcggtattgtttctcagagatggcccctgtatgtgcagtagtggggggaatactggcacaggaaatcgtgaaggcactctcacagcgggatcctccccacaacaatttctttttttttgatgggatgaagggcaacggcatcgtcgagtgcctaggcccaaagtag

SEQ ID NO: 156771 - DNA, 2533 bp, Artificial Sequence
  derived and/or modified sequence
atgcgcagaagcactccgggcgtgctgccggcggcggtaggtggcgcgcgggtccggcgggcggttggcttgagcgggaccggagctgaggcaggaagagccggcgccatggtggagaaggaggaggctggcggcggcattagcgaggaggaggcggcacagtatgaccggcagatccgcctgtggggactggaggcccagaaacggctgcgggcctctcgggtgcttcttgtcggcttgaaaggacttggggctgaaattgccaagaatctcatcttggcaggagtgaaaggactgaccatgctggatcacgaacaggtaactccagaagatcccggagctcagttcttgattcgtactgggtctgttggccgaaatagggctgaagcctctttggagcgagctcagaatctcaaccccatggtggatgtgaaggtggacactgaggatatagagaagaaaccagagtcatttttcactcaattcgatgctgtgtgtctgacttgctgctccagggatgtcatagttaaagttgaccagatctgtcacaaaaatagcatcaagttctttacaggagatgtttttggctaccatggatacacatttgccaatctaggagagcatgagtttgtagaggagaaaactaaagttgccaaagttagccaaggagtagaagatgggcccgacaccaagagagcaaaacttgattcttctgagacaacgatggtcaaaaagaaggtggtcttctgccctgttaaagaagccctggaggtggactggagcagtgagaaagcaaaggctgctctgaagcgcacgacctccgactactttctccttcaagtgctcttaaagttccgtacagataaaggaagagatcccagttctgatacatatgaggaagattctgagttgttgctccagatacgaaatgatgtgcttgactcactgggtattagtcctgacctgcttcctgaggactttgtcaggtactgcttctccgagatggccccagtgtgtgcggtggttggagggattttggcacaggaaattgtgaaggccctgtctcagcgggaccctcctcacaacaacttcttcttcttcgatggcatgaaggggaatgggattgtggagtgccttggccccaagtgaactcaagatttggcagccccagagatgccaactgcagcatgcccacctgtattccctgtccccttccttcatgaaggcatctccaggcaaggaaaactgaagtcattggcccgatacaaaacatttcctgcaacgaaggaggtggtgccgacgtgctgcttcccatcaccagcagctgctcgacaaggggcgcagggtggctgtctttgttccagcactgttcaggctgcctgtcatcccgggcctgccagctcccctgagtgatgagcacttccaagcacccctctgccctttctctgtccttatgctgtcccggcctcgccagccctctggggcattgtgggagatgcctgccaggaatgagcaagctctgttgctcgggagcctcttgtcaccttcttggacttattccccacctgataccttatagagaaaagtgtgaattcaggtggagagtaggcccaggccccatgaggcaccagtggaagcacagctccaagttcagacaggtgcccttagagaggaaaaccatgacaggcaaatgcatttcctctggagtttgagaccctgacaaacaacaggtggcatctggtgtgctgttcttgagttttcgtttaggattagttgagttccagctgggttttgggagaaaggagatgctaccaagtcttggatgttagggcgagaccctgcaagttgagtattagagagcttgtctttcaaggcaggttcctggggcttcagggctaggagggaggagcctgcccttttaacagaaccccagtcacatgcggctcaagtcactcagaggctgttgcatttcagggctatgttggtcctttgtttacctcctaaaccacagctgtttgtgtttcacatatgttgtgaattttccttggttctttttaaaggaatgataataaagttacttgctttaggatttgcttgtttttcttccacttcagaagcttctgagagggaatgggatgatcctaccagttgccttttcagacctgaggctctaactcaagagattcctcctctccctcaccattcctgccaccattttttctgggtgatgcagcaagagttaaattgttcacattctagaatgtgtagaagcttctggctccagttgtctaatggataattcagctaaatagtggctattttcagtggcaagaattataataataaagggaagtcaaaagtgatgcttcatatgccccaagtgccacagccgctacgggtcagagcttttattggaagaccaggtttgccttgatgcagccaaagtgcgttccagttcaccccactcttgcttgtgtttcttctttatgtaaattgtgtgatgtttcaataaatcagtctctttcctattctg

SEQ ID NO: 156772 - DNA, 941 bp, Artificial Sequence
  derived and/or modified sequence
actccgggcgtgctgccggcggcggctgcgggcctctcgggtgcttcttgtcggcttgaaaggacttggggctgaaattgccaagaatctcatcttggcaggagtgaaaggactgaccatgctggatcacgaacaggtaactccagaagatcccggagctcagttcttgattcgtactgggtctgttggccgaaatagggctgaagcctctttggagcgagctcagaatctcaaccccatggtggatgtgaaggtggacactgaggatatagagaagaaaccagagtcatttttcactcaattcgatgctggagaaaactaaagttgccaaagttagccaaggagtagaagatgggcccgacaccaagagagcaaaacttgattcttctgagacaacgatggtcaaaaagaaggtggtcttctgccctgttaaagaagccctggaggtggactggagcagtgagaaagcaaaggctgctctgaagcgcacgacctccgactactttctccttcaagtgctcttaaagttccgtacagataaaggaagagatcccagttctgatacatatgaggaagattctgagttgttgctccagatacgaaatgatgtgcttgactcactgggtattagtcctgacctgcttcctgaggactttgtcaggtactgcttctccgagatggccccagtgtgtgcggtggttggagggattttggcacaggaaattgtgaaggccctgtctcagcgggaccctcctcacaacaacttcttcttcttcgatggcatgaaggggaatgggattgtggagtgccttggccccaagtgaactcaagatttggcagccccagagatgccaactgcagcatgcccacctgtattccctgtccccttccttcatgaaggcatctccaggcaaggaaaactgaagtcattggcccgatac

SEQ ID NO: 156773 - protein, 2261 aa, Artificial Sequence
  derived and/or modified sequence
MACWPQLRLLLWKNLTFRRRQTCQLLLEVAWPLFIFLILISVRLSYPPYEQHECHFPNKAMPSAGTLPWVQGIICNANNPCFRYPTPGEAPGVVGNFNKSIVARLFSDARRLLLYSQKDTSMKDMRKVLRTLQQIKKSSSNLKLQDFLVDNETFSGFLYHNLSLPKSTVDKMLRADVILHKVFLQGYQLHLTSLCNGSKSEEMIQLGDQEVSELCGLPREKLAAAERVLRSNMDILKPILRTLNSTSPFPSKELAEATKTLLHSLGTLAQELFSMRSWSDMRQEVMFLTNVNSSSSSTQIYQAVSRIVCGHPEGGGLKIKSLNWYEDNNYKALFGGNGTEEDAETFYDNSTTPYCNDLMKNLESSPLSRIIWKALKPLLVGKILYTPDTPATRQVMAEVNKTFQELAVFHDLEGMWEELSPKIWTFMENSQEMDLVRMLLDSRDNDHFWEQQLDGLDWTAQDIVAFLAKHPEDVQSSNGSVYTWREAFNETNQAIRTISRFMECVNLNKLEPIATEVWLINKSMELLDERKFWAGIVFTGITPGSIELPHHVKYKIRMDIDNVERTNKIKDGYWDPGPRADPFEDMRYVWGGFAYLQDVVEQAIIRVLTGTEKKTGVYMQQMPYPCYVDDIFLRVMSRSMPLFMTLAWIYSVAVIIKGIVYEKEARLKETMRIMGLDNSILWFSWFISSLIPLLVSAGLLVVILKLGNLLPYSDPSVVFVFLSVFAVVTILQCFLISTLFSRANLAAACGGIIYFTLYLPYVLCVAWQDYVGFTLKIFASLLSPVAFGFGCEYFALFEEQGIGVQWDNLFESPVEEDGFNLTTSVSMMLFDTFLYGVMTWYIEAVFPGQYGIPRPWYFPCTKSYWFGEESDEKSHPGSNQKRISEICMEEEPTHLKLGVSIQNLVKVYRDGMKVAVDGLALNFYEGQITSFLGHNGAGKTTTMSILTGLFPPTSGTAYILGKDIRSEMSTIRQNLGVCPQHNVLFDMLTVEEHIWFYARLKGLSEKHVKAEMEQMALDVGLPSSKLKSKTSQLSGGMQRKLSVALAFVGGSKVVILDEPTAGVDPYSRRGIWELLLKYRQGRTIILSTHHMDEADVLGDRIAIISHGKLCCVGSSLFLKNQLGTGYYLTLVKKDVESSLSSCRNSSSTVSYLKKEDSVSQSSSDAGLGSDHESDTLTIDVSAISNLIRKHVSEARLVEDIGHELTYVLPYEAAKEGAFVELFHEIDDRLSDLGISSYGISETTLEEIFLKVAEESGVDAETSDGTLPARRNRRAFGDKQSCLRPFTEDDAADPNDSDIDPESRETDLLSGMDGKGSYQVKGWKLTQQQFVALLWKRLLIARRSRKGFFAQIVLPAVFVCIALVFSLIVPPFGKYPSLELQPWMYNEQYTFVSNDAPEDTGTLELLNALTKDPGFGTRCMEGNPIPDTPCQAGEEEWTTAPVPQTIMDLFQNGNWTMQNPSPACQCSSDKIKKMLPVCPPGAGGLPPPQRKQNTADILQDLTGRNISDYLVKTYVQIIAKSLKNKIWVNEFRYGGFSLGVSNTQALPPSQEVNDAIKQMKKHLKLAKDSSADRFLNSLGRFMTGLDTKNNVKVWFNNKGWHAISSFLNVINNAILRANLQKGENPSHYGITAFNHPLNLTKQQLSEVALMTTSVDVLVSICVIFAMSFVPASFVVFLIQERVSKAKHLQFISGVKPVIYWLSNFVWDMCNYVVPATLVIIIFICFQQKSYVSSTNLPVLALLLLLYGWSITPLMYPASFVFKIPSTAYVVLTSVNLFIGINGSVATFVLELFTDNKLNNINDILKSVFLIFPHFCLGRGLIDMVKNQAMADALERFGENRFVSPLSWDLVGRNLFAMAVEGVVFFLITVLIQYRFFIRPRPVNAKLSPLNDEDEDVRRERQRILDGGGQNDILEIKELTKIYRRKRKPAVDRICVGIPPGECFGLLGVNGAGKSSTFKMLTGDTTVTRGDAFLNKNSILSNIHEVHQNMGYCPQFDAITELLTGREHVEFFALLRGVPEKEVGKVGEWAIRKLGLVKYGEKYAGNYSGGNKRKLSTAMALIGGPPVVFLDEPTTGMDPKARRFLWNCALSVVKEGRSVVLTSHSMEECEALCTRMAIMVNGRFRCLGSVQHLKNRFGDGYTIVVRIAGSNPDLKPVQDFFGLAFPGSVLKEKHRNMLQYQLPSSLSSLARIFSILSQSKKRLHIEDYSVSQTTLDQVFVNFAKDQSDDDHLKDLSLHKNQTVVDVAVLTSFLQDEKVKESYV

SEQ ID NO: 156774 - protein, 363 aa, Artificial Sequence
  derived and/or modified sequence
MACWPQLRLLLWKNLTFRRRQTCQLLLEVAWPLFIFLILISVRLSYPPYEQHECHFPNKAMPSAGTLPWVQGIICNANNPCFRYPTPGEAPGVVGNFNKSIVARLFSDARRLLLYSQKDTSMKDMRKVLRTLQQIKKSSSNLKLQDFLVDNETFSGFLYHNLSLPKSTVDKMLRADVILHKVFLQGYQLHLTSLCNGSKSEEMIQLGDQEVSELCGLPREKLAAAERVLRSNMDILKPILMDVTCDDIAHGQLTVPRSAAVAATGDAKPNMMGRETLLSICASVPKVEFHERHILKHFSFCVCVSVSLFPAKGIVSFSWASFRIWVLWKAVFWQHGESMAVWEGQLGLGLNIAFEYFTSIDVG

SEQ ID NO: 156775 - DNA, 6786 bp, Artificial Sequence
  derived and/or modified sequence
atggcgtgttggccacaattgagactactgctgtggaagaacttgactttccggaggcggcagacttgccagctgctgcttgaagtggcctggcccctgttcatttttttgatccttatttcagtgcgactatcataccccccatacgaacagcatgagtgtcatttccccaacaaagctatgccgagtgccggaaccctcccctgggtccagggaatcatttgcaacgcaaataacccatgctttcggtatcccacacctggcgaagcgcctggcgttgtcgggaatttcaataagagtatcgtggcccgcctgttttcggacgctagaagactcctgctgtactcccagaaagatactagcatgaaggatatgagaaaagtacttcggacattacagcaaatcaagaagagctcttccaacctgaagctccaggactttctagttgacaatgagactttttcgggcttcctgtaccacaacttgtctttacctaagagcaccgttgacaagatgttgcgagctgacgttatcctgcataaagttttcctccagggctatcagcttcatttaaccagcctgtgtaacggttcgaaatcagaggagatgatccaacttggagatcaggaagttagcgaattatgtgggctgcctcgcgaaaaactggccgctgctgagcgagtgcttcgctctaatatggacattttaaagcctattctgaggactctgaacagtacctctccatttccctctaaggaactggcagaggctactaaaacgctgctgcactctctcgggaccctggcccaggaattgtttagcatgcggtcttggtctgacatgagacaggaggtcatgttcctgaccaatgtgaattcatccagtagcagcactcagatctatcaggctgtatcccgtatcgtctgtggccatccagaaggtggcggcctcaaaatcaagagcctgaactggtacgaagataacaattacaaagcactgtttgggggcaacggtactgaggaagacgctgagacattttatgataattctaccacaccatactgtaacgatttgatgaaaaatctcgaatcatcaccgctctcgcggatcatttggaaggctctcaaacccttactggtggggaaaattctgtatacacctgataccccagcaacacggcaggttatggcagaggtcaataaaactttccaagaactggccgtgttccacgatctggaaggcatgtgggaggaactcagtccaaaaatctggacatttatggaaaattcgcaggaaatggacctcgttcgcatgcttctggacagccgcgacaacgatcatttctgggaacagcagttggatggtcttgactggactgctcaggatattgtcgcatttctggcaaagcacccggaggacgtacaatcctcgaacgggagcgtttacacttggcgcgaggcattcaacgagacaaatcaggctattcgcaccatctcccgatttatggaatgcgttaacctgaataagctcgaacccatcgccactgaagtgtggctgatcaacaagagcatggagctgttggacgaaagaaaattttgggccggcatcgtgttcaccggcatcacacccggaagtatcgaactccctcatcacgtcaagtacaagatccggatggatatagataacgttgaaaggaccaacaaaataaaagacggctactgggatcccgggcctcgtgctgacccatttgaggacatgcggtatgtgtgggggggcttcgcttaccttcaggatgttgtggagcaggccatcatcagagtgctgacgggaacggagaaaaagacaggggtgtacatgcagcagatgccgtacccctgctacgttgacgatatcttcttgcgggtcatgagccgcagcatgcctttgttcatgacactagcgtggatttattctgtggctgtgatcataaagggcattgtgtatgaaaaggaggcccgtttgaaggagaccatgagaataatgggcctcgacaattccatattgtggttttcctggtttatcagcagcctcatcccattgctggtgtctgctggactcctggttgtaatcctcaagctgggcaacctcttgccttacagtgacccctccgtggtgttcgtgtttctgagtgtgtttgcagtcgtcaccatcctccagtgtttcctgatcagcactctgttctcaagggccaatctggctgcagcgtgcggggggatcatctactttaccctctatcttccatatgttctgtgtgttgcatggcaggactacgtgggatttactctgaaaatcttcgcaagtttattaagcccagtcgcatttggcttcggatgtgaatattttgctctgtttgaggagcagggcattggcgtgcagtgggataacttgtttgagagtccagttgaggaagatggtttcaacctaacgacttctgtgtctatgatgctctttgatacctttctgtatggggtgatgacttggtatatcgaggccgtgtttcctggtcaatacggaatcccaaggccttggtacttcccttgtaccaagtcttactggtttggggaagagtcagatgagaagtcccatccgggcagtaaccagaaaagaatctcagagatctgcatggaggaggaacccacccatcttaaactgggggtgagtatccagaacctggtgaaagtctaccgggacggtatgaaagttgccgtggatgggttggctcttaacttctatgaaggccagatcacctctttcctgggccataacggggccgggaaaacaaccaccatgtccatactgacagggctgttccctcctacctccggcacggcctacatactggggaaagacatacgatccgaaatgagcaccatccgccaaaacctcggagtatgccctcagcacaacgtcttgtttgacatgctgacagtcgaagagcatatctggttctacgcccgcctcaagggtttgagcgagaagcacgtaaaagcagaaatggaacagatggctcttgacgtggggctcccctcgtctaaactgaagagcaagacctcacaactatcagggggtatgcagaggaaattgtccgtcgctctggcttttgtcggaggatccaaagttgtcattctagacgagccaacggctggcgtcgacccgtatagtcgcaggggcatctgggagctgctcctcaagtatcgccagggccgaaccatcatcttgagtacccatcacatggacgaagccgacgtcctgggcgatcgtatcgctataatcagtcacggcaaactgtgctgtgtgggatcatccctcttcttaaagaatcaattgggcacggggtactatctgaccctagtcaagaaggacgtggagtcatcactgtccagctgccgtaattcttctagtacagtttcctatctaaagaaagaggactcggtgagccagtcctctagcgacgccggtctgggctctgatcacgagagcgatactctgacaatcgacgtgtctgccatatcaaatctgatccgtaagcacgtttctgaagctcggctggtggaggatatcggacacgaactgacatatgtgctcccctatgaagccgcaaaagaaggggcattcgtcgagctgttccacgagatcgatgacagattatccgatctggggatctcatcttatggcatatccgaaactacactggaagaaatctttttaaaggttgccgaggaaagcggcgtggacgcagaaacctctgatggcacattgcctgcaagacggaatcgccgcgcgtttggtgataagcagtcctgcctgaggccgtttactgaggacgacgcagccgaccccaacgattcagatatcgatccagaatcccgggaaacggatctcttatcaggtatggacggcaaggggtcctatcaggtgaaaggttggaagctcacacagcagcaattcgtagcactactgtggaagcggctgctgattgcccgaaggtctagaaaggggtttttcgcccagatcgtgcttcccgccgtatttgtgtgcattgctttggtcttttccctgattgtgcctccattcgggaagtatcctagtctcgagctccagccatggatgtataacgaacagtacactttcgttagcaatgatgcgccagaagacacgggaacactcgaactgctgaatgccctgactaaggatccgggctttggtactcggtgcatggaggggaaccccattcctgataccccgtgccaagctggggaggaagaatggaccacagctcctgttcctcaaaccatcatggaccttttccaaaacgggaactggacaatgcagaacccgagtcccgcttgtcagtgcagcagcgacaaaatcaagaagatgttacccgtctgtccccccggagccggcggcctgccccctcctcagagaaaacaaaatactgctgatatcctacaggacctgacaggccggaacattagcgattacttggtgaagacatacgtacagataatcgcgaaaagcctgaaaaacaagatctgggtcaatgagtttcggtacgggggatttagcctaggggtctcaaacacgcaggccctgcccccaagccaggaggtaaatgacgcaatcaagcagatgaaaaagcaccttaagttggcaaaagactcaagtgccgacaggtttttgaatagtctcggcagatttatgacaggactggacaccaagaataacgttaaggtttggtttaataacaaaggatggcacgcaatttcaagttttctgaacgttatcaacaatgcaattttgagggctaacttgcagaagggagaaaatccgagccactacggtataaccgctttcaaccaccccctgaatctgaccaagcagcagctgagtgaggtagccttaatgacaacctcggtagacgtgctcgtctccatttgcgtgatcttcgccatgtcattcgtgcccgcatccttcgtggtttttttgattcaagaacgtgtgtcaaaggccaaacatctgcagttcataagtggggtcaagcccgtgatctactggctttctaatttcgtttgggatatgtgcaactatgtggtccctgccacccttgtaattataatcttcatctgtttccagcagaagtcatatgtatccagtaccaatctgccagtgctggccctgctcctgttgctgtacggctggagcatcacaccactaatgtaccctgcaagctttgtgttcaagatacccagcaccgcttatgtggtgttaacttctgtgaatctgttcattggaatcaatggatctgtcgcgacattcgtactcgagctctttaccgataataaacttaacaatatcaatgacattctgaagtccgtgtttctgatttttcctcacttctgcctgggccgcggcttgatagacatggtcaagaatcaggccatggcagatgcacttgagagattcggggaaaaccgattcgtctcgcccctgagttgggacttggttggtcgcaacttgtttgccatggctgtcgagggcgtggtcttcttcctgatcactgtgctgatacaataccgattctttatcagacctagacccgtaaacgccaagctcagccccctgaatgatgaggacgaggacgttagacgggagcgtcagcgcatccttgatggaggtggacagaatgatatcctggagataaaggaactcaccaagatataccgtcgcaagaggaaacctgcagttgacaggatttgcgtgggcatcccccctggggagtgcttcgggctactgggcgtcaacggggccggcaaatcctctacctttaagatgctcacaggggataccaccgtgacccgtggcgacgctttcctgaacaaaaattccatactgagcaacattcatgaagtccaccagaatatgggatactgcccccaattcgatgctataacagagcttttgaccggacgggaacacgtagaattctttgcattattgagaggggtaccggaaaaagaagttggcaaggtgggggagtgggctatccgaaagctgggcctggtcaagtatggagagaagtatgccggtaattactctggggggaacaaacggaagctgtcaacagctatggcccttattggcggcccgccggttgttttcctcgatgagcctacaacgggtatggacccaaaggcgaggagattcttgtggaactgcgccctgagtgtggtgaaagaaggccgctctgtcgtcctgaccagtcactccatggaggagtgcgaggccttgtgtactcggatggccatcatggtcaacggccggtttcggtgcctcggttcggtccagcatctgaagaaccggtttggcgacggatatactattgtggtccggattgccggatctaatcctgatttaaaacctgtccaggacttctttggcctggctttccccggatcagttttaaaggaaaagcacaggaacatgttacaatatcagcttccctcttcgctgtctagtttggcccggatcttcagtatactcagccagagtaaaaaacggttgcacatcgaagattattcggtgtctcaaacaacactcgaccaggtcttcgtgaacttcgctaaggaccagtctgacgatgatcacctaaaggatctgtcactgcataaaaaccagaccgtcgtggatgtggccgttctaacatcttttctgcaggacgagaaggtgaaagaatcttacgtctag

SEQ ID NO: 156776 - DNA, 1092 bp, Artificial Sequence
  derived and/or modified sequence
atggcttgctggcctcaactgaggctgcttctgtggaaaaatcttacctttcggagaagacagacctgtcagcttctgttggaagtagcttggcctctgttcattttcctgatcttgatttcagttagattaagctaccccccgtatgagcagcatgagtgtcatttccctaataaggccatgccaagcgcgggcaccctcccttgggtacaaggaataatctgtaatgctaataacccgtgcttccgctaccctacaccaggtgaagcccctggggtcgtggggaattttaacaaatcaatcgtcgcccgcctgtttagcgatgcccgacggctcctgctctacagtcagaaggataccagtatgaaagatatgaggaaagttttaaggactctgcagcagatcaaaaagagcagttcgaatctaaagctgcaggatttcctcgtggataatgagaccttcagcggcttcctgtaccataacctctctctgcctaaatccacagtggacaagatgctccgggcagacgtaatcctgcataaagtttttctgcagggatatcagctgcatttgacttcactgtgcaacggatcaaagagcgaggaaatgatccagctgggagatcaggaggtatccgaattgtgtggtttgccccgggagaaactcgctgctgcggagagggtactgcgctcgaacatggatattctgaaaccaattctcatggacgtaacgtgcgatgatattgcacacggccagctgacagtgcctaggtccgcagccgtagcagccacaggagatgccaagccaaatatgatgggcagggagacactgctcagcatttgcgccagtgtccccaaggtggaatttcacgaacgccatatactgaagcacttttctttttgcgtctgtgtgtcagtgagcctgtttcccgccaagggcatcgtgagcttttcttgggccagcttccgcatctgggtcctgtggaaggccgttttttggcaacacggggaatcaatggctgtttgggagggccagctggggctgggactgaacatcgcttttgagtacttcacttccatcgatgtcggatag

SEQ ID NO: 156777 - DNA, 6786 bp, Artificial Sequence
  derived and/or modified sequence
atggcctgctggccccagctgcggctgctgctgtggaagaacctgaccttcagaagacggcagacctgccagctgctgctggaggtggcctggcccctcttcatcttcctgatcctgatctctgtgcggctgagctacccaccctatgagcagcacgagtgccacttccccaacaaggccatgcccagcgctggcaccctgccctgggtgcagggcatcatctgcaatgccaacaacccctgcttccgctaccccaccccaggagaggcccctggggtggtgggcaacttcaacaagagcatcgtggcccggctcttcagtgatgcccggcggctgctgctgtacagccagaaggacacctccatgaaggacatgaggaaggtgctgcggaccctgcagcagatcaagaagagcagcagcaacctgaagctgcaggacttcctggtggacaatgagaccttcagcggcttcctgtaccacaacctgagcctgcccaagagcacagtggacaagatgctgcgggcagatgtgatcctgcacaaggtgttcctgcagggctaccagctgcacctgaccagcctgtgcaatggcagcaagtctgaggagatgatccagctgggggaccaggaggtgtctgagctgtgtggcctgccccgggagaagctggccgctgctgagcgggtgctgcggagcaacatggacatcctgaagcccatcctgcggaccctgaacagcaccagccccttccccagcaaggagctggccgaggccaccaagaccctgctgcacagcctgggcaccctggcccaggagctgttctccatgaggtcctggagcgacatgaggcaggaggtgatgttcctgaccaacgtgaacagcagcagcagcagcacccagatctaccaggccgtgtccagaattgtgtgtggccaccctgagggcggcggcctgaagatcaagagcctgaactggtatgaggacaacaactacaaggccctgtttggaggaaatggaacagaagaagatgctgagaccttctatgacaacagcaccaccccctactgcaatgacctgatgaagaacctggagagcagccccctgagccgcatcatctggaaggccctgaagcccctgctggtgggcaagatcctgtacaccccagacaccccagccacccggcaggtgatggccgaggtgaacaagaccttccaggagctggccgtgttccatgacctggagggcatgtgggaggagctgagccccaagatctggaccttcatggagaacagccaggagatggacctggtgaggatgctgctggacagccgggacaatgaccacttctgggagcagcagctggatggcctggactggacagcccaggacatcgtggccttcctggccaagcacccagaagatgtgcagagcagcaatggatctgtgtacacctggagggaggccttcaatgagaccaaccaggccatccgcaccatcagccgcttcatggagtgtgtgaacctgaacaagctggagcccatcgccacagaggtgtggctgatcaacaagtccatggagctgctggatgagaggaagttctgggccggcatcgtgttcaccggcatcaccccaggcagcattgagctgccccaccacgtgaagtacaagatccgcatggacatcgacaacgtggagaggaccaacaagatcaaggatggctactgggaccccggccccagggctgacccctttgaggacatgagatatgtgtggggcggctttgcctacctgcaggatgtggtggagcaggccatcatccgggtgctgactggaacagagaagaagacaggagtgtacatgcagcagatgccctacccctgctacgtggatgacatcttcctgcgggtgatgagccgctccatgcccctcttcatgaccctggcctggatctacagcgtggccgtcatcatcaagggcatcgtgtatgagaaggaggcccggctgaaggagaccatgaggatcatgggcctggacaacagcatcctgtggttctcctggttcatcagcagcctcatccccctgctggtgtctgctggcctgctggtggtgatcctgaagctgggcaacctgctgccctacagcgaccccagcgtggtgtttgtgttcctgtctgtgtttgctgtggtgaccatcctgcagtgcttcctgatcagcaccctcttcagccgggccaacctggccgccgcctgtggcggcatcatctacttcaccctgtacctgccctacgtgctgtgtgtggcctggcaggactatgtgggcttcaccctgaagatctttgccagcctgctgagccctgtggcctttggatttggctgtgagtactttgccctgtttgaggagcagggcatcggcgtgcagtgggacaacctgtttgagagccctgtggaggaggatggcttcaacctgaccacctctgtgtccatgatgctgtttgacaccttcctgtatggagtgatgacctggtacatcgaggccgtgtttcctggccagtatggcatcccccggccctggtacttcccctgcaccaagagctactggtttggagaggagagtgatgagaagagccaccctggcagcaaccagaagaggatcagcgagatctgcatggaggaggagcccacccacctgaagctgggcgtgtccatccagaacctggtgaaggtgtacagagatggcatgaaggtggccgtggatggcctggccctgaacttctatgagggccagatcaccagcttcctgggccacaatggagctgggaagaccaccaccatgagcatcctgaccggcctcttcccccccaccagcggcacagcctacatcctgggcaaggacatccgctctgagatgagcaccatccggcagaacctgggcgtgtgcccccagcacaacgtgctgtttgacatgctgactgtggaggagcacatctggttctacgcccggctgaagggcctgtctgagaagcacgtgaaggccgagatggagcagatggccctggatgtgggcctgcccagcagcaagctgaagagcaagaccagccagctgagcggcggcatgcagaggaagctgtctgtggccctggcctttgtgggcggcagcaaggtggtgatcctggatgagcccacagctggggtggacccctacagccggcggggcatctgggagctgctgctgaagtaccggcagggccgcaccatcatcctgagcacccaccacatggatgaagcagatgtgctgggggacagaattgccatcatcagccacggcaagctgtgctgcgtgggcagcagcctcttcctgaagaaccagctgggcaccggctactacctgaccctggtgaagaaggatgtggagagcagcctgagcagctgcaggaacagcagcagcacagtgtcctacctgaagaaggaggacagcgtgtcccagagcagcagtgatgctggcctgggcagtgaccatgaaagtgacaccctgaccattgatgtgtctgccatcagcaacctgatcaggaagcacgtgtctgaggcccggctggtggaggacatcggccacgagctgacctacgtgctgccctatgaggccgccaaggagggcgcctttgtggagctgttccatgaaattgatgaccggctgagtgacctgggcatcagcagctatggcatcagcgagaccaccctggaggagatcttcctgaaggtggccgaggagagcggcgtggatgctgagaccagtgatggcaccctgcctgcccggaggaacagaagagcctttggagacaagcagagctgcctgcggcccttcacagaagatgatgctgctgaccccaatgacagcgacatcgaccctgagagccgggagacagacctgctgagcggcatggatggcaagggcagctaccaggtgaagggctggaagctgacccagcagcagtttgtggccctgctgtggaagaggctgctgattgcccggcgcagcaggaagggcttctttgcccagatcgtgctgcctgctgtgtttgtgtgcatcgccctggtgttcagcctgattgtgcccccatttgggaagtaccccagcctggagctgcagccctggatgtacaatgagcagtacacctttgtgtccaatgatgcccctgaggacaccggcaccctggagctgctgaatgccctgaccaaggaccccggcttcggcacccgctgcatggagggcaaccccatcccagacaccccctgccaggccggggaggaggagtggaccacagcccctgtgccccagaccatcatggacctcttccagaatggaaactggaccatgcagaaccccagccctgcctgccagtgcagcagtgacaagatcaagaagatgctgcctgtgtgccccccaggagctgggggcctgcccccaccccagaggaagcagaacacagctgacatcctgcaggacctgactggaagaaacatcagtgactacctggtgaagacctacgtgcagatcatcgccaagagcctgaagaacaagatctgggtgaatgagttccgctatggaggcttcagcctgggcgtgagcaacacccaggccctgccccccagccaggaggtgaatgatgccatcaagcagatgaagaagcacctgaagctggccaaggacagcagcgctgaccgcttcctgaacagcctgggccgcttcatgacaggcctggacaccaagaacaacgtgaaggtgtggttcaacaacaagggctggcacgccatcagcagcttcctgaatgtcatcaacaatgccatcctgcgggccaacctgcagaagggggagaaccccagccactacggcatcacagccttcaaccaccccctgaacctgaccaagcagcagctgtctgaggtggccctgatgaccacctctgtggatgtgctggtgtccatctgtgtgatctttgccatgagctttgtgcctgccagctttgtggtgttcctgatccaggagcgggtgtccaaggccaagcacctgcagttcatctctggagtgaagcctgtgatctactggctgagcaactttgtgtgggacatgtgcaactacgtggtgcctgccaccctggtgatcatcatcttcatctgcttccagcagaagagctatgtgagcagcaccaacctgcctgtgctggccctgctgctgctgctgtatggctggagcatcacccccctgatgtacccagccagctttgtgttcaagatccccagcacagcctacgtggtgctgacctctgtgaacctcttcatcggcatcaatggatctgtggccacctttgtgctggagctgttcacagacaacaagctgaacaacatcaatgacatcctgaagtctgtgttcctgatcttcccccacttctgcctgggccggggcctgattgacatggtgaagaaccaggccatggctgatgccctggagagatttggagaaaatagatttgtgagccccctgtcctgggacctggtgggcaggaacctgtttgccatggctgtggagggcgtggtgttcttcctgatcaccgtgctgatccagtaccgcttcttcatccggcccaggcctgtgaatgccaagctgagccccctgaatgatgaagatgaagatgtgcggcgggagcggcagaggatcctggatggcggcggccagaatgacatcctggagatcaaggagctgaccaagatctacagaaggaagaggaagccagctgtggaccgcatctgtgtgggcatccccccaggagagtgcttcggcctgctgggcgtgaatggagctgggaagagcagcaccttcaagatgctgaccggggacaccaccgtgaccagaggagatgccttcctgaacaagaacagcatcctgagcaacatccacgaggtgcaccagaacatgggctactgcccccagtttgatgccatcacagagctgctgaccggccgggagcacgtggagttctttgccctgctgcggggcgtgcctgagaaggaggtgggcaaggtgggggagtgggccatcaggaagctgggcctggtgaagtatggagagaagtatgccggcaactacagcggcggcaacaagaggaagctgagcacagccatggccctgattggaggcccccctgtggtgttcctggatgagcccaccaccggcatggaccccaaggcccggcgcttcctgtggaactgtgccctgtctgtggtgaaggagggccgctctgtggtgctgaccagccacagcatggaggagtgtgaggccctgtgcaccaggatggccatcatggtgaatggccgcttccgctgcctgggctctgtgcagcacctgaagaacagatttggagatggctacaccatcgtggtgagaattgctggcagcaacccagacctgaagcctgtgcaggacttcttcggcctggccttccctggctctgtgctgaaggagaagcacaggaacatgctgcagtaccagctgcccagcagcctgagcagcctggcccgcatcttcagcatcctgagccagagcaagaagaggctgcacatcgaggactacagcgtgtcccagaccaccctggaccaggtgtttgtgaactttgccaaggaccagagtgatgatgaccacctgaaggacctgagcctgcacaagaaccagacagtggtggatgtggccgtgctgaccagcttcctgcaggatgagaaggtgaaggagagctatgtgtag

SEQ ID NO: 156778 - DNA, 1092 bp, Artificial Sequence
  derived and/or modified sequence
atggcctgctggccccagctgcggctgctgctgtggaagaacctgaccttcagaagacggcagacctgccagctgctgctggaggtggcctggcccctcttcatcttcctgatcctgatctctgtgcggctgagctacccaccctatgagcagcacgagtgccacttccccaacaaggccatgcccagcgctggcaccctgccctgggtgcagggcatcatctgcaatgccaacaacccctgcttccgctaccccaccccaggagaggcccctggggtggtgggcaacttcaacaagagcatcgtggcccggctcttcagtgatgcccggcggctgctgctgtacagccagaaggacacctccatgaaggacatgaggaaggtgctgcggaccctgcagcagatcaagaagagcagcagcaacctgaagctgcaggacttcctggtggacaatgagaccttcagcggcttcctgtaccacaacctgagcctgcccaagagcacagtggacaagatgctgcgggcagatgtgatcctgcacaaggtgttcctgcagggctaccagctgcacctgaccagcctgtgcaatggcagcaagtctgaggagatgatccagctgggggaccaggaggtgtctgagctgtgtggcctgccccgggagaagctggccgctgctgagcgggtgctgcggagcaacatggacatcctgaagcccatcctgatggatgtgacctgtgatgacatcgcccacggccagctgactgtgcccaggtctgctgctgtggccgccactggagatgccaagcccaacatgatgggccgggagaccctgctgagcatctgtgcctctgtgcccaaggtggagttccacgagcggcacatcctgaagcacttctccttctgtgtgtgtgtgtctgtgtccctcttccctgccaagggcatcgtgtccttctcctgggccagcttccgcatctgggtgctgtggaaggctgtgttctggcagcacggggagagcatggctgtgtgggagggccagctgggcctgggcctgaacatcgcctttgagtacttcaccagcattgatgtgggctag

SEQ ID NO: 156779 - DNA, 6786 bp, Artificial Sequence
  derived and/or modified sequence
atggcctgctggccccagctgcggctgctgctgtggaagaacctgacctttcggcgccggcagacctgtcagctgttgctggaggtggcttggcctctttttatttttttgattctaatttcagtgaggctcagctatcccccttatgagcaacatgaatgccattttcctaacaaagctatgcccagcgccgggaccctgccctgggtgcaggggatcatctgtaatgccaacaatccttgttttcgctaccccacccccggtgaggctccgggtgtcgtcggtaatttcaataagtccatcgttgcccggctgttctctgatgcccggagactgctgctgtatagtcagaaagacacatcaatgaaggacatgaggaaagtactgcggaccctccagcagattaagaaatcttcttctaacctcaaactgcaggatttcttggtggataacgaaacattttccggctttctctatcataatctctcattgcctaaaagtactgtggataagatgctgagggcagatgtgattctgcacaaagtgttcctccagggttaccagctccacctaacctcattgtgtaatggatctaaatctgaagaaatgatccagctgggagaccaggaggtgtcagaactttgtgggctgccccgtgagaaactggccgcggctgagagagtgctgaggagcaatatggatatactaaaacctatacttcgaactctgaactccacatcacctttcccatcaaaagaattggccgaagctacgaaaacattactccattcactggggaccttggcacaggagttattctcaatgcgctcttggagtgatatgagacaggaagtcatgttcctcactaacgtaaattcatctagttcttccacccaaatctatcaggcagtgtcccgcatagtgtgcgggcatccagagggcggaggcctcaagattaagtctctgaactggtatgaggacaacaattacaaggccctgttcgggggaaacggcacggaggaggatgcagaaaccttctatgataactccactaccccctactgtaatgaccttatgaaaaacctggagtcctcgcccctttcacggattatttggaaggccctgaagccgcttctggtcggaaaaatcctctatacgccggatacacccgcaactcggcaagtcatggccgaggtgaacaaaacatttcaggagctggccgtgttccatgatctcgaagggatgtgggaggagctaagtccaaagatttggacttttatggagaactctcaggagatggatttggtgcggatgctgctcgattcgagggacaacgaccatttctgggagcagcagctcgatggactcgactggacagcccaggacattgtggctttcctggccaagcatccagaagacgtccagtccagtaacgggtccgtgtatacctggagggaggcttttaatgaaaccaatcaggctataaggacaatttcccgcttcatggagtgcgtgaatctgaataagctcgaacctatagctacagaggtgtggttgatcaacaaaagtatggagctgctggacgaacggaagttttgggccgggattgtattcactggcatcacccctggatcaatcgagttacctcaccatgtgaaatataagattaggatggacattgacaacgttgaacgtacgaacaagataaaagatggctactgggatcccggcccaagggctgatcccttcgaagacatgagatacgtgtggggtggctttgcctatctgcaggatgtcgttgaacaggctatcattagagttctgactggaaccgagaagaagaccggcgtgtacatgcagcaaatgccatatccttgctacgtcgacgacattttcctgcgggtgatgtcccgcagcatgccgttattcatgaccttggcatggatctattctgttgctgttatcattaagggtatcgtgtacgagaaagaagctaggctaaaggagaccatgagaattatgggactggacaacagcattctttggttttcttggtttatatcatcactaataccgctgttggtgtctgccggcctgttagtggtgatcctgaaactgggtaacttgcttccctatagtgatccatcagtggtgttcgtgtttctaagtgttttcgctgtggtgacaatcctgcagtgttttttgatctctacccttttttctagagccaatctcgcggccgcatgtggggggatcatatactttacattgtacctgccatacgtgctgtgcgttgcttggcaggattacgtcggatttaccctcaagatcttcgcctctcttctctcccctgtggcttttggctttggatgtgaatacttcgctctgttcgaagagcaaggcatcggagtgcagtgggacaacctgttcgagagtcctgtagaggaggatggctttaaccttaccaccagtgtctccatgatgcttttcgatacgttcttgtatggagtgatgacttggtatattgaggcagtgttcccagggcagtatggtattcctagaccttggtatttcccctgcactaaatcttattggtttggcgaagagtccgatgagaagtcacatccaggatcaaatcagaagcggatctccgagatctgcatggaggaagaacccactcacctgaaactgggagtctccattcagaacttggtgaaagtgtatcgggatggtatgaaagtggccgtagacggacttgcactgaatttctacgaaggacagataacttcatttttgggacataacggagccggaaaaaccaccactatgagcatcctcacgggactgtttccgccaacctctggaacggcctacatcctgggaaaggacatcagatccgagatgagtaccatacggcagaaccttggggtgtgtcctcagcataatgtcttattcgatatgctcacagtagaggaacatatctggttctatgccagactcaaaggcctctcggaaaaacatgtaaaagccgagatggagcagatggcattggacgtcggcctgcccagctctaaattgaagtctaaaacctcccagctgagcggtggtatgcaaaggaaactgagcgtggccttagcatttgtcggaggctccaaagtggtcatcctagatgagccaacagctggcgtcgacccttactccagaaggggcatatgggaactgctactcaaatatagacaggggcgcacaatcatcctgtccacccaccatatggacgaagccgatgtgctgggcgacagaatagctatcatatcacatggcaagctttgctgcgtggggagcagcttgttcctaaaaaaccagctgggcaccggttattacctgacactcgtaaagaaggatgtcgagagtagcctgagtagctgcagaaatagtagctctaccgtgagctatctaaagaaagaagacagcgtgtcacagtcaagttctgacgccgggttgggcagcgatcatgagtcagacaccctgactattgacgtgtctgccatctccaatctgattcgaaaacacgtgagtgaagcccgcctcgtggaagatattgggcatgaactgacctacgttctcccctatgaggccgcaaaagaaggcgcttttgttgaactcttccatgagattgatgataggctgtcagatttggggatctcatcctatggcatttcagaaacaacactagaagaaattttcctcaaagttgccgaagagtccggggtcgacgcagaaacatctgacgggactctgcccgcccgcaggaatcggcgggccttcggcgacaagcaaagctgtcttagacccttcaccgaggatgatgcagccgaccctaacgacagtgatattgacccagaaagccgtgagacggacctgttaagtggtatggacggaaaggggtcttaccaggtgaaggggtggaagttaactcagcagcagttcgttgccctcctctggaaacggctgctcattgcccgaaggagccgaaaagggtttttcgcccagattgtactgccagccgtatttgtgtgtatcgctctggtgttttcacttatcgtgcccccatttgggaagtacccaagccttgagctgcaaccctggatgtacaacgagcaatacacattcgtgtctaacgatgctcccgaagacaccgggacccttgaactgcttaacgcgttgaccaaggatccaggatttggcacccgatgtatggagggcaaccccatccctgatactccgtgtcaagccggagaggaagagtggacaactgcccccgtcccacagacaatcatggatctctttcagaatggaaattggaccatgcaaaaccccagccctgcttgccagtgtagctccgataagataaaaaaaatgttgccggtttgtccgcccggggccggcggcctgcccccaccgcagcgcaaacagaacacagcagatattttacaagacctcactggcagaaatatctccgactatttggttaaaacctatgttcagataatcgccaaaagtctgaaaaacaagatttgggttaacgaatttaggtacggcggattctctttaggcgtgtccaacacccaagcccttcctccgtcgcaagaggtcaacgatgcaattaagcagatgaaaaagcacttgaagctagccaaagattcttctgcagatcgctttctcaatagcttggggagattcatgacggggctggataccaaaaataacgtgaaagtgtggttcaacaataagggatggcacgccataagcagcttcctgaatgtgattaataatgccatccttagggctaatctgcaaaagggggaaaatccatcccactacggaattaccgctttcaaccatcccctcaatcttaccaagcagcagctctcagaagtggccctgatgaccacatcagttgatgtgctggtgagcatttgcgtgatctttgcgatgagctttgtacctgcgtcttttgttgtgtttctgatccaagaacgtgtctccaaagcaaaacacctgcagttcatcagcggggttaaacctgtcatttactggctcagcaatttcgtgtgggatatgtgtaattatgtcgtcccagccactctcgtgatcattatatttatctgtttccaacagaagtcctacgtgtcatctactaacctccctgtgctcgctctattgctcttgctgtacggctggagtatcacaccacttatgtaccccgctagttttgtcttcaaaatcccctcgaccgcttacgtcgtgctgacaagtgtcaacctattcatcggcataaatggatcagttgccacattcgtgcttgagctcttcacagataacaagctgaacaatatcaacgatatattgaagagcgtcttcttgatctttccgcacttttgccttgggagaggcttgattgatatggtgaagaatcaggcgatggcggacgccctggagagattcggggaaaatcgattcgtatcccccctttcttgggatctggtgggacgcaatctcttcgctatggctgtggagggggtagttttcttcttaatcaccgtgctgatacagtaccgcttcttcattcgccctcgccctgtcaacgccaagctgagtccattaaatgacgaggatgaagatgtacggagagaacgccagcgcatcctcgatggaggcgggcagaatgatattctggagatcaaagagctcacgaaaatttatcgcaggaagcgaaagccagccgtggatagaatttgtgtgggaatccctcccggcgaatgtttcgggctgcttggggtgaacggagcaggtaagagcagtacctttaaaatgctcacgggagacacaaccgttactcgaggggacgccttcctcaacaagaattctatactatccaatattcacgaggttcaccagaacatgggctattgtcctcaatttgatgctattaccgagctactgactgggagagaacatgtggaatttttcgccctgctccggggagtccctgagaaggaggtcggtaaggtgggagaatgggcgatcaggaaactagggctcgtcaagtatggcgagaagtacgctgggaactattccggcggaaataagcgcaaactttccaccgcaatggcactcattggcggtcctcccgtggtgtttctggatgaacctactaccggaatggacccaaaggcaaggagattcctctggaactgcgctttgagcgtcgttaaggaggggcgatccgtggtgttaacatctcattctatggaggaatgcgaggcactgtgtaccagaatggcgatcatggtgaacgggcgcttccggtgtctgggcagtgtacagcacctaaagaacagatttggggacggatacaccatcgtcgtgcgaattgcaggaagtaaccccgacctcaagcccgttcaagattttttcggcctagctttccccggctctgtgctcaaagaaaagcacagaaatatgctgcagtatcaattgccaagtagcctgtcaagcctggctagaatcttttccattctatcccaatcgaaaaaaagactgcacatcgaagactattccgtgagccagactactcttgaccaggtgttcgttaattttgcaaaggatcagtctgacgacgatcatttgaaggacctctccttacataaaaatcagaccgtggtggatgtggccgtactcactagtttcttgcaagatgaaaaggtgaaggagtcttacgtgtag

SEQ ID NO: 156780 - DNA, 1092 bp, Artificial Sequence
  derived and/or modified sequence
atggcctgctggccccagctgcggctgctgctgtggaagaacctgactttcaggcgccgacagacgtgtcagctgttactcgaagtggcatggccactcttcatcttcctcattctgatctctgtgcggctttcttaccctccctacgagcagcacgagtgccattttcctaacaaggcaatgccgagcgccggtacactcccttgggtgcagggtatcatttgtaatgccaataacccatgctttagataccccaccccaggggaagccccaggggtcgtggggaatttcaataagagtatcgtcgcaaggctcttcagcgatgcgagaagactgttgctgtattctcaaaaggatacctccatgaaagatatgcgcaaagttctcaggaccctccaacagatcaaaaagtcatcgtccaatttaaagctgcaggacttcttggtcgataacgaaacattttccggattcttgtaccacaatctgtctctccccaagtcgactgtggacaagatgttgcgcgctgacgtaattctccacaaggtctttctgcaggggtaccagctgcacctgacatccttatgtaacggctctaaaagcgaggagatgattcagttgggagatcaggaagtgtcggagctgtgtggactcccaagagaaaagctggccgccgctgaacgggtcctccggtccaatatggacatcctgaagcctatcctcatggatgttacttgcgatgacatagcccatggacaactcactgtcccacgctccgctgcagtggcggccacgggcgacgccaaacctaacatgatgggacgggaaactttactgagcatttgcgcgtcggtgcccaaggtggagtttcacgagcgacacattctcaagcattttagcttttgtgtgtgcgtctctgtgagcctgttcccagcaaagggcatcgtctccttctcttgggcatcctttcggatctgggtattgtggaaagccgtcttttggcaacacggggagagcatggctgtctgggaggggcagctggggttaggcctgaacatagcatttgaatatttcacctccatcgacgtgggttag

SEQ ID NO: 156781 - DNA, 6785 bp, Artificial Sequence
  derived and/or modified sequence
atggcctgttggccccagctgaggttacttctgtggaaaaaccttaccttccggaggagacagacatgccagctactgctcgaggtcgcttggccgctgttcatcttcctcatccttattagcgtgcgactctcctaccctccatacgaacagcacgagtgccattttccgaacaaggctatgccatctgctggaaccctgccctgggtacagggaatcatctgcaatgcaaacaatccatgctttcgttaccctaccccaggcgaggctcccggtgtggtcggaaattttaacaaatcgatcgtggcacgactcttttcagacgctcggcgactgttgctatatagccagaaggacacttccatgaaggacatgaggaaggtgctgaggaccctgcagcagattaaaaaatcaagtagtaatcttaaattacaagactttcttgtggacaacgaaactttttccggattcttataccataacctgagcctgccaaaaagcacggtagataagatgctgagagctgatgtcattctccacaaggtgttcctgcaaggctaccaactccatctaacctccttatgcaatggctctaagtccgaagaaatgatccagctcggggaccaggaagtgtccgaactgtgcggcctccctcgggagaagctcgcagccgcagaacgagtcctgcgcagtaacatggacatcctcaaaccaatcctgcggacacttaactccacatctccttttccatcaaaagaacttgcggaggccactaaaaccctgttgcattctcttggcaccctcgcacaggaactcttttctatgagatcatggagcgatatgcgccaggaagtgatgttcctgacaaacgtgaactcaagctcttcaagtacgcagatttatcaggccgttagccggatcgtttgcggacaccccgagggaggtggcctgaaaattaagtccttaaattggtacgaggataataattacaaagctctgtttggagggaatggcacagaagaagacgcggagactttctacgataactcaaccacgccatattgcaacgatctgatgaaaaacctggaatctagtccccttagccggattatttggaaggccctgaagcccctgttggtcggcaaaattctctacacgcctgacacacccgctactaggcaggtgatggccgaagtcaacaaaaccttccaagaactcgccgtgtttcatgatttagagggtatgtgggaagaattgtctccgaagatctggacgttcatggagaactctcaagaaatggacctcgtgaggatgctgctggacagtagggacaacgatcatttctgggagcagcaactggacggactggactggacagctcaggacatcgttgcatttctggccaagcatccagaagatgtacaaagctcaaatggcagcgtgtatacgtggagggaagcctttaacgagactaatcaggccattcgcaccatttctcgttttatggagtgcgtgaatctgaacaaacttgaacctattgcgacagaagtttggctgataaacaagtctatggagctgctggatgagagaaaattctgggctggcatcgtcttcactggcattaccccagggtctattgagctccctcaccacgttaagtataagatacgtatggacatcgacaacgttgagagaacaaataagatcaaggacggatactgggaccctggaccaagggcggacccatttgaagatatgagatacgtgtggggaggatttgcatatttgcaggatgtcgtggagcaggctataattcgtgtgcttacgggaacggagaaaaagacaggagtctatatgcagcagatgccttacccatgctatgtcgacgatatctttctgcgcgtgatgagccgtagcatgcctctcttcatgaccctcgcttggatctatagtgtggctgtgatcatcaaagggattgtttacgaaaaagaggctcgactcaaagagaccatgcggattatgggactggataatagtatactgtggttttcgtggtttattagctcactgattcccttgctggtaagcgctggactgctggtagtgatcctgaagttgggcaatttgttaccatacagtgaccctagcgtagtgtttgtgttcctctctgtgttcgccgtagtgacgattctacaatgtttcctgatcagcactttattctctcgagctaacctggccgcagcatgcgggggtatcatttattttactctttaccttccctatgtgctgtgtgtcgcctggcaggattacgtgggatttacactgaagatcttcgcttccctcttatctccagtcgctttcgggtttggctgcgaatacttcgccctgtttgaagaacaggggattggagttcagtgggataatttgttcgagtcacccgtagaagaggacggtttcaatctcactacctctgtctctatgatgctgttcgataccttcctgtacggagtaatgacttggtacattgaggcagtgtttcctggccagtatggcatcccgaggccctggtatttcccctgtaccaaatcctactggtttggcgaagaatcggacgaaaagtcacatcccggtagcaatcaaaagcgaatttccgaaatctgcatggaggaggaacccacacatctgaaactgggtgtgtctatacagaatctggtgaaagtgtaccgtgatggaatgaaggtggcggtcgatgggctggccctcaacttttacgaaggacaaatcacaagtttcctcggccataatggggcagggaaaaccacaaccatgtccattctgaccggcctgttccctcccacgtcaggcaccgcttatatcctggggaaggacattagaagcgagatgtccaccattcgccagaacctcggtgtctgccctcagcacaatgtactctttgacatgcttaccgtggaggagcatatctggttctacgctagactgaaggggctctccgagaagcacgttaaggcggaaatggagcaaatggccctggatgtgggcctgccttcctcaaaactaaagtctaaaacatcacagctgtcgggaggcatgcagcgtaagctgagtgttgcccttgcattcgtcggcggttcgaaagtcgtgatcttagacgagcccactgcgggtgtggacccctattcccgccgagggatctgggagttacttcttaaatacagacaagggcgtacaattatcctgagcacacatcacatggacgaggcagatgttctgggcgatcgcatcgccattatcagccatgggaagctctgctgcgtagggagttccctgttcctgaagaatcagctagggacagggtactacctgactctcgtaaagaaagacgttgaaagcagtctctcatcatgccggaactcctcaagcacagtatcctacctgaagaaggaggactctgtgagccagtccagctcggatgcaggcctggggtctgatcatgagtccgataccttgaccatcgacgtcagcgctatctctaacttaattcgaaaacatgtatcagaagccaggcttgtagaggatattggacatgagttgacctacgtcttgccctatgaagcagccaaggagggcgcttttgtagagcttttccacgagatcgacgaccgcctctctgacttagggataagcagttatggcatctcagagaccactctcgaggaaatttttttgaaggtagctgaggagtcaggggtggatgccgaaacttccgatggaacccttccagcaagacggaatagacgcgcttttggggataaacagagttgtctgcggcctttcacagaagacgacgccgcagaccctaacgatagtgatatcgatcctgaaagtcgggaaaccgatctcctgagcggaatggatgggaagggttcataccaggtgaagggatggaaactgacacagcagcagttcgttgccctgctatggaaacgtcttctgattgccagacgcagccgcaaggggtttttcgcccagattgtgctgcccgctgtattcgtttgtattgccctggtgttttcacttatagtgcccccttttggcaagtacccttcactggaactgcaaccctggatgtacaatgagcagtacacattcgtttccaatgatgcaccggaagacaccggcactcttgagcttctcaacgccctcacgaaggatcctggatttggcactagatgcatggagggcaatcctatcccagacaccccatgtcaggcaggggaggaagaatggacaacggcacccgtcccccaaacaatcatggacctgttccagaatggcaattggaccatgcagaacccatcccctgcgtgtcaatgcagctctgacaagattaagaagatgttacccgtatgccctcccggagccggagggctgccacccccacagcggaaacaaaacaccgcagatatcctacaggatctgaccggcaggaatatcagcgattatcttgttaaaacttatgtccaaattattgccaaatcgctcaagaacaaaatttgggtgaatgagtttagatatggcggtttctcgctcggcgtgagtaacacacaggctttacccccttcccaggaggtgaacgacgctatcaagcagatgaagaagcatctgaaattggctaaagattcatcagccgaccggtttctaaattctctgggacggttcatgaccggtcttgacaccaagaacaacgttaaagtctggtttaacaataaaggttggcatgccatatctagctttttgaacgtgataaataatgcaattctaagagccaatctccagaagggcgaaaatccatctcactacggcatcaccgcctttaatcatcccttaaatcttacgaagcaacagttatcagaggtcgcacttatgaccacgtccgtggacgtactagtttcaatctgtgtgatcttcgctatgtctttcgttcctgcttcatttgtggtgtttctgattcaagagcgcgtgagcaaagcaaaacacctgcaattcatcagtggcgtgaagcctgtgatctactggctcagcaattttgtgtgggacatgtgtaattatgtggtgcccgcaacacttgtcatcattattttcatttgcttccagcagaaatcgtatgtaagctccacaaacttgccagtacttgctctactcctgctcctctatgggtggtccattacccccctgatgtatcccgcttctttcgtgtttaaaataccctcaacagcgtacgtagtactcacaagcgttaaccttttcataggtattaacgggtccgtcgccacctttgttctcgagttattcactgacaataagctgaataatattaatgatattctcaagagtgtgttcctcatctttccacacttttgtctaggcagaggtctgatcgacatggtgaagaaccaggcaatggcggacgcactcgaaagattcggcgaaaatcgttttgtctccccattatcttgggacctggttggaagaaatcttttcgcaatggccgtggaaggcgttgttttttttctgatcacagtcctgatccagtaccgcttctttattcggcctcgcccagtgaacgcaaagctgagcccactgaacgacgaggacgaagatgtgcgcagggaacgccaacgcattctggatggtggcggacagaatgatattttggagattaaggaactgactaagatctaccggaggaagcgaaagcccgcagtagatcggatttgcgtgggaatcccacctggggagtgctttggtctcttgggagtgaatggagctggaaagagttctacctttaagatgctgaccggagacacaacggtgacaagaggtgacgccttcctcaacaaaaactcaatcctctcaaacatccacgaggtacatcagaacatgggctattgcccccagtttgacgccatcacagagctgctcacagggagggaacatgtggaattctttgctttgctaaggggtgtgcctgagaaggaggtaggcaaagtcggcgagtgggcgatcagaaagctcggcttggtgaagtacggagaaaagtacgccggaaactacagcgggggtaacaaaagaaaattgtctaccgccatggcccttataggaggaccgcctgttgtcttcctcgatgaaccaaccacggggatggaccctaaagcaaggcgatttctatggaattgtgctctgagtgtcgtgaaagaaggcagaagcgtcgtgctgacgtcccattccatggaggaatgcgaggcactttgcacccgcatggccatcatggtgaatggcagatttaggtgcctagggtcagttcagcatctgaagaacaggttcggagacggctatactattgtggtaagaattgcaggttccaaccccgatctcaagccagtgcaggattttttcggcttggcctttcctggctcagtgctgaaggagaagcacagaaatatgttgcaatatcaactgccaagcagcctgtccagtctggcaaggatcttctctattctgagccagtcaaagaagagacttcacattgaggactattctgtctcccagacgacgctggaccaggtgtttgtcaacttcgcaaaggatcagtctgacgacgaccatttgaaagatctcagtctacacaagaatcaaacagtcgtggacgtcgccgtgctcacatctttccttcaggacgagaaggttaaagagagctatgtcta

SEQ ID NO: 156782 - DNA, 1092 bp, Artificial Sequence
  derived and/or modified sequence
atggcatgttggcctcagctccgccttctattatggaagaacctgaccttcaggcgtagacagacttgccagctgttgctggaagtagcatggcccctgtttatctttctcatactgatcagcgttagactgtcttaccctccctatgagcagcatgaatgccattttcctaacaaagccatgccctcagctggcacgctcccttgggtgcagggaatcatttgcaatgctaacaacccgtgctttagatatcctacccctggcgaggccccaggagtcgtgggcaattttaacaaatctattgtggctagactcttttccgacgccaggagactgctcctgtattctcagaaggacaccagtatgaaagatatgagaaaggtgttgcgaacgctgcagcaaattaaaaaaagctcctcaaatctgaagttacaggattttctggttgataatgagaccttctctgggtttctgtatcacaacctgtctctcccgaaatcaactgtggacaagatgctgagagccgacgtgattttacacaaggtgtttctacaaggatatcagctgcatttaactagtctctgtaacggaagcaaatctgaggagatgatccagctcggagaccaagaagtaagtgagctgtgcgggctgcctcgggagaagctcgcggcagctgaaagagtgctgcggagtaacatggacattctgaaaccaatcctcatggatgtcacctgtgatgatatcgcacacggccagttgactgttcctaggtctgctgctgttgccgctacaggcgacgccaagccgaacatgatgggacgggagaccctcttgtcgatatgtgccagcgtccccaaggttgagtttcacgagagacatattcttaagcacttctccttttgcgtttgcgtcagcgtgtcactctttcctgcaaagggtatagtgtccttcagctgggcctcttttcggatctgggtgctgtggaaagccgtgttttggcagcacggggagagcatggcggtctgggagggacaactcggtctggggctgaatatagcgttcgagtattttacatcaatcgatgtcgggtag

SEQ ID NO: 156783 - DNA, 10494 bp, Artificial Sequence
  derived and/or modified sequence
agagcacaggctttgaccgatagtaacctctgcgctcggtgcagccgaatctataaaaggaactagtcccggcaaaaaccccgtaattgcgagcgagagtgagtggggccgggacccgcagagccgagccgacccttctctcccgggctgcggcagggcagggcggggagctccgcgcaccaacagagccggttctcagggcgctttgctccttgttttttccccggttctgttttctccccttctccggaaggcttgtcaaggggtaggagaaagagacgcaaacacaaaagtggaaaacagttaatgaccagccacggcgtccctgctgtgagctctggccgctgccttccagggctcccgagccacacgctgggggtgctggctgagggaacatggcttgttggcctcagctgaggttgctgctgtggaagaacctcactttcagaagaagacaaacatgtcagctgctgctggaagtggcctggcctctatttatcttcctgatcctgatctctgttcggctgagctacccaccctatgaacaacatgaatgccattttccaaataaagccatgccctctgcaggaacacttccttgggttcaggggattatctgtaatgccaacaacccctgtttccgttacccgactcctggggaggctcccggagttgttggaaactttaacaaatccattgtggctcgcctgttctcagatgctcggaggcttcttttatacagccagaaagacaccagcatgaaggacatgcgcaaagttctgagaacattacagcagatcaagaaatccagctcaaacttgaagcttcaagatttcctggtggacaatgaaaccttctctgggttcctgtatcacaacctctctctcccaaagtctactgtggacaagatgctgagggctgatgtcattctccacaaggtatttttgcaaggctaccagttacatttgacaagtctgtgcaatggatcaaaatcagaagagatgattcaacttggtgaccaagaagtttctgagctttgtggcctaccaagggagaaactggctgcagcagagcgagtacttcgttccaacatggacatcctgaagccaatcctgagaacactaaactctacatctcccttcccgagcaaggagctggctgaagccacaaaaacattgctgcatagtcttgggactctggcccaggagctgttcagcatgagaagctggagtgacatgcgacaggaggtgatgtttctgaccaatgtgaacagctccagctcctccacccaaatctaccaggctgtgtctcgtattgtctgcgggcatcccgagggaggggggctgaagatcaagtctctcaactggtatgaggacaacaactacaaagccctctttggaggcaatggcactgaggaagatgctgaaaccttctatgacaactctacaactccttactgcaatgatttgatgaagaatttggagtctagtcctctttcccgcattatctggaaagctctgaagccgctgctcgttgggaagatcctgtatacacctgacactccagccacaaggcaggtcatggctgaggtgaacaagaccttccaggaactggctgtgttccatgatctggaaggcatgtgggaggaactcagccccaagatctggaccttcatggagaacagccaagaaatggaccttgtccggatgctgttggacagcagggacaatgaccacttttgggaacagcagttggatggcttagattggacagcccaagacatcgtggcgtttttggccaagcacccagaggatgtccagtccagtaatggttctgtgtacacctggagagaagctttcaacgagactaaccaggcaatccggaccatatctcgcttcatggagtgtgtcaacctgaacaagctagaacccatagcaacagaagtctggctcatcaacaagtccatggagctgctggatgagaggaagttctgggctggtattgtgttcactggaattactccaggcagcattgagctgccccatcatgtcaagtacaagatccgaatggacattgacaatgtggagaggacaaataaaatcaaggatgggtactgggaccctggtcctcgagctgacccctttgaggacatgcggtacgtctgggggggcttcgcctacttgcaggatgtggtggagcaggcaatcatcagggtgctgacgggcaccgagaagaaaactggtgtctatatgcaacagatgccctatccctgttacgttgatgacatctttctgcgggtgatgagccggtcaatgcccctcttcatgacgctggcctggatttactcagtggctgtgatcatcaagggcatcgtgtatgagaaggaggcacggctgaaagagaccatgcggatcatgggcctggacaacagcatcctctggtttagctggttcattagtagcctcattcctcttcttgtgagcgctggcctgctagtggtcatcctgaagttaggaaacctgctgccctacagtgatcccagcgtggtgtttgtcttcctgtccgtgtttgctgtggtgacaatcctgcagtgcttcctgattagcacactcttctccagagccaacctggcagcagcctgtgggggcatcatctacttcacgctgtacctgccctacgtcctgtgtgtggcatggcaggactacgtgggcttcacactcaagatcttcgctagcctgctgtctcctgtggcttttgggtttggctgtgagtactttgccctttttgaggagcagggcattggagtgcagtgggacaacctgtttgagagtcctgtggaggaagatggcttcaatctcaccacttcggtctccatgatgctgtttgacaccttcctctatggggtgatgacctggtacattgaggctgtctttccaggccagtacggaattcccaggccctggtattttccttgcaccaagtcctactggtttggcgaggaaagtgatgagaagagccaccctggttccaaccagaagagaatatcagaaatctgcatggaggaggaacccacccacttgaagctgggcgtgtccattcagaacctggtaaaagtctaccgagatgggatgaaggtggctgtcgatggcctggcactgaatttttatgagggccagatcacctccttcctgggccacaatggagcggggaagacgaccaccatgtcaatcctgaccgggttgttccccccgacctcgggcaccgcctacatcctgggaaaagacattcgctctgagatgagcaccatccggcagaacctgggggtctgtccccagcataacgtgctgtttgacatgctgactgtcgaagaacacatctggttctatgcccgcttgaaagggctctctgagaagcacgtgaaggcggagatggagcagatggccctggatgttggtttgccatcaagcaagctgaaaagcaaaacaagccagctgtcaggtggaatgcagagaaagctatctgtggccttggcctttgtcgggggatctaaggttgtcattctggatgaacccacagctggtgtggacccttactcccgcaggggaatatgggagctgctgctgaaataccgacaaggccgcaccattattctctctacacaccacatggatgaagcggacgtcctgggggacaggattgccatcatctcccatgggaagctgtgctgtgtgggctcctccctgtttctgaagaaccagctgggaacaggctactacctgaccttggtcaagaaagatgtggaatcctccctcagttcctgcagaaacagtagtagcactgtgtcatacctgaaaaaggaggacagtgtttctcagagcagttctgatgctggcctgggcagcgaccatgagagtgacacgctgaccatcgatgtctctgctatctccaacctcatcaggaagcatgtgtctgaagcccggctggtggaagacatagggcatgagctgacctatgtgctgccatatgaagctgctaaggagggagcctttgtggaactctttcatgagattgatgaccggctctcagacctgggcatttctagttatggcatctcagagacgaccctggaagaaatattcctcaaggtggccgaagagagtggggtggatgctgagacctcagatggtaccttgccagcaagacgaaacaggcgggccttcggggacaagcagagctgtcttcgcccgttcactgaagatgatgctgctgatccaaatgattctgacatagacccagaatccagagagacagacttgctcagtgggatggatggcaaagggtcctaccaggtgaaaggctggaaacttacacagcaacagtttgtggcccttttgtggaagagactgctaattgccagacggagtcggaaaggattttttgctcagattgtcttgccagctgtgtttgtctgcattgcccttgtgttcagcctgatcgtgccaccctttggcaagtaccccagcctggaacttcagccctggatgtacaacgaacagtacacatttgtcagcaatgatgctcctgaggacacgggaaccctggaactcttaaacgccctcaccaaagaccctggcttcgggacccgctgtatggaaggaaacccaatcccagacacgccctgccaggcaggggaggaagagtggaccactgccccagttccccagaccatcatggacctcttccagaatgggaactggacaatgcagaacccttcacctgcatgccagtgtagcagcgacaaaatcaagaagatgctgcctgtgtgtcccccaggggcaggggggctgcctcctccacaaagaaaacaaaacactgcagatatccttcaggacctgacaggaagaaacatttcggattatctggtgaagacgtatgtgcagatcatagccaaaagcttaaagaacaagatctgggtgaatgagtttaggtatggcggcttttccctgggtgtcagtaatactcaagcacttcctccgagtcaagaagttaatgatgccatcaaacaaatgaagaaacacctaaagctggccaaggacagttctgcagatcgatttctcaacagcttgggaagatttatgacaggactggacaccaaaaataatgtcaaggtgtggttcaataacaagggctggcatgcaatcagctctttcctgaatgtcatcaacaatgccattctccgggccaacctgcaaaagggagagaaccctagccattatggaattactgctttcaatcatcccctgaatctcaccaagcagcagctctcagaggtggctctgatgaccacatcagtggatgtccttgtgtccatctgtgtcatctttgcaatgtccttcgtcccagccagctttgtcgtattcctgatccaggagcgggtcagcaaagcaaaacacctgcagttcatcagtggagtgaagcctgtcatctactggctctctaattttgtctgggatatgtgcaattacgttgtccctgccacactggtcattatcatcttcatctgcttccagcagaagtcctatgtgtcctccaccaatctgcctgtgctagcccttctacttttgctgtatgggtggtcaatcacacctctcatgtacccagcctcctttgtgttcaagatccccagcacagcctatgtggtgctcaccagcgtgaacctcttcattggcattaatggcagcgtggccacctttgtgctggagctgttcaccgacaataagctgaataatatcaatgatatcctgaagtccgtgttcttgatcttcccacatttttgcctgggacgagggctcatcgacatggtgaaaaaccaggcaatggctgatgccctggaaaggtttggggagaatcgctttgtgtcaccattatcttgggacttggtgggacgaaacctcttcgccatggccgtggaaggggtggtgttcttcctcattactgttctgatccagtacagattcttcatcaggcccagacctgtaaatgcaaagctatctcctctgaatgatgaagatgaagatgtgaggcgggaaagacagagaattcttgatggtggaggccagaatgacatcttagaaatcaaggagttgacgaagatatatagaaggaagcggaagcctgctgttgacaggatttgcgtgggcattcctcctggtgagtgctttgggctcctgggagttaatggggctggaaaatcatcaactttcaagatgttaacaggagataccactgttaccagaggagatgctttccttaacaaaaatagtatcttatcaaacatccatgaagtacatcagaacatgggctactgccctcagtttgatgccatcacagagctgttgactgggagagaacacgtggagttctttgcccttttgagaggagtcccagagaaagaagttggcaaggttggtgagtgggcgattcggaaactgggcctcgtgaagtatggagaaaaatatgctggtaactatagtggaggcaacaaacgcaagctctctacagccatggctttgatcggcgggcctcctgtggtgtttctggatgaacccaccacaggcatggatcccaaagcccggcggttcttgtggaattgtgccctaagtgttgtcaaggaggggagatcagtagtgcttacatctcatagtatggaagaatgtgaagctctttgcactaggatggcaatcatggtcaatggaaggttcaggtgccttggcagtgtccagcatctaaaaaataggtttggagatggttatacaatagttgtacgaatagcagggtccaacccggacctgaagcctgtccaggatttctttggacttgcatttcctggaagtgttctaaaagagaaacaccggaacatgctacaataccagcttccatcttcattatcttctctggccaggatattcagcatcctctcccagagcaaaaagcgactccacatagaagactactctgtttctcagacaacacttgaccaagtatttgtgaactttgccaaggaccaaagtgatgatgaccacttaaaagacctctcattacacaaaaaccagacagtagtggacgttgcagttctcacatcttttctacaggatgagaaagtgaaagaaagctatgtatgaagaatcctgttcatacggggtggctgaaagtaaagaggaactagactttcctttgcaccatgtgaagtgttgtggagaaaagagccagaagttgatgtgggaagaagtaaactggatactgtactgatactattcaatgcaatgcaattcaatgcaatgaaaacaaaattccattacaggggcagtgcctttgtagcctatgtcttgtatggctctcaagtgaaagacttgaatttagttttttacctatacctatgtgaaactctattatggaacccaatggacatatgggtttgaactcacacttttttttttttttttgttcctgtgtattctcattggggttgcaacaataattcatcaagtaatcatggccagcgattattgatcaaaatcaaaaggtaatgcacatcctcattcactaagccatgccatgcccaggagactggtttcccggtgacacatccattgctggcaatgagtgtgccagagttattagtgccaagtttttcagaaagtttgaagcaccatggtgtgtcatgctcacttttgtgaaagctgctctgctcagagtctatcaacattgaatatcagttgacagaatggtgccatgcgtggctaacatcctgctttgattccctctgataagctgttctggtggcagtaacatgcaacaaaaatgtgggtgtctccaggcacgggaaacttggttccattgttatattgtcctatgcttcgagccatgggtctacagggtcatccttatgagactcttaaatatacttagatcctggtaagaggcaaagaatcaacagccaaactgctggggctgcaagctgctgaagccagggcatgggattaaagagattgtgcgttcaaacctagggaagcctgtgcccatttgtcctgactgtctgctaacatggtacactgcatctcaagatgtttatctgacacaagtgtattatttctggctttttgaattaatctagaaaatgaaaagatggagttgtattttgacaaaaatgtttgtactttttaatgttatttggaattttaagttctatcagtgacttctgaatccttagaatggcctctttgtagaaccctgtggtatagaggagtatggccactgccccactatttttattttcttatgtaagtttgcatatcagtcatgactagtgcctagaaagcaatgtgatggtcaggatctcatgacattatatttgagtttctttcagatcatttaggatactcttaatctcacttcatcaatcaaatattttttgagtgtatgctgtagctgaaagagtatgtacgtacgtataagactagagagatattaagtctcagtacacttcctgtgccatgttattcagctcactggtttacaaatataggttgtcttgtggttgtaggagcccactgtaacaatactgggcagcctttttttttttttttttaattgcaacaatgcaaaagccaagaaagtataagggtcacaagtctaaacaatgaattcttcaacagggaaaacagctagcttgaaaacttgctgaaaaacacaacttgtgtttatggcatttagtaccttcaaataattggctttgcagatattggataccccattaaatctgacagtctcaaatttttcatctcttcaatcactagtcaagaaaaatataaaaacaacaaatacttccatatggagcatttttcagagttttctaacccagtcttatttttctagtcagtaaacatttgtaaaaatactgtttcactaatacttactgttaactgtcttgagagaaaagaaaaatatgagagaactattgtttggggaagttcaagtgatctttcaatatcattactaacttcttccactttttccagaatttgaatattaacgctaaaggtgtaagacttcagatttcaaattaatctttctatattttttaaatttacagaatattatataacccactgctgaaaaagaaaaaaatgattgttttagaagttaaagtcaatattgattttaaatataagtaatgaaggcatatttccaataactagtgatatggcatcgttgcattttacagtatcttcaaaaatacagaatttatagaataatttctcctcatttaatatttttcaaaatcaaagttatggtttcctcattttactaaaatcgtattctaattcttcattatagtaaatctatgagcaactccttacttcggttcctctgatttcaaggccatattttaaaaaatcaaaaggcactgtgaactattttgaagaaaacacaacattttaatacagattgaaaggacctcttctgaagctagaaacaatctatagttatacatcttcattaatactgtgttaccttttaaaatagtaattttttacattttcctgtgtaaacctaattgtggtagaaatttttaccaactctatactcaatcaagcaaaatttctgtatattccctgtggaatgtacctatgtgagtttcagaaattctcaaaatacgtgttcaaaaatttctgcttttgcatctttgggacacctcagaaaacttattaacaactgtgaatatgagaaatacagaagaaaataataagccctctatacataaatgcccagcacaattcattgttaaaaaacaaccaaacctcacactactgtatttcattatctgtactgaaagcaaatgctttgtgactattaaatgttgcacatcattcattcactgtatagtaatcattgactaaagccatttgtctgtgttttcttcttgtggttgtatatatcaggtaaaatattttccaaagagccatgtgtcatgtaatactgaaccactttgatattgagacattaatttgtacccttgttattatctactagtaataatgtaatactgtagaaatattgctctaattcttttcaaaattgttgcatcccccttagaatgtttctatttccataaggatttaggtatgctattatcccttcttataccctaagatgaagctgtttttgtgctctttgttcatcattggccctcattccaagcactttacgctgtctgtaatgggatctatttttgcactggaatatctgagaattgcaaaactagacaaaagtttcacaacagatttctaagttaaatcattttcattaaaaggaaaaaagaaaaaaaattttgtatgtcaataactttatatgaagtattaaaatgcatatttctatgttgtaatataatgagtcacaaaataaagctgtgacagttctgttggtctacagaaa

SEQ ID NO: 156784 - DNA, 1540 bp, Artificial Sequence
  derived and/or modified sequence
gtgagtggggccgggacccgcagagccgagccgacccttctctcccgggctgcggcagggcagggcggggagctccgcgcaccaacagagccggttctcagggcgctttgctccttgttttttccccggttctgttttctccccttctccggaaggcttgtcaaggggtaggagaaagagacgcaaacacaaaagtggaaaacagttaatgaccagccacggcgtccctgctgtgagctctggccgctgccttccagggctcccgagccacacgctgggggtgctggctgagggaacatggcttgttggcctcagctgaggttgctgctgtggaagaacctcactttcagaagaagacaaacatgtcagctgctgctggaagtggcctggcctctatttatcttcctgatcctgatctctgttcggctgagctacccaccctatgaacaacatgaatgccattttccaaataaagccatgccctctgcaggaacacttccttgggttcaggggattatctgtaatgccaacaacccctgtttccgttacccgactcctggggaggctcccggagttgttggaaactttaacaaatccattgtggctcgcctgttctcagatgctcggaggcttcttttatacagccagaaagacaccagcatgaaggacatgcgcaaagttctgagaacattacagcagatcaagaaatccagctcaaacttgaagcttcaagatttcctggtggacaatgaaaccttctctgggttcctgtatcacaacctctctctcccaaagtctactgtggacaagatgctgagggctgatgtcattctccacaaggtatttttgcaaggctaccagttacatttgacaagtctgtgcaatggatcaaaatcagaagagatgattcaacttggtgaccaagaagtttctgagctttgtggcctaccaagggagaaactggctgcagcagagcgagtacttcgttccaacatggacatcctgaagccaatcctgatggatgtgacatgtgatgacattgcacatgggcagttaactgtgccaagaagtgcagcagtagcagcaaccggagatgcaaagcccaacatgatggggagagaaactcttctttcaatatgtgcttctgtaccaaaagtggaatttcacgagagacatattttgaaacatttctccttttgtgtgtgcgtgagtgtttccctgtttccagccaagggtattgtgagtttctcctgggcctccttcagaatctgggtgctctggaaagcagtgttttggcaacatggggaaagtatggcagtgtgggagggtcagctgggtctgggtttgaatattgcatttgaatattttaccagcattgatgtcggataaattatttagtccctgtaagcctcagttttctcttcttctacatacacataatatatttgactctttgttgtgattattggttacacatatgaagagcctggtgtggggcctggcacacaataggtgctcaataaatagaagttgataattt

SEQ ID NO: 156785 - DNA, 6786 bp, Artificial Sequence
  derived and/or modified sequence
atggcctgctggccccagctgagactgctgctgtggaagaacctgaccttcagaagaagacagacctgccagctgctgctggaggtggcctggcccctgttcatcttcctgatcctgatcagcgtgagactgagctaccccccctacgagcagcacgagtgccacttccccaacaaggccatgcccagcgccggcaccctgccctgggtgcagggcatcatctgcaacgccaacaacccctgcttcagataccccacccccggcgaggcccccggcgtggtgggcaacttcaacaagagcatcgtggccagactgttcagcgacgccagaagactgctgctgtacagccagaaggacaccagcatgaaggacatgagaaaggtgctgagaaccctgcagcagatcaagaagagcagcagcaacctgaagctgcaggacttcctggtggacaacgagaccttcagcggcttcctgtaccacaacctgagcctgcccaagagcaccgtggacaagatgctgagagccgacgtgatcctgcacaaggtgttcctgcagggctaccagctgcacctgaccagcctgtgcaacggcagcaagagcgaggagatgatccagctgggcgaccaggaggtgagcgagctgtgcggcctgcccagagagaagctggccgccgccgagagagtgctgagaagcaacatggacatcctgaagcccatcctgagaaccctgaacagcaccagccccttccccagcaaggagctggccgaggccaccaagaccctgctgcacagcctgggcaccctggcccaggagctgttcagcatgagaagctggagcgacatgagacaggaggtgatgttcctgaccaacgtgaacagcagcagcagcagcacccagatctaccaggccgtgagcagaatcgtgtgcggccaccccgagggcggcggcctgaagatcaagagcctgaactggtacgaggacaacaactacaaggccctgttcggcggcaacggcaccgaggaggacgccgagaccttctacgacaacagcaccaccccctactgcaacgacctgatgaagaacctggagagcagccccctgagcagaatcatctggaaggccctgaagcccctgctggtgggcaagatcctgtacacccccgacacccccgccaccagacaggtgatggccgaggtgaacaagaccttccaggagctggccgtgttccacgacctggagggcatgtgggaggagctgagccccaagatctggaccttcatggagaacagccaggagatggacctggtgagaatgctgctggacagcagagacaacgaccacttctgggagcagcagctggacggcctggactggaccgcccaggacatcgtggccttcctggccaagcaccccgaggacgtgcagagcagcaacggcagcgtgtacacctggagagaggccttcaacgagaccaaccaggccatcagaaccatcagcagattcatggagtgcgtgaacctgaacaagctggagcccatcgccaccgaggtgtggctgatcaacaagagcatggagctgctggacgagagaaagttctgggccggcatcgtgttcaccggcatcacccccggcagcatcgagctgccccaccacgtgaagtacaagatcagaatggacatcgacaacgtggagagaaccaacaagatcaaggacggctactgggaccccggccccagagccgaccccttcgaggacatgagatacgtgtggggcggcttcgcctacctgcaggacgtggtggagcaggccatcatcagagtgctgaccggcaccgagaagaagaccggcgtgtacatgcagcagatgccctacccctgctacgtggacgacatcttcctgagagtgatgagcagaagcatgcccctgttcatgaccctggcctggatctacagcgtggccgtgatcatcaagggcatcgtgtacgagaaggaggccagactgaaggagaccatgagaatcatgggcctggacaacagcatcctgtggttcagctggttcatcagcagcctgatccccctgctggtgagcgccggcctgctggtggtgatcctgaagctgggcaacctgctgccctacagcgaccccagcgtggtgttcgtgttcctgagcgtgttcgccgtggtgaccatcctgcagtgcttcctgatcagcaccctgttcagcagagccaacctggccgccgcctgcggcggcatcatctacttcaccctgtacctgccctacgtgctgtgcgtggcctggcaggactacgtgggcttcaccctgaagatcttcgccagcctgctgagccccgtggccttcggcttcggctgcgagtacttcgccctgttcgaggagcagggcatcggcgtgcagtgggacaacctgttcgagagccccgtggaggaggacggcttcaacctgaccaccagcgtgagcatgatgctgttcgacaccttcctgtacggcgtgatgacctggtacatcgaggccgtgttccccggccagtacggcatccccagaccctggtacttcccctgcaccaagagctactggttcggcgaggagagcgacgagaagagccaccccggcagcaaccagaagagaatcagcgagatctgcatggaggaggagcccacccacctgaagctgggcgtgagcatccagaacctggtgaaggtgtacagagacggcatgaaggtggccgtggacggcctggccctgaacttctacgagggccagatcaccagcttcctgggccacaacggcgccggcaagaccaccaccatgagcatcctgaccggcctgttcccccccaccagcggcaccgcctacatcctgggcaaggacatcagaagcgagatgagcaccatcagacagaacctgggcgtgtgcccccagcacaacgtgctgttcgacatgctgaccgtggaggagcacatctggttctacgccagactgaagggcctgagcgagaagcacgtgaaggccgagatggagcagatggccctggacgtgggcctgcccagcagcaagctgaagagcaagaccagccagctgagcggcggcatgcagagaaagctgagcgtggccctggccttcgtgggcggcagcaaggtggtgatcctggacgagcccaccgccggcgtggacccctacagcagaagaggcatctgggagctgctgctgaagtacagacagggcagaaccatcatcctgagcacccaccacatggacgaggccgacgtgctgggcgacagaatcgccatcatcagccacggcaagctgtgctgcgtgggcagcagcctgttcctgaagaaccagctgggcaccggctactacctgaccctggtgaagaaggacgtggagagcagcctgagcagctgcagaaacagcagcagcaccgtgagctacctgaagaaggaggacagcgtgagccagagcagcagcgacgccggcctgggcagcgaccacgagagcgacaccctgaccatcgacgtgagcgccatcagcaacctgatcagaaagcacgtgagcgaggccagactggtggaggacatcggccacgagctgacctacgtgctgccctacgaggccgccaaggagggcgccttcgtggagctgttccacgagatcgacgacagactgagcgacctgggcatcagcagctacggcatcagcgagaccaccctggaggagatcttcctgaaggtggccgaggagagcggcgtggacgccgagaccagcgacggcaccctgcccgccagaagaaacagaagagccttcggcgacaagcagagctgcctgagacccttcaccgaggacgacgccgccgaccccaacgacagcgacatcgaccccgagagcagagagaccgacctgctgagcggcatggacggcaagggcagctaccaggtgaagggctggaagctgacccagcagcagttcgtggccctgctgtggaagagactgctgatcgccagaagaagcagaaagggcttcttcgcccagatcgtgctgcccgccgtgttcgtgtgcatcgccctggtgttcagcctgatcgtgccccccttcggcaagtaccccagcctggagctgcagccctggatgtacaacgagcagtacaccttcgtgagcaacgacgcccccgaggacaccggcaccctggagctgctgaacgccctgaccaaggaccccggcttcggcaccagatgcatggagggcaaccccatccccgacaccccctgccaggccggcgaggaggagtggaccaccgcccccgtgccccagaccatcatggacctgttccagaacggcaactggaccatgcagaaccccagccccgcctgccagtgcagcagcgacaagatcaagaagatgctgcccgtgtgcccccccggcgccggcggcctgccccccccccagagaaagcagaacaccgccgacatcctgcaggacctgaccggcagaaacatcagcgactacctggtgaagacctacgtgcagatcatcgccaagagcctgaagaacaagatctgggtgaacgagttcagatacggcggcttcagcctgggcgtgagcaacacccaggccctgccccccagccaggaggtgaacgacgccatcaagcagatgaagaagcacctgaagctggccaaggacagcagcgccgacagattcctgaacagcctgggcagattcatgaccggcctggacaccaagaacaacgtgaaggtgtggttcaacaacaagggctggcacgccatcagcagcttcctgaacgtgatcaacaacgccatcctgagagccaacctgcagaagggcgagaaccccagccactacggcatcaccgccttcaaccaccccctgaacctgaccaagcagcagctgagcgaggtggccctgatgaccaccagcgtggacgtgctggtgagcatctgcgtgatcttcgccatgagcttcgtgcccgccagcttcgtggtgttcctgatccaggagagagtgagcaaggccaagcacctgcagttcatcagcggcgtgaagcccgtgatctactggctgagcaacttcgtgtgggacatgtgcaactacgtggtgcccgccaccctggtgatcatcatcttcatctgcttccagcagaagagctacgtgagcagcaccaacctgcccgtgctggccctgctgctgctgctgtacggctggagcatcacccccctgatgtaccccgccagcttcgtgttcaagatccccagcaccgcctacgtggtgctgaccagcgtgaacctgttcatcggcatcaacggcagcgtggccaccttcgtgctggagctgttcaccgacaacaagctgaacaacatcaacgacatcctgaagagcgtgttcctgatcttcccccacttctgcctgggcagaggcctgatcgacatggtgaagaaccaggccatggccgacgccctggagagattcggcgagaacagattcgtgagccccctgagctgggacctggtgggcagaaacctgttcgccatggccgtggagggcgtggtgttcttcctgatcaccgtgctgatccagtacagattcttcatcagacccagacccgtgaacgccaagctgagccccctgaacgacgaggacgaggacgtgagaagagagagacagagaatcctggacggcggcggccagaacgacatcctggagatcaaggagctgaccaagatctacagaagaaagagaaagcccgccgtggacagaatctgcgtgggcatcccccccggcgagtgcttcggcctgctgggcgtgaacggcgccggcaagagcagcaccttcaagatgctgaccggcgacaccaccgtgaccagaggcgacgccttcctgaacaagaacagcatcctgagcaacatccacgaggtgcaccagaacatgggctactgcccccagttcgacgccatcaccgagctgctgaccggcagagagcacgtggagttcttcgccctgctgagaggcgtgcccgagaaggaggtgggcaaggtgggcgagtgggccatcagaaagctgggcctggtgaagtacggcgagaagtacgccggcaactacagcggcggcaacaagagaaagctgagcaccgccatggccctgatcggcggcccccccgtggtgttcctggacgagcccaccaccggcatggaccccaaggccagaagattcctgtggaactgcgccctgagcgtggtgaaggagggcagaagcgtggtgctgaccagccacagcatggaggagtgcgaggccctgtgcaccagaatggccatcatggtgaacggcagattcagatgcctgggcagcgtgcagcacctgaagaacagattcggcgacggctacaccatcgtggtgagaatcgccggcagcaaccccgacctgaagcccgtgcaggacttcttcggcctggccttccccggcagcgtgctgaaggagaagcacagaaacatgctgcagtaccagctgcccagcagcctgagcagcctggccagaatcttcagcatcctgagccagagcaagaagagactgcacatcgaggactacagcgtgagccagaccaccctggaccaggtgttcgtgaacttcgccaaggaccagagcgacgacgaccacctgaaggacctgagcctgcacaagaaccagaccgtggtggacgtggccgtgctgaccagcttcctgcaggacgagaaggtgaaggagagctacgtgtag

SEQ ID NO: 156786 - DNA, 1092 bp, Artificial Sequence
  derived and/or modified sequence
atggcctgctggccccagctgagactgctgctgtggaagaacctgaccttcagaagaagacagacctgccagctgctgctggaggtggcctggcccctgttcatcttcctgatcctgatcagcgtgagactgagctaccccccctacgagcagcacgagtgccacttccccaacaaggccatgcccagcgccggcaccctgccctgggtgcagggcatcatctgcaacgccaacaacccctgcttcagataccccacccccggcgaggcccccggcgtggtgggcaacttcaacaagagcatcgtggccagactgttcagcgacgccagaagactgctgctgtacagccagaaggacaccagcatgaaggacatgagaaaggtgctgagaaccctgcagcagatcaagaagagcagcagcaacctgaagctgcaggacttcctggtggacaacgagaccttcagcggcttcctgtaccacaacctgagcctgcccaagagcaccgtggacaagatgctgagagccgacgtgatcctgcacaaggtgttcctgcagggctaccagctgcacctgaccagcctgtgcaacggcagcaagagcgaggagatgatccagctgggcgaccaggaggtgagcgagctgtgcggcctgcccagagagaagctggccgccgccgagagagtgctgagaagcaacatggacatcctgaagcccatcctgatggacgtgacctgcgacgacatcgcccacggccagctgaccgtgcccagaagcgccgccgtggccgccaccggcgacgccaagcccaacatgatgggcagagagaccctgctgagcatctgcgccagcgtgcccaaggtggagttccacgagagacacatcctgaagcacttcagcttctgcgtgtgcgtgagcgtgagcctgttccccgccaagggcatcgtgagcttcagctgggccagcttcagaatctgggtgctgtggaaggccgtgttctggcagcacggcgagagcatggccgtgtgggagggccagctgggcctgggcctgaacatcgccttcgagtacttcaccagcatcgacgtgggctag

SEQ ID NO: 156787 - protein, 386 aa, Artificial Sequence
  derived and/or modified sequence
MKDCSNGCSAECTGEGGSKEVVGTFKAKDLIVTPATILKEKPDPNNLVFGTVFTDHMLTVEWSSEFGWEKPHIKPLQNLSLHPGSSALHYAVELFEGLKAFRGVDNKIRLFQPNLNMDRMYRSAVRATLPVFDKEELLECIQQLVKLDQEWVPYSTSASLYIRPTFIGTEPSLGVKKPTKALLFVLLSPVGPYFSSGTFNPVSLWANPKYVRAWKGGTGDCKMGGNYGSSLFAQCEAVDNGCQQVLWLYGEDHQITEVGTMNLFLYWINEDGEEELATPPLDGIILPGVTRRCILDLAHQWGEFKVSERYLTMDDLTTALEGNRVREMFGSGTACVVCPVSDILYKGETIHIPTMENGPKLASRILSKLTDIQYGREESDWTIVLS

SEQ ID NO: 156788 - DNA, 1161 bp, Artificial Sequence
  derived and/or modified sequence
atgaaagactgcagcaacgggtgttcagccgaatgtacgggcgaaggtggaagcaaggaagtcgtaggtactttcaaggcaaaggacctgatcgtgacccccgctaccatcttgaaagaaaaacccgacccaaacaacttagtgttcgggacggtcttcaccgaccacatgctgacggtggaatggtcctccgagttcggttgggagaagcctcatattaagccacttcagaacttgtctctacatccaggctcatcagccctgcattacgccgtcgagttgttcgagggcctcaaagcctttcggggtgtggataacaagatcaggcttttccagccaaatctgaatatggatagaatgtatcgttcagccgtcagagcaacgttaccggtgttcgataaggaagagctgctggagtgtattcagcagctcgtaaagctggaccaggagtgggtcccctactcaacgtccgctagcctgtatattaggcccacgtttataggcactgaaccctctctgggggttaagaaacctactaaggcactgttgttcgtgctgttgtctccagttggcccctatttttcttccggtacatttaatcctgtttcactgtgggcaaaccccaaatatgtgagggcttggaagggggggactggtgactgtaaaatgggtggcaattatggaagctctctctttgcacagtgtgaggctgtcgataatggatgccaacaagtcctttggctgtacggcgaggaccaccaaattaccgaggtcggcacaatgaatctgttcctgtactggatcaatgaagacggagaggaggaactggccactcccccccttgatgggattatattgcccggcgtgacccggcgttgcatcctggacctggcacaccagtggggggaatttaaggtttccgaacgctaccttaccatggacgacttaactactgcacttgagggtaatagggtgcgggaaatgtttgggtctggaaccgcctgtgtggtgtgcccagtgtccgatattctgtataagggggaaactatccatatccctactatggagaatgggcccaaactggctagcaggattctctccaaactcactgatatacaatacgggagggaggagagcgattggactattgtgctgagttag

SEQ ID NO: 156789 - DNA, 1161 bp, Artificial Sequence
  derived and/or modified sequence
atgaaggactgcagcaatggctgcagcgcagaatgtactggagagggcggcagcaaggaggtggtgggcaccttcaaggccaaggacctgattgtgaccccagccaccatcctgaaggagaagccagaccccaacaacctggtgtttggaacagtgttcacagaccacatgctgactgtggagtggagcagcgagtttggctgggagaagccccacatcaagcccctgcagaacctgagcctgcaccctggcagcagcgccctgcactatgctgtggagctgtttgagggcctgaaggccttccggggcgtggacaacaagatccgcctcttccagcccaacctgaacatggacaggatgtacagatctgctgtgcgggccaccctgcctgtgtttgacaaggaggagctgctggagtgcatccagcagctggtgaagctggaccaggagtgggtgccctacagcaccagcgccagcctgtacatccggcccaccttcatcggcacagagcccagcctgggcgtgaagaagcccaccaaggccctgctgtttgtgctgctgagccctgtgggcccctacttcagcagcggcaccttcaaccctgtgtccctgtgggccaaccccaagtatgtgcgggcctggaagggcggcaccggggactgcaagatgggcggcaactacggcagcagcctgtttgcccagtgtgaggccgtggacaatggctgccagcaggtgctgtggctgtatggagaggaccaccagatcacagaggtgggcaccatgaacctcttcctgtactggatcaatgaagatggagaggaggagctggccaccccacccctggatggcatcatcctgcccggggtgacccggcgctgcatcctggacctggcccaccagtggggcgagttcaaggtgtctgagcgctacctgaccatggatgacctgaccacagccctggagggcaacagagtgcgggagatgtttggaagtggcacagcctgtgtggtgtgccctgtgtctgacatcctgtacaagggggagaccatccacatccccaccatggagaatggccccaagctggccagccgcatcctgagcaagctgacagacatccagtatggccgggaggagagtgactggaccatcgtgctgtcctag

SEQ ID NO: 156790 - DNA, 1161 bp, Artificial Sequence
  derived and/or modified sequence
atgaaggactgcagcaacggctgcagcgccgagtgcaccggcgagggtggttccaaggaggtggtgggaactttcaaggcgaaggatcttattgtgactcctgctacaattctcaaagagaagcccgaccctaataacctagtattcggcacggtgttcaccgaccacatgctgactgtcgagtggtcttcggaattcggatgggaaaagccccacataaagccgttgcagaaccttagtctccatccaggttccagtgcgcttcactacgcggtagagctgtttgagggactgaaggcatttaggggggtggataacaaaattcgcctatttcaaccaaacttgaatatggaccgcatgtacagaagcgcggtcagggccactttgcccgtatttgataaagaggaactcctcgagtgcatccagcagctggtcaagctagaccaggagtgggtaccctacagtacttccgcctccttgtacattcgacccacctttatcggtacagagccaagtctgggagttaagaagccgaccaaggccctgctgtttgtgttgctgagtcccgttgggccatacttcagctctgggactttcaatccagtatcactctgggctaaccccaagtacgtacgagcctggaaaggggggacgggggactgtaagatgggtgggaactacggatcttcactcttcgctcaatgtgaggctgtagataacggttgccagcaggtattatggctttatggtgaagaccaccagatcaccgaagtcggcactatgaacctttttctctattggatcaatgaggacggcgaggaggaactcgcaaccccccccctggatggcattatcttaccaggagtgacacggaggtgcatactcgacttagcccatcagtggggggaatttaaggtgagcgagcggtatctgactatggatgatcttactactgcacttgaggggaaccgagtacgcgaaatgtttggcagtgggaccgcctgcgtggtgtgccctgtttcggacatcctgtacaagggcgaaacaatccacatcccaaccatggaaaacggccccaagctggcttcgcggattctgagtaagttgactgacattcagtacggtcgcgaagagagcgattggactatcgtcctgtcatag

SEQ ID NO: 156791 - DNA, 1161 bp, Artificial Sequence
  derived and/or modified sequence
atgaaggactgttcaaatggatgttcagccgaatgcaccggcgagggaggatccaaagaagtcgtcggcacatttaaagccaaggatctaattgttaccccagcaacgatcctcaaagagaaaccagatcctaacaacctggtcttcggtaccgtgtttactgaccacatgcttacagtggaatggagctcagagttcggatgggaaaagccccatattaagcctttgcagaacctgtcactgcatcctggtagctcagcactgcactacgcagtggagctctttgagggtcttaaagccttcaggggcgtcgataataagattagactgtttcagcctaacctcaacatggatagaatgtaccggtccgccgtgcgggctacattgcccgtgtttgataaggaagagctgctcgagtgtatccagcaactggtgaaattagatcaagagtgggttccatactctacttccgcatccctttacatccgcccaaccttcatcggaactgaaccatctttaggtgtgaaaaagcctaccaaggccctcctgtttgtgctgttgtctccagttggaccttactttagttcagggactttcaaccccgtctctctttgggccaatccaaagtatgtcagagcttggaagggcggtacaggagactgtaaaatgggtgggaattacggctcctccctatttgcgcagtgcgaggccgttgataacggttgccaacaggttctatggctttacggagaggatcaccaaattaccgaagtcgggacaatgaacctgtttctatattggattaacgaggatggggaggaggaactcgccactccaccgctcgacggcatcatactgcccggagttaccaggcgttgcatactggaccttgcccaccagtggggtgagtttaaggttagcgagaggtacttaacgatggacgatttaacgactgcactggaaggcaaccgagtgagggaaatgtttggaagcggtactgcctgtgtcgtctgtccggtgagcgatatcttgtataagggagaaaccatccacatcccaaccatggaaaatggcccaaagctggcgagtcggatcttgtctaaactcaccgatatccagtatgggagagaagagagcgactggactatcgtgctttcctag

SEQ ID NO: 156792 - DNA, 8335 bp, Artificial Sequence
  derived and/or modified sequence
agtagggaggtgggcaggagccagtgatgacggaatggcaatcacatttgacctctgatctgtttatttcctcctccttgacgtctccatataaatgttacacgggcatccccacactcggatacgcacccacagtggctgattcgggggtaaccgtgtcatttgcttgcaacactggcacctctgccctgcaccccgggagtgagcagtgagtgaggctcgggtctgggcgctggctccgaatcttcgggctgggagagactccaccatctgggggcggcctgggggagcagccttagtgtcttcctgctgatgcaatccgctaggtcgcgagtctccgccgcgagagggccggtctgcaatccagcccgccacgtgtactcgccgccgcctcgggcactgccccaggtcttgctgcagccgggaccgcgctctgcagccgcagacccggtccacacggccaggggctacgacccttgggatctgccctccgctcagctcgagcttccctcgtggccgacggaacaatgaaggattgcagtaacggatgctccgcagagtgtaccggagaaggaggatcaaaagaggtggtggggacttttaaggctaaagacctaatagtcacaccagctaccattttaaaggaaaaaccagaccccaataatctggtttttggaactgtgttcacggatcatatgctgacggtggagtggtcctcagagtttggatgggagaaacctcatatcaagcctcttcagaacctgtcattgcaccctggctcatcagctttgcactatgcagtggaattatttgaaggattgaaggcatttcgaggagtagataataaaattcgactgtttcagccaaacctcaacatggatagaatgtatcgctctgctgtgagggcaactctgccggtatttgacaaagaagagctcttagagtgtattcaacagcttgtgaaattggatcaagaatgggtcccatattcaacatctgctagtctgtatattcgtcctacattcattggaactgagccttctcttggagtcaagaagcctaccaaagccctgctctttgtactcttgagcccagtgggaccttatttttcaagtggaacctttaatccagtgtccctgtgggccaatcccaagtatgtaagagcctggaaaggtggaactggggactgcaagatgggagggaattacggctcatctctttttgcccaatgtgaagcagtagataatgggtgtcagcaggtcctgtggctctatggagaggaccatcagatcactgaagtgggaactatgaatctttttctttactggataaatgaagatggagaagaagaactggcaactcctccactagatggcatcattcttccaggagtgacaaggcggtgcattctggacctggcacatcagtggggtgaatttaaggtgtcagagagatacctcaccatggatgacttgacaacagccctggaggggaacagagtgagagagatgtttggctctggtacagcctgtgttgtttgcccagtttctgatatactgtacaaaggcgagacaatacacattccaactatggagaatggtcctaagctggcaagccgcatcttgagcaaattaactgatatccagtatggaagagaagagagcgactggacaattgtgctatcctgaatggaaaatagaggatacaatggaaaatagaggataccaactgtatgctactgggacagactgttgcatttgaattgtgatagatttctttggctacctgtgcataatgtagtttgtagtatcaatgtgttacaagagtgattgtttcttcatgccagagaaaatgaattgcaatcatcaaatggtgtttcataacttggtagtagtaacttaccttaccttacctagaaaaacattaatgtaagccatataacatgggattttcctcaatgattttagtgcctccttttgtacttcactcagatactaaatagtagtttattctttaatataagttacattctgctcctcaaacaaatgcaattttttgtgtgtgtttgaaagctaatttgagaaaatttcataggttacatttcctgcagcctatctttatccacagaaagtgttttcttttttttaaatcaagacttttaaaactggatttcctcccatcactgttttttgaaggtcctccaagtccgtgttaaggtaaatatctgttttcttcctgatgtcacagcctgagcatactctgtgcattaggaagacctgagtgcatttcccaccattgtcctttccacattatgttgtagctggctggctgtcaggcgactacaagactgagggtcttgtgccttatagatctttgtatcccccatggctgacatatagtaggtactcagtaaatggttttataatgaatcagtgaacattttgcttctatagaagtgtaccttctttgtttctatattatgaaacctctttattagaatttgtgattgattctgacagtgtatagatttaccttatattgtctttattttccatgagctactaagtcattagagatactctgaagcatagttagtttaggaaatcacttcatattgattgtattagaattatcttggaattgaagatatatccctagagcaggggaccccaacccccaggccatgggccacacagcaggaagaggtgagtggtgggccattgaggagcttcatctgtatttatggctacttcccatcactcgaattaccacctgaactccacctcttgtcagctcagtggcagcattagattctcataggagcacaaatcctattgtgaactctgcatgcaagggatctaggctatgcgctccttatgagaatctaatgcttgatgacctgaggtgtaacagtttcatcctgaaaccacccttcaccctgcagtctgtggaaaaattgtcttccacaaaactggtccctggtgccaaaaatgttggggaccactgctctagagagaggtcatgatatcataccaaccaaatggaaatgacaaatgttttatgtcaagtgttaattgcagaaataaatcttttttttttttttttggtagaaaacaaagaggcatactctgatttttatactctgtttttgcaggtgctcttttctttgaatggagatttgatgagcaagtggttaggatgcagggagagctactatgggtgatattttccttgtttaggagctgtgagttaaaattgtatcctttgtggtttatctaaggaaagtcaaatcttgacagaaaacatttttccttggaaggtcaactctcagacattgtattttggtttccctcagtcctcataacttccttcttgctgaacatattttattctcttttcagagaaggaaaataaaaaggattctaaaagtttgatgcattggaaaaatttccttgaggcatttagcaacacatagaaaatgggctttgattcttttccaaaacttttagccatagggtcttttatagacagggatagtaaaatgaaaattgagaaatataagatgaaaaggaatgataaaaatatcttttagggggcttttaattggtgatctgaaatcttgggagaagctgttcttttcaggcctgaggtgctcttgactgtcgcctgcgcactgtgtaccccgagcaacattctaagggtgtgctttcgccttggctaactcctttgacctcattcttcatatagtagtctaggaaaaagttgcaggtaatttaaactgtctagtggtacatagtaactaaatttctattcctatgagaaatgagaattatttatttgccatcaacacattttatactttgcatctccaaatttattgtggcgagacttgtccattgtgaaagttagagaacattatgtttgtatcatttctttcataaaacctcaagagcatttttaagcccttttcatcagacccagtgaaaactaaggatagatgtttaaaaactggaggtctcctgataaggagaacacaatccaccattgtcatttaagtaataagacaggaaattgaccttgacgctttcttgttaaatagatttaacaggaacatctgcacatcttttttccttgtgcactatttgtttaattgcagtggattaatacagcaagagtgccacattataactaggcaattatccattcttcaagacttagttattgtcacactaattgatcgtttaaggcataagatggtctagcattaggaacatgtgaagctaatctgctcaaaaagatcaacaaattaatattgttgctgatatttgcataattggctgcaattatttaatgtttaattgggttgatcaaatgagattcagcaattcacaagtgcattaatataaacagaactggtggcacttaaaatgataatgattaacttatattgcatgttctcttcctttcacttttttcagtttctacatttcagaccgagcttgtcagcttttttgaaaacacatcagtagaaaccaagattttaaaatgaagtgtcaagacaaaggcaaaacctgagcagttcctaaaaagatttgctgttagaaattttctttgtggcagtcatttattaaggattcaactcgtgatacaccaaaagaagagttgacttcagagatgtgttccatgctctctagcacaggaatgaataaatttataacacctgctttagcctttgttttcaaaagcacaaaggaaaagtgaaagggaaagagaaacaagtgactgagaagtcttgttaaggaatcaggttttttctacctggtaaacattctctattcttttctcaaaagattgctgtaagaaaaaatgtaagacaaaaaaaaaaaaaaaaaacaaacagaggcagaggcaggcagtagcaagaaagcagagcgtaacatcagctagatggtaacatgcaatgtcagctctcttgaagacatgggaaacctaagttacaccttgggttaaaattcttcaccatattagttttgttgcttcataaaatttacctaagcaagtggtcttgcttgcctcaaatccaagcagtcttgaacacttggaggcaattaatgagtatatcttagtcaaaagaattgttggagctttttattaaagctacagtttcagttctgcttttggggaattgtgctatgaaagcagctgccaaaataagctcatttattttcttcaatcccactcagtgctcagtcactatattctgtttcctttttttttttcaagttgcatatttggtttccccttatgattgggaaagatgaattttcagcagaaaacattgtttgttcactttcaaagagtgatagtttctaaaacatttagagcaataaatattcatcagaggtaccaagtaagccggcagaagagttaagggttagagaaatcccttatttcatgtcttgactctaaaattatcaaagtacttttccttgtaatgtggatttcttcttatgcggatatgcaaaaacttcagttatacgtagtaatgctagcaggtaattttagtagacattttataacaactgtcactttgtttcgccacatgtagagtttgttcagctattttccagatatctccccacaaaaggaggcaaagggtaccagcttttcaatgagcattacctattacttggcaaagatgatgaagactctattaatagttcatttgataaatgttgacataaccaacaatagagattaggaagttagttttaagaaatcaatggcatatagacattaccctcatggagtttgtattctactacttgaactgattgtagctataaaagcatagttagatagctgaatagttagatcataagcaaagaaggccagaacacatctcttatcaagaaatcaatgaatagtttatctcatttttaaagcaactttatccttctttaattccttcctttcttctagtgcaaaactacttaataaggttggtgtttaggttagtgttcacaccattcctcatctggtgtgaattaccttctctttctttactatttactaccaacctagtacatgtgttgactgaattcttttcaaacaatgttgagttatcatggtgcacctaataaattaacaccacagattacagcatccttgctgattttctcagcaaagccagattagatggaaataaacaaagaaaatgatcctagagtgaatttttctagaaaatatctattatgaaccatgctgtttaaagtattagcttgaaggtgatggatccagctattcagaaaataactttcatataaccatgattttgcacagtatgaggtcttaaatgtgtggaaagagataaattttttatcattaccacaaaccccttttaaagattcaaaggtggaagaaagtgatttattttttctcttcagcatacatatataaaagacttgtcagatgtttaatttggggaggttgataatgaaacatatcaacagagtatagtagttatagtagtgtttgtgggtaaataatttcctggggtcagacatatataaacatatttgcttcaaaatgataaaggcatgaaatcagtcttaaaaattgaaatgggggtgatgggggagaaaaagaagaacaaatttgaagtgccctttcaaatctgctggatacaagtattgaagttttaagtcatcttattctgtctgaaagtgtatttttcattctacaatagacccaatcaacaagacgtataacttgagttgcatgatgttcagtttatgtaatctactgttgggatggtaagaattgatgtaggctgtggtgtaagaatgaattaaaatatagtttcactggcttttctctacatatccactatcacaatggctaggtttcctgttgctcactattggattctggagaaaaatttaatgaaagatgatatcagaggaagaataagtggaggtagagaagaaaggaatgatagaggaggggaaaaaaacaaaacatatttttgtgttatccaaaggagctttttccttattctgtcaagcattgagatcttcttcagctttcaatgtagttgctaaatacaaataatgctactaggtagtgactaaatatagcaaacacttcatcagatattagaattaggtcacactattgaggttataatctgaaggttgtgttacatagaaaccactttagattattatcaacttggactaggctttattttataatagcatagtaagtaatatctattgtgtcatttcttcaaccattttattctaagatccatgaagcttcttgaggccaaataaaataataagtttagacaagaagtagattgtgacttttttcccttagagatactatttactatctcctatcctgataggtggaaggtttactgaattggaaattggttgactattagtttttaactaaaatgtgcaataacacattgcagtttcctcaaactagtttcctatgatcattaaactcattctcagggttaagaaaggaatgtaaatttctgcctcaatttgtacttcatcaataagtttttgaagagtgcagatttttagtcaggtcttaaaaataaactcacaaatctggatgcatttctaaattctgcaaatgtttcctggggtgacttaacaaggaataatcccacaatatacctagctacctaatacatggagctggggctcaacccactgtttttaaggatttgcgcttacttgtggctgaggaaaaataagtagttcgaggaagtagtttttaaatgtgagcttatagatagaaacagaatatcaacttaattatgaaattgttagaacctgttctcttgtatctgaatctgattgcaattactattgtactgatagactccagccattgcaagtctcagatatcttagctgtgtagtgattcttgaaattctttttaagaaaaattgagtagaaagaaataaaccctttgtaaatgaggcttggcttttgtgaaagatcatccgcaggctatgttaaaaggattttagctcactaaaagtgtaataatggaaatgtggaaaatatcgtaggtaaaggaaactacctcatgctctgaaggttttgtagaagcacaattaaacatctaaaatggctttgttacaccagagccatctggtgtgaagaactctatatttgtatgttgagagggcatggaataattgtattttgctggcaatagacacattctttattatttgcagattcctcatcaaatctgtaattatgcacagtttctgttatcaataaaacaaaagaatcctgtt

SEQ ID NO: 156793 - DNA, 1161 bp, Artificial Sequence
  derived and/or modified sequence
atgaaggactgcagcaacggctgcagcgccgagtgcaccggcgagggcggcagcaaggaggtggtgggcaccttcaaggccaaggacctgatcgtgacccccgccaccatcctgaaggagaagcccgaccccaacaacctggtgttcggcaccgtgttcaccgaccacatgctgaccgtggagtggagcagcgagttcggctgggagaagccccacatcaagcccctgcagaacctgagcctgcaccccggcagcagcgccctgcactacgccgtggagctgttcgagggcctgaaggccttcagaggcgtggacaacaagatcagactgttccagcccaacctgaacatggacagaatgtacagaagcgccgtgagagccaccctgcccgtgttcgacaaggaggagctgctggagtgcatccagcagctggtgaagctggaccaggagtgggtgccctacagcaccagcgccagcctgtacatcagacccaccttcatcggcaccgagcccagcctgggcgtgaagaagcccaccaaggccctgctgttcgtgctgctgagccccgtgggcccctacttcagcagcggcaccttcaaccccgtgagcctgtgggccaaccccaagtacgtgagagcctggaagggcggcaccggcgactgcaagatgggcggcaactacggcagcagcctgttcgcccagtgcgaggccgtggacaacggctgccagcaggtgctgtggctgtacggcgaggaccaccagatcaccgaggtgggcaccatgaacctgttcctgtactggatcaacgaggacggcgaggaggagctggccaccccccccctggacggcatcatcctgcccggcgtgaccagaagatgcatcctggacctggcccaccagtggggcgagttcaaggtgagcgagagatacctgaccatggacgacctgaccaccgccctggagggcaacagagtgagagagatgttcggcagcggcaccgcctgcgtggtgtgccccgtgagcgacatcctgtacaagggcgagaccatccacatccccaccatggagaacggccccaagctggccagcagaatcctgagcaagctgaccgacatccagtacggcagagaggagagcgactggaccatcgtgctgagctag

SEQ ID NO: 156794 - protein, 509 aa, Artificial Sequence
  derived and/or modified sequence
MGCSAKARWAAGALGVAGLLCAVLGAVMIVMVPSLIKQQVLKNVRIDPSSLSFNMWKEIPIPFYLSVYFFDVMNPSEILKGEKPQVRERGPYVYREFRHKSNITFNNNDTVSFLEYRTFQFQPSKSHGSESDYIVMPNILVLGAAVMMENKPMTLKLIMTLAFTTLGERAFMNRTVGEIMWGYKDPLVNLINKYFPGMFPFKDKFGLFAELNNSDSGLFTVFTGVQNISRIHLVDKWNGLSKVDFWHSDQCNMINGTSGQMWPPFMTPESSLEFYSPEACRSMKLMYKESGVFEGIPTYRFVAPKTLFANGSIYPPNEGFCPCLESGIQNVSTCRFSAPLFLSHPHFLNADPVLAEAVTGLHPNQEAHSLFLDIHPVTGIPMNCSVKLQLSLYMKSVAGIGQTGKIEPVVLPLLWFAESGAMEGETLHTFYTQLVLMPKVMHYAQYVLLALGCVLLLVPVICQIRSQEKCYLFWSSSKKGSKDKEAIQAYSESLMTSAPKGSVLQEAKL

SEQ ID NO: 156795 - protein, 409 aa, Artificial Sequence
  derived and/or modified sequence
MGCSAKARWAAGALGVAGLLCAVLGAVMIVMVPSLIKQQVLKGAAVMMENKPMTLKLIMTLAFTTLGERAFMNRTVGEIMWGYKDPLVNLINKYFPGMFPFKDKFGLFAELNNSDSGLFTVFTGVQNISRIHLVDKWNGLSKVDFWHSDQCNMINGTSGQMWPPFMTPESSLEFYSPEACRSMKLMYKESGVFEGIPTYRFVAPKTLFANGSIYPPNEGFCPCLESGIQNVSTCRFSAPLFLSHPHFLNADPVLAEAVTGLHPNQEAHSLFLDIHPVTGIPMNCSVKLQLSLYMKSVAGIGQTGKIEPVVLPLLWFAESGAMEGETLHTFYTQLVLMPKVMHYAQYVLLALGCVLLLVPVICQIRSQEKCYLFWSSSKKGSKDKEAIQAYSESLMTSAPKGSVLQEAKL

SEQ ID NO: 156796 - protein, 552 aa, Artificial Sequence
  derived and/or modified sequence
MGCSAKARWAAGALGVAGLLCAVLGAVMIVMVPSLIKQQVLKNVRIDPSSLSFNMWKEIPIPFYLSVYFFDVMNPSEILKGEKPQVRERGPYVYREFRHKSNITFNNNDTVSFLEYRTFQFQPSKSHGSESDYIVMPNILVLGAAVMMENKPMTLKLIMTLAFTTLGERAFMNRTVGEIMWGYKDPLVNLINKYFPGMFPFKDKFGLFAELNNSDSGLFTVFTGVQNISRIHLVDKWNGLSKVDFWHSDQCNMINGTSGQMWPPFMTPESSLEFYSPEACRSMKLMYKESGVFEGIPTYRFVAPKTLFANGSIYPPNEGFCPCLESGIQNVSTCRFSAPLFLSHPHFLNADPVLAEAVTGLHPNQEAHSLFLDIHPVTGIPMNCSVKLQLSLYMKSVAGIGQTGKIEPVVLPLLWFAESGAMEGETLHTFYTQLVLMPKVMHYAQYVLLALGCVLLLVPVICQIRSQVGAGQRAARADSHSLACWGKGASDRTLWPTAAWSPPPAAVLRLCRSGSGHCWGLRSTLASFACRVATTLPVLEGLGPSLGGGTGS

SEQ ID NO: 156797 - protein, 516 aa, Artificial Sequence [sequence omitted]

SEQ ID NO: 156798 - protein, 512 aa, Artificial Sequence
  derived and/or modified sequence
MNVRIDPSSLSFNMWKEIPIPFYLSVYFFDVMNPSEILKGEKPQVRERGPYVYREFRHKSNITFNNNDTVSFLEYRTFQFQPSKSHGSESDYIVMPNILVLGAAVMMENKPMTLKLIMTLAFTTLGERAFMNRTVGEIMWGYKDPLVNLINKYFPGMFPFKDKFGLFAELNNSDSGLFTVFTGVQNISRIHLVDKWNGLSKVDFWHSDQCNMINGTSGQMWPPFMTPESSLEFYSPEACRSMKLMYKESGVFEGIPTYRFVAPKTLFANGSIYPPNEGFCPCLESGIQNVSTCRFSAPLFLSHPHFLNADPVLAEAVTGLHPNQEAHSLFLDIHPVTGIPMNCSVKLQLSLYMKSVAGIGQTGKIEPVVLPLLWFAESGAMEGETLHTFYTQLVLMPKVMHYAQYVLLALGCVLLLVPVICQIRSQVGAGQRAARADSHSLACWGKGASDRTLWPTAAWSPPPAAVLRLCRSGSGHCWGLRSTLASFACRVATTLPVLEGLGPSLGGGTGGL

SEQ ID NO: 156799 - protein, 146 aa, Artificial Sequence
  derived and/or modified sequence
MGCSAKARWAAGALGVAGLLCAVLGAVMIVMVPSLIKQQVLKNVRIDPSSLSFNMWKEIPIPFYLSVYFFDVMNPSEILKGEKPQVRERGPYVYREFRHKSNITFNNNDTVSFLEYRTFQFQPSKSHGSESDYIVMPNILVLVRLP

SEQ ID NO: 156800 - protein, 481 aa, Artificial Sequence
  derived and/or modified sequence
MGCSAKARWAAGALGVAGLLCAVLGAVMIVMVPSLIKQQVLKNVRIDPSSLSFNMWKEIPIPFYLSVYFFDVMNPSEILKGEKPQVRERGPYVYREFRHKSNITFNNNDTVSFLEYRTFQFQPSKSHGSESDYIVMPNILVLGAAVMMENKPMTLKLIMTLAFTTLGERAFMNRTVGEIMWGYKDPLVNLINKYFPGMFPFKDKFGLFAELNNSDSGLFTVFTGVQNISRIHLVDKWNGLSKVDFWHSDQCNMINGTSGQMWPPFMTPESSLEFYSPEACRSMKLMYKESGVFEGIPTYRFVAPKTLFANGSIYPPNEGFCPCLESGIQNVSTCRFSAPLFLSHPHFLNADPVLAEAVTGLHPNQEAHSLFLDIHPVTGIPMNCSVKLQLSLYMKSVAGIGQTGKIEPVVLPLLWFAESGAMEGETLHTFYTQLVLMPKEKCYLFWSSSKKGSKDKEAIQAYSESLMTSAPKGSVLQEAKL

SEQ ID NO: 156801 - DNA, 1530 bp, Artificial Sequence
  derived and/or modified sequence
atgggatgttccgccaaagcccggtgggcggccggcgccctcggagtggctggcttgctttgcgcggtgctgggcgctgttatgatcgtgatggtgccgtctcttataaaacagcaggtcttaaagaatgtgagaatcgatccatcctcgcttagcttcaatatgtggaaggaaattcccattcctttctacctttctgtgtatttctttgatgttatgaacccatcggaaatcttgaaaggtgaaaagccacaggttagggaaagaggcccctacgtgtaccgggaattcaggcacaagtcaaatatcaccttcaataacaacgataccgttagctttttggaataccgaacctttcagtttcaaccaagcaagtctcacggcagcgaaagcgactacatcgttatgccaaacattttggtgctgggggccgcagtaatgatggagaacaaaccgatgacactgaagttgatcatgacactcgcatttaccacgttgggggagcgcgctttcatgaaccgcactgtcggagaaatcatgtggggatataaagaccctctggtgaacctcatcaacaagtactttccgggaatgtttccattcaaggataagttcggattgttcgccgagcttaacaatagtgattccgggctcttcaccgtgtttaccggagttcagaacatttctagaatacatctggtggataaatggaatgggctatctaaagttgacttctggcactctgatcagtgtaatatgatcaatgggacctccggtcaaatgtggcccccctttatgacccccgaatcatcactggaattttacagtccagaggcatgcagatccatgaagctgatgtacaaggaatccggcgttttcgagggcatccctacctatagatttgtcgcccccaagaccctctttgccaatgggagcatttatccacccaacgaaggattctgcccgtgcctggaaagcgggatacagaacgtatctacctgccgcttttctgcaccactatttctaagtcatccccacttcctgaacgccgatccggtgttagctgaggccgtcacaggccttcatccaaaccaggaggctcattccttattcctggatatacacccagtcacaggcatacctatgaattgttccgtcaaactgcagctgagtctgtatatgaaaagtgtggcaggtatcggccagaccgggaagatcgaacccgtcgtgctgcctctgctctggtttgctgagagtggtgccatggagggagagaccctgcacaccttttatacgcaactagtgctgatgcctaaggtgatgcattatgctcagtacgtactgctcgctctcggttgcgtgcttctcctggtgccagtcatatgtcaaattagaagccaggaaaaatgctatctgttctggtcgtcatcaaagaagggttcgaaagacaaggaagccattcaggcatattctgaaagcctgatgaccagcgctcctaagggctcagttcttcaggaagctaagctgtag

SEQ ID NO: 156802 - DNA, 1230 bp, Artificial Sequence
  derived and/or modified sequence
atgggctgcagcgccaaagcacgctgggcagccggagccctcggcgtagctggcctgctgtgcgccgtgctgggagctgtaatgatcgtgatggtgccatcactgatcaagcagcaagtgctgaaaggggccgccgttatgatggagaacaaacccatgacactgaagctgatcatgacactggctttcaccaccctgggagaacgtgcctttatgaatcggactgtgggcgagattatgtggggttacaaggacccgttggtgaaccttattaacaaatattttcctggcatgttccccttcaaagacaaattcgggctgttcgctgagctgaacaattctgactcagggctgttcactgtcttcactggtgtccagaatatctctcggattcacttggttgacaagtggaacgggctgtctaaggtggacttttggcacagtgatcagtgcaacatgataaatggtacatccggacaaatgtggccacccttcatgacccctgagagttcgttggaattctacagccccgaggcatgcaggtccatgaagttgatgtataaagaatctggagtcttcgaaggcatccccacctatcgctttgtggccccaaaaacactgtttgctaacggctctatctacccccctaatgagggcttttgtccctgtcttgaatccggtatccagaatgtttcgacgtgcagattctcagcaccactgttcttgagccatccacactttcttaacgccgaccctgtcttggccgaagccgtgacaggcctgcaccctaatcaggaggctcactcgctgttcctggatatccacccagtgacaggcattcccatgaactgtagcgtcaaactacaactcagcctgtatatgaagagcgtggccgggataggacagaccgggaagatcgagccggtggttctcccacttctctggttcgcagaatcgggcgctatggaaggggaaacgctacacacattctacacccaactcgtccttatgcctaaggttatgcattacgcccagtatgtgcttctcgctcttgggtgtgtactcctgttggtgccagttatctgccagattcgatctcaagagaaatgttacctcttttggagctcctcaaagaaggggagtaaggacaaggaggctattcaggcctacagcgaatctctaatgaccagtgcccccaagggaagcgtgctacaggaggctaaattgtag

SEQ ID NO: 156803 - DNA, 1446 bp, Artificial Sequence
  derived and/or modified sequence
atgggatgtagcgcaaaggcccggtgggctgcaggagctctaggggtggcaggcctactgtgcgctgtgctgggcgccgtcatgattgtcatggtcccctctcttatcaagcaacaagttctgaagaacgtgcgcatagacccttccagtttgtcatttaatatgtggaaagaaatccctatcccattctacctatcggtttatttcttcgatgtgatgaacccctcggaaattctgaaaggcgagaagccacaggtgcgggaacgtggtccctatgtgtatagggaatttagacataagtcaaatattaccttcaataacaacgataccgtgtccttcctggaatatcgaactttccagttccagccctctaagagccacgggagcgaatccgactacatcgttatgcccaatattttagtgctcggcgccgcggttatgatggaaaataaacccatgactctgaagctaatcatgaccttggcttttacaactctgggcgagcgagccttcatgaatcggaccgtaggcgagataatgtggggatataaggatccgctggtgaatctgattaataaatattttccaggcatgtttccctttaaggacaagttcggcctctttgctgaactgaacaacagcgatagcggcctcttcacagtcttcaccggggtgcaaaacatttcaaggatacatctagtcgataagtggaacgggctgagtaaagtcgacttctggcactctgaccaatgcaatatgattaacggcacatccggacagatgtggcctccattcatgacccccgaaagtagccttgagttctattcacccgaagcctgtagaagcatgaagttgatgtacaaggaaagtggagtgtttgagggtatccccacataccggtttgtggcacccaaaactctgttcgccaatggcagcatttacccgcccaatgaaggattttgcccttgcctggagagtggcatccagaatgtgtctacctgtagattcagtgcgcccctgtttctgagccatcctcacttcctcaacgccgaccccgtgctcgcagaggccgtgacaggcctgcacccaaatcaggaagcccatagcctgtttttggacattcaccctgttactggcattccaatgaactgttccgttaagctgcagctgtctttatatatgaaaagtgttgctggaatcggccagactggcaagatagagcccgttgtgctgcccttactttggtttgccgagagcggagcaatggagggagaaaccctgcacactttctatacccagttggttttaatgcctaaagagaaatgttatctgttttggagcagcagcaaaaaaggctccaaagataaggaggctatacaggcctactccgaaagcttgatgaccagcgctccaaaggggtccgtgctgcaggaggccaagctgtag

SEQ ID NO: 156804 - DNA, 1530 bp, Artificial Sequence
  derived and/or modified sequence
atgggctgcagcgccaaggcccgctgggccgccggggccctgggcgtggccggcctgctgtgtgctgtgctgggcgctgtgatgattgtgatggtgcccagcctcatcaagcagcaggtgctgaagaatgtgagaattgaccccagcagcctgtccttcaacatgtggaaggagatccccatccccttctacctgtctgtgtacttctttgatgtgatgaaccccagcgagatcctgaagggggagaagccccaggtgcgggagcggggcccctacgtgtaccgggagttccgccacaagagcaacatcaccttcaacaacaatgacacagtgtccttcctggagtaccgcaccttccagttccagcccagcaagagccacggcagcgagagtgactacatcgtgatgcccaacatcctggtgctgggcgctgctgtgatgatggagaacaagcccatgaccctgaagctgatcatgaccctggccttcaccaccctgggggagcgggccttcatgaacagaacagtgggggagatcatgtggggctacaaggaccccctggtgaacctgatcaacaagtacttccctggcatgttccccttcaaggacaagtttggcctgtttgctgagctgaacaacagcgacagcggcctcttcaccgtcttcaccggggtgcagaacatcagccgcatccacctggtggacaagtggaatggcctgagcaaggtggacttctggcacagcgaccagtgcaacatgatcaatggcaccagcggccagatgtggccacccttcatgaccccagagagcagcctggagttctacagccctgaggcctgccgctccatgaagctgatgtacaaggagagcggcgtgtttgagggcatccccacctacagatttgtggcccccaagaccctgtttgccaacggcagcatctaccccccaaatgaaggcttctgcccctgcctggagagcggcatccagaatgtgtccacctgccgcttcagcgcccccctcttcctgagccacccccacttcctgaatgctgaccctgtgctggccgaggccgtgacaggcctgcaccccaaccaggaggcccacagcctcttcctggacatccaccctgtgacaggcatccccatgaactgcagcgtgaagctgcagctgagcctgtacatgaagtctgtggccggcatcggccagacaggcaagattgagcctgtggtgctgcccctgctgtggtttgctgagagcggggccatggagggggagaccctgcacaccttctacacccagctggtgctgatgcccaaggtgatgcactacgcccagtatgtgctgctggccctgggctgtgtgctgctgctggtgcctgtgatctgccagatccgcagccaggagaagtgctacctgttctggagcagcagcaagaagggcagcaaggacaaggaggccatccaggcctacagcgagagcctgatgaccagcgcccccaagggctctgtgctgcaggaggccaagctgtag

SEQ ID NO: 156805 - DNA, 1230 bp, Artificial Sequence
  derived and/or modified sequence
atgggctgcagcgccaaggcccgctgggccgccggggccctgggcgtggccggcctgctgtgtgctgtgctgggcgctgtgatgattgtgatggtgcccagcctcatcaagcagcaggtgctgaagggagctgctgtgatgatggagaacaagcccatgaccctgaagctgatcatgaccctggccttcaccaccctgggggagcgggccttcatgaacagaacagtgggggagatcatgtggggctacaaggaccccctggtgaacctgatcaacaagtacttccctggcatgttccccttcaaggacaagtttggcctgtttgctgagctgaacaacagcgacagcggcctcttcaccgtcttcaccggggtgcagaacatcagccgcatccacctggtggacaagtggaatggcctgagcaaggtggacttctggcacagcgaccagtgcaacatgatcaatggcaccagcggccagatgtggccacccttcatgaccccagagagcagcctggagttctacagccctgaggcctgccgctccatgaagctgatgtacaaggagagcggcgtgtttgagggcatccccacctacagatttgtggcccccaagaccctgtttgccaacggcagcatctaccccccaaatgaaggcttctgcccctgcctggagagcggcatccagaatgtgtccacctgccgcttcagcgcccccctcttcctgagccacccccacttcctgaatgctgaccctgtgctggccgaggccgtgacaggcctgcaccccaaccaggaggcccacagcctcttcctggacatccaccctgtgacaggcatccccatgaactgcagcgtgaagctgcagctgagcctgtacatgaagtctgtggccggcatcggccagacaggcaagattgagcctgtggtgctgcccctgctgtggtttgctgagagcggggccatggagggggagaccctgcacaccttctacacccagctggtgctgatgcccaaggtgatgcactacgcccagtatgtgctgctggccctgggctgtgtgctgctgctggtgcctgtgatctgccagatccgcagccaggagaagtgctacctgttctggagcagcagcaagaagggcagcaaggacaaggaggccatccaggcctacagcgagagcctgatgaccagcgcccccaagggctctgtgctgcaggaggccaagctgtag

SEQ ID NO: 156806 - DNA, 1446 bp, Artificial Sequence
  derived and/or modified sequence
atgggctgcagcgccaaggcccgctgggccgccggggccctgggcgtggccggcctgctgtgtgctgtgctgggcgctgtgatgattgtgatggtgcccagcctcatcaagcagcaggtgctgaagaatgtgagaattgaccccagcagcctgtccttcaacatgtggaaggagatccccatccccttctacctgtctgtgtacttctttgatgtgatgaaccccagcgagatcctgaagggggagaagccccaggtgcgggagcggggcccctacgtgtaccgggagttccgccacaagagcaacatcaccttcaacaacaatgacacagtgtccttcctggagtaccgcaccttccagttccagcccagcaagagccacggcagcgagagtgactacatcgtgatgcccaacatcctggtgctgggcgctgctgtgatgatggagaacaagcccatgaccctgaagctgatcatgaccctggccttcaccaccctgggggagcgggccttcatgaacagaacagtgggggagatcatgtggggctacaaggaccccctggtgaacctgatcaacaagtacttccctggcatgttccccttcaaggacaagtttggcctgtttgctgagctgaacaacagcgacagcggcctcttcaccgtcttcaccggggtgcagaacatcagccgcatccacctggtggacaagtggaatggcctgagcaaggtggacttctggcacagcgaccagtgcaacatgatcaatggcaccagcggccagatgtggccacccttcatgaccccagagagcagcctggagttctacagccctgaggcctgccgctccatgaagctgatgtacaaggagagcggcgtgtttgagggcatccccacctacagatttgtggcccccaagaccctgtttgccaacggcagcatctaccccccaaatgaaggcttctgcccctgcctggagagcggcatccagaatgtgtccacctgccgcttcagcgcccccctcttcctgagccacccccacttcctgaatgctgaccctgtgctggccgaggccgtgacaggcctgcaccccaaccaggaggcccacagcctcttcctggacatccaccctgtgacaggcatccccatgaactgcagcgtgaagctgcagctgagcctgtacatgaagtctgtggccggcatcggccagacaggcaagattgagcctgtggtgctgcccctgctgtggtttgctgagagcggggccatggagggggagaccctgcacaccttctacacccagctggtgctgatgcccaaggagaagtgctacctgttctggagcagcagcaagaagggcagcaaggacaaggaggccatccaggcctacagcgagagcctgatgaccagcgcccccaagggctctgtgctgcaggaggccaagctgtag

SEQ ID NO: 156807 - DNA, 1530 bp, Artificial Sequence
  derived and/or modified sequence
atgggctgcagcgccaaggcccggtgggccgccggcgccctgggcgtggcaggtttgctctgtgctgtgctgggggctgtgatgatagttatggtcccctccctcattaagcagcaggtcctgaaaaacgtgcgaatcgacccttcgtctctgtccttcaacatgtggaaagaaatccccattccattttacctgtcagtttacttttttgacgtgatgaatccctctgagatcctgaaaggcgaaaagccacaggtgcgagagcgcgggccgtacgtttacagagagtttcgtcataagtctaatattacatttaacaacaacgatactgtctcctttttggaatatcgaaccttccagttccaaccatctaagtcgcatggttcggagtcagactacattgtgatgcccaatattctggtcctcggcgccgccgttatgatggagaataagcccatgacgctgaaattaatcatgaccctcgccttcaccacgcttggcgagagggcctttatgaatagaaccgtgggtgaaatcatgtggggttacaaggatcccctggtcaacctgatcaacaagtacttccccggtatgtttcccttcaaagataaattcggcctgtttgccgagctaaacaacagtgacagtggtttatttaccgtgttcaccggcgtgcaaaacatctcccggatccatttggtggataagtggaacgggctgagcaaggtcgatttttggcatagcgaccagtgcaatatgattaatggtacgagtggccagatgtggccaccatttatgacgccagagtctagtcttgaattctactctcccgaggcatgtagatcaatgaagctgatgtacaaggagagtggcgttttcgaaggcattccaacttaccggtttgtggcgccaaagacactgttcgccaacggctccatttatcctcccaacgaaggcttctgtccctgtctggagtctggaatccagaacgtgagcacttgtcgattttcagcaccactgtttctcagccatcctcactttcttaatgccgaccccgtcctcgccgaggcggttacgggcttgcatcctaaccaggaagcccattcactgttcctggatattcaccctgtaaccggtattcctatgaattgctctgttaaattgcaattgtctctttatatgaagtcagtagcaggtatcggacaaacaggcaagatcgagccggtggtccttcccctgctctggtttgctgagagtggtgccatggagggagagactctgcacacattctacacccagcttgtcctcatgcctaaggtgatgcattacgcccaatatgtcctgctcgcgctggggtgcgtgctgctcctggtgccagtcatttgtcagatcaggtcccaggagaaatgttatcttttttggagcagctctaaaaaggggtctaaggacaaagaggccattcaggcatactcagagtctctgatgacaagcgcgcccaaagggagcgtcctgcaagaggcaaaactgtag

SEQ ID NO: 156808 - DNA, 1230 bp, Artificial Sequence
  derived and/or modified sequence
atgggctgcagcgccaaggcccggtgggccgccggcgccctgggcgtggctgggctgctctgcgccgttttgggcgctgtgatgatcgtgatggtcccctctctgatcaagcagcaggtactgaagggagccgccgtcatgatggagaacaagcccatgacattaaagctaataatgactctcgccttcaccacacttggtgagagagccttcatgaacaggacggtgggagaaatcatgtggggttacaaagaccccttggtcaacttgatcaataaatattttccagggatgtttccttttaaagacaagttcggactcttcgctgagctcaataattcggattccggcttatttacagtgtttacaggcgttcagaacatttcccggatccatctggtggataagtggaatgggctgagtaaggtggacttctggcactctgaccagtgcaacatgattaatggaacgagcgggcagatgtggccaccattcatgacccctgagagcagccttgaattctacagtccagaggcctgccggtctatgaagctgatgtacaaggaatctggcgtatttgagggaattcccacttacaggtttgtcgcacccaaaaccttgtttgcaaacggttctatttacccccctaatgagggtttttgcccctgtcttgagtccggtattcagaacgtgtccacatgtcggttcagcgctccgcttttcttatcacacccccacttcctgaatgccgacccagttctggccgaggccgtgaccggcctgcatcccaaccaagaagcgcatagcctgtttcttgacatccaccctgtaacagggatccctatgaattgctcagtgaaactgcagctcagcctctatatgaagagtgttgctgggattggccagaccggaaaaattgagcctgttgtgctccccttattatggttcgcagagtccggcgccatggaaggcgaaactctgcataccttttatacccaattggtcttgatgcccaaagtcatgcattatgcgcaatatgttttgctggcacttggctgtgttctactgttggtgccagtaatctgtcagattcgctcacaggaaaaatgctatctcttctggagttcctcaaagaagggatctaaggataaagaagctatccaggcgtattccgaatccttgatgacatccgcaccaaagggatcagtgctgcaggaagccaagttatag

SEQ ID NO: 156809 - DNA, 1446 bp, Artificial Sequence
  derived and/or modified sequence
atgggctgcagcgccaaggcccggtgggccgccggcgccctgggcgtggcaggacttctttgtgctgtgctaggcgccgtcatgatagtcatggtcccatctctaataaagcaacaggtgcttaagaacgtgagaattgacccaagctctctgtctttcaatatgtggaaagaaatccctatacccttttacctctctgtttacttcttcgacgtaatgaacccctccgaaatcctcaagggtgagaaacctcaggtacgagaaagaggtccttacgtgtatcgcgaattcaggcataagtctaacatcacatttaacaataacgatacagtgtctttcctggagtatcgaacttttcagttccaacctagtaagtcccacggaagcgaaagtgactacatcgtgatgcccaacatcctcgttcttggagccgcagttatgatggagaacaagccgatgaccttaaaactcatcatgactttagcatttacaaccttaggggagagggcttttatgaatagaacagtgggggagatcatgtggggatataaggatcctttagtcaacctgatcaacaagtactttccgggtatgttccctttcaaagataagttcggactcttcgctgagctcaataattctgattcaggtctctttacagttttcactggcgtccagaacattagtcggatccatcttgttgataaatggaatggcctgagtaaggtcgacttctggcactcggaccagtgtaacatgatcaacggcacctctggccagatgtggccaccctttatgactcccgaatccagtttggagttctacagccccgaggcttgtcgtagtatgaagcttatgtataaggagagtggagtttttgagggaatacctacctataggttcgtggcgcctaagacattgttcgctaatgggtccatttatccacctaatgaggggttctgcccctgtctggagtcaggaattcagaacgtctcaacctgccggttctcagcacctttattcctaagtcatccccatttcctcaacgctgatcccgttctggctgaagccgtcactggcctacaccccaatcaagaggctcacagtctcttcctggatatacatcctgtgacgggcatacccatgaattgctccgtaaagctccaactgtcactttatatgaagtcggtggcaggcatcgggcagacaggcaaaattgaaccggttgtgttacctctgttatggtttgccgagtctggtgccatggaaggcgaaaccctgcacactttctacacgcagttggtgttgatgccaaaagagaagtgttacctgttttggtccagttccaagaagggcagtaaagacaaggaagccattcaagcgtattcagaatctctaatgacctccgcccccaagggatccgtgctccaggaagccaaactgtag

SEQ ID NO: 156810 - DNA, 1530 bp, Artificial Sequence
  derived and/or modified sequence
atgggctgttccgccaaagccagatgggcagccggagctctcggcgtggccggactcctctgtgctgtgctgggcgcagttatgatcgtaatggtcccgtccctgattaagcaacaagttctgaaaaacgttcgcatcgacccatctagcctaagctttaatatgtggaaagagattccaatccccttttacttgagcgtgtattttttcgacgttatgaatccctccgaaattctaaagggcgaaaaacctcaagtgagggaaagggggccttatgtgtaccgcgaatttcggcacaaatctaacattacgtttaacaacaatgacacagtgtcgttcttggagtatcggacttttcagtttcagcctagcaaatctcatggctccgagtcagactacatcgtcatgccgaacatacttgtgctgggggcagcagtaatgatggagaataaacctatgactctcaagctgatcatgaccctggcttttactactctaggagagagagccttcatgaacagaactgtcggtgaaatcatgtggggctataaggacccccttgtgaacctgataaataaatatttccccggaatgtttccgtttaaggataaatttggcctgttcgctgaactcaacaactcagattctggtctgtttactgtgtttacaggggtgcaaaatatttctcgcatccatttggtcgacaaatggaatggtctgagtaaggtcgacttctggcattccgatcagtgtaatatgatcaatggcaccagcggtcagatgtggcccccttttatgacacccgagagtagcctggagttttactcacctgaggcctgcaggtcgatgaagctcatgtataaggagtctggagtctttgagggcatccctacctatcgcttcgtggcgccaaagactctattcgccaatgggagcatctacccccctaacgaaggcttctgcccttgcctggagagtgggattcagaatgtcagtacatgccgctttagcgctccactgttcttatcacacccccacttcctgaatgccgaccctgtgctcgccgaagcagtgacgggactgcacccgaaccaagaggctcatagtctgttcttggacatccaccctgtgacaggcatccccatgaattgttcggtgaagctgcaattgtccctgtacatgaaaagtgtggcaggtatcggacaaaccggaaagatcgaaccagtggtgttacctctgctatggtttgcagaatctggcgctatggagggagagacattgcacacattctacacacagctagttcttatgccaaaggtcatgcattacgcacagtatgttctcctggccctgggctgcgtccttctactcgtacctgtgatatgccaaatacgttcacaagagaagtgttatcttttctggagctctagcaaaaaaggctctaaagataaggaggccattcaagcatattctgaaagtttaatgacttctgccccaaaggggagcgtgctgcaggaagctaagttatag

SEQ ID NO: 156811 - DNA, 1230 bp, Artificial Sequence
  derived and/or modified sequence
atggggtgctcagccaaggccaggtgggccgcaggggctctgggcgttgctgggctgctttgcgcagtcctgggagctgtcatgatcgttatggttcccagcctgatcaagcagcaggtactgaaaggcgcagctgtgatgatggaaaacaaacccatgacccttaagctcatcatgaccctggctttcacaaccctgggagagcgcgcattcatgaaccggactgtgggggagattatgtggggctacaaggatccgctggtgaatctcataaataaatacttcccgggaatgtttccgttcaaagataagttcgggctgtttgctgagctcaacaacagcgacagcggcctctttacagtttttaccggtgtgcagaatatctccagaattcacttagtggataagtggaacggactttcaaaggtggacttctggcacagtgaccagtgtaacatgatcaacggcacatccggtcagatgtggcccccattcatgactcctgaaagctccctggagttctacagccccgaagcatgcagaagtatgaagttgatgtataaggaaagcggggtattcgagggaatccctacctaccgtttcgttgcgcctaaaacgcttttcgccaatgggagcatttatccccctaacgaaggcttctgcccttgtctagaaagcgggattcagaacgtttctacttgtcgattcagtgcccctttatttttgtcccacccacactttttgaacgctgaccctgtgctggccgaggctgtgaccggcttgcatccaaaccaggaggctcattccctcttcctggatattcaccctgtcaccggtatcccaatgaattgctctgtgaaattacaattgtccctctatatgaagtccgtcgccggaatcgggcagactggaaaaattgagccagtggtgctgcctttgctctggttcgccgagtctggggctatggagggagagactctgcacaccttctacacgcagttggtcctgatgcccaaggtgatgcactatgctcagtatgtgctcttggccctgggatgcgttttgctcctcgttcctgtcatttgccagatcaggagccaggagaagtgttacctgttctggtcaagcagcaagaagggaagcaaagataaagaagccattcaagcgtatagcgaatccctcatgacctcagccccaaaggggagtgtgctgcaggaagccaaactgtag

SEQ ID NO: 156812 - DNA, 1446 bp, Artificial Sequence
  derived and/or modified sequence
atggggtgttctgccaaggctaggtgggcagccggagctttgggagtggctggcttgttgtgcgccgtgctgggcgctgttatgatagtcatggtaccctctttgatcaaacagcaggttcttaagaacgttcgcattgatccctcttccctgtcattcaatatgtggaaggagatccccataccgttctatctgtctgtgtatttctttgatgttatgaacccgtctgaaattctgaaaggtgaaaagccccaggtgcgagagaggggaccctatgtttacagagaatttcggcacaaatctaacataacctttaataacaacgacaccgtgtcctttctcgagtacagaacatttcagttccagccatccaaaagccacggctccgaaagcgattacatagtaatgccaaatattctcgtgctgggggcagccgtgatgatggagaataagcccatgactttgaagttaatcatgaccctcgcctttacaaccctgggcgaacgagcattcatgaacagaaccgtgggggaaatcatgtggggctataaggacccattggttaacctaattaataagtatttccccggtatgtttccatttaaggataagttcggtctttttgctgaactgaacaactcagactcaggactgttcacagtcttcactggtgtgcaaaatatttcccgcattcacctggtggataaatggaacggcctgagcaaggtagatttctggcattccgatcagtgcaacatgatcaacggaactagcggccagatgtggccccctttcatgacgccggaaagttctctggagttctatagccctgaagcctgcaggtctatgaaattaatgtacaaagaatctggcgtgttcgagggaatccccacctatcgattcgtcgcacccaagaccctcttcgccaatggaagtatctaccctcctaatgaggggttttgtccctgcctggagtcagggattcagaatgttagtacctgtcgtttctctgctcctctgtttctgtcccatcctcacttcttgaacgcagacccagtgctggcggaagccgtgacaggtctgcatccaaaccaagaggctcattccctgttcttagacatccacccagtgacaggaatccccatgaattgtagcgtaaagctgcagttgtcactatatatgaagagcgtcgcaggcataggccagaccgggaaaattgaacctgtcgttttacctcttctgtggtttgccgagagcggggctatggaaggtgaaacgctccacactttttacacacagttggttcttatgccgaaggagaagtgttatctgttttggtcctcaagcaaaaaggggtctaaggacaaggaagctatccaggcctactctgagtcactcatgacatctgctcctaaaggctccgtcctgcaggaagcaaaattgtag

SEQ ID NO: 156813 - DNA, 2611 bp, Artificial Sequence
  derived and/or modified sequence
cccggatccaccgtgcctctgcggcctgcgtgcccggagtccccgcctgtgtcgtctctgtcgccgtccccgtctcctgccaggcgcggagccctgcgagccgcgggtgggccccaggcgcgcagacatgggctgctccgccaaagcgcgctgggctgccggggcgctgggcgtcgcggggctactgtgcgctgtgctgggcgctgtcatgatcgtgatggtgccgtcgctcatcaagcagcaggtccttaagaacgtgcgcatcgaccccagtagcctgtccttcaacatgtggaaggagatccctatccccttctatctctccgtctacttctttgacgtcatgaaccccagcgagatcctgaagggcgagaagccgcaggtgcgggagcgcgggccctacgtgtacagggagttcaggcacaaaagcaacatcaccttcaacaacaacgacaccgtgtccttcctcgagtaccgcaccttccagttccagccctccaagtcccacggctcggagagcgactacatcgtcatgcccaacatcctggtcttgggtgcggcggtgatgatggagaataagcccatgaccctgaagctcatcatgaccttggcattcaccaccctcggcgaacgtgccttcatgaaccgcactgtgggtgagatcatgtggggctacaaggacccccttgtgaatctcatcaacaagtactttccaggcatgttccccttcaaggacaagttcggattatttgctgagctcaacaactccgactctgggctcttcacggtgttcacgggggtccagaacatcagcaggatccacctcgtggacaagtggaacgggctgagcaaggttgacttctggcattccgatcagtgcaacatgatcaatggaacttctgggcaaatgtggccgcccttcatgactcctgagtcctcgctggagttctacagcccggaggcctgccgatccatgaagctaatgtacaaggagtcaggggtgtttgaaggcatccccacctatcgcttcgtggctcccaaaaccctgtttgccaacgggtccatctacccacccaacgaaggcttctgcccgtgcctggagtctggaattcagaacgtcagcacctgcaggttcagtgcccccttgtttctctcccatcctcacttcctcaacgctgacccggttctggcagaagcggtgactggcctgcaccctaaccaggaggcacactccttgttcctggacatccacccggtcacgggaatccccatgaactgctctgtgaaactgcagctgagcctctacatgaaatctgtcgcaggcattggacaaactgggaagattgagcctgtggtcctgccgctgctctggtttgcagagagcggggccatggagggggagactcttcacacattctacactcagctggtgttgatgcccaaggtgatgcactatgcccagtacgtcctcctggcgctgggctgcgtcctgctgctggtccctgtcatctgccaaatccggagccaagagaaatgctatttattttggagtagtagtaaaaagggctcaaaggataaggaggccattcaggcctattctgaatccctgatgacatcagctcccaagggctctgtgctgcaggaagcaaaactgtagggtcctgaggacaccgtgagccagccaggcctggccgctgggcctgaccggccccccagcccctacaccccgcttctcccggactctcccagcggacagccccccagccccacagcctgagcctcccagctgccatgtgcctgttgcacacctgcacacacgccctggcacacatacacacatgcgtgcaggcttgtgcagacactcagggatggagctgctgctgaagggacttgtagggagaggctcgtcaacaagcactgttctggaaccttctctccacgtggcccacaggcctgaccacaggggctgtgggtcctgcgtccccttcctcgggtgagcctggcctgtcccgttcagccgttgggcccaggcttcctcccctccaaggtgaaacactgcagtcccggtgtggtggctccccatgcaggacgggccaggctgggagtgccgccttcctgtgccaaattcagtggggactcagtgcccaggccctggccacgagctttggccttggtctacctgccaggccaggcaaagcgcctttacacaggcctcggaaaacaatggagtgagcacaagatgccctgtgcagctgcccgagggtctccgcccaccccggccggactttgatccccccgaagtcttcacaggcactgcatcgggttgtctggcgcccttttcctccagcctaaactgacatcatcctatggactgagccggccactctctggccgaagtggccgcaggctgtgcccccgagctgcccccaccccctcacagggtccctcagattataggtgcccaggctgaggtgaagaggcctgggggccctgccttccgggcgctcctggaccctggggcaaacctgtgacccttttctactggaatagaaatgagttttatcatctttgaaaaataattcactcttgaagtaataaacgtttaaaaaaa

SEQ ID NO: 156814 - DNA, 2304 bp, Artificial Sequence
  derived and/or modified sequence
cccggatccaccgtgcctctgcggcctgcgtgcccggagtccccgcctgtgtcgtctctgtcgccgtccccgtctcctgccaggcgcggagccctgcgagccgcgggtgggccccaggcgcgcagacatgggctgctccgccaaagcgcgctgggctgccggggcgctgggcgtcgcggggctactgtgcgctgtgctgggcgctgtcatgatcgtgatggtgccgtcgctcatcaagcagcaggtccttaagggtgcggcggtgatgatggagaataagcccatgaccctgaagctcatcatgaccttggcattcaccaccctcggcgaacgtgccttcatgaaccgcactgtgggtgagatcatgtggggctacaaggacccccttgtgaatctcatcaacaagtactttccaggcatgttccccttcaaggacaagttcggattatttgctgagctcaacaactccgactctgggctcttcacggtgttcacgggggtccagaacatcagcaggatccacctcgtggacaagtggaacgggctgagcaaggttgacttctggcattccgatcagtgcaacatgatcaatggaacttctgggcaaatgtggccgcccttcatgactcctgagtcctcgctggagttctacagcccggaggcctgccgatccatgaagctaatgtacaaggagtcaggggtgtttgaaggcatccccacctatcgcttcgtggctcccaaaaccctgtttgccaacgggtccatctacccacccaacgaaggcttctgcccgtgcctggagtctggaattcagaacgtcagcacctgcaggttcagtgcccccttgtttctctcccatcctcacttcctcaacgctgacccggttctggcagaagcggtgactggcctgcaccctaaccaggaggcacactccttgttcctggacatccacccggtcacgggaatccccatgaactgctctgtgaaactgcagctgagcctctacatgaaatctgtcgcaggcattggacaaactgggaagattgagcctgtggtcctgccgctgctctggtttgcagagagcggggccatggagggggagactcttcacacattctacactcagctggtgttgatgcccaaggtgatgcactatgcccagtacgtcctcctggcgctgggctgcgtcctgctgctggtccctgtcatctgccaaatccggagccaagagaaatgctatttattttggagtagtagtaaaaagggctcaaaggataaggaggccattcaggcctattctgaatccctgatgacatcagctcccaagggctctgtgctgcaggaagcaaaactgtagggtcctgaggacaccgtgagccagccaggcctggccgctgggcctgaccggccccccagcccctacaccccgcttctcccggactctcccagcggacagccccccagccccacagcctgagcctcccagctgccatgtgcctgttgcacacctgcacacacgccctggcacacatacacacatgcgtgcaggcttgtgcagacactcagggatggagctgctgctgaagggacttgtagggagaggctcgtcaacaagcactgttctggaaccttctctccacgtggcccacaggcctgaccacaggggctgtgggtcctgcgtccccttcctcgggtgagcctggcctgtcccgttcagccgttgggcccaggcttcctcccctccaaggtgaaacactgcagtcccggtgtggtggctccccatgcaggacgggccaggctgggagtgccgccttcctgtgccaaattcagtggggactcagtgcccaggccctggccacgagctttggccttggtctacctgccaggccaggcaaagcgcctttacacaggcctcggaaaacaatggagtgagcacaagatgccctgtgcagctgcccgagggtctccgcccaccccggccggactttgatccccccgaagtcttcacaggcactgcatcgggttgtctggcgcccttttcctccagcctaaactgacatcatcctatggactgagccggccactctctggccgaagtggccgcaggctgtgcccccgagctgcccccaccccctcacagggtccctcagattataggtgcccaggctgaggtgaagaggcctgggggccctgccttccgggcgctcctggaccctggggcaaacctgtgacccttttctactggaatagaaatgagttttatcatctttgaaaaataattcactcttgaagtaataaacgttt

SEQ ID NO: 156815 - DNA, 1597 bp, Artificial Sequence
  derived and/or modified sequence
cgtccccgtctcctgccaggcgcggagccctgcgagccgcgggtgggccccaggcgcgcagacatgggctgctccgccaaagcgcgctgggctgccggggcgctgggcgtcgcggggctactgtgcgctgtgctgggcgctgtcatgatcgtgatggtgccgtcgctcatcaagcagcaggtccttaagaacgtgcgcatcgaccccagtagcctgtccttcaacatgtggaaggagatccctatccccttctatctctccgtctacttctttgacgtcatgaaccccagcgagatcctgaagggcgagaagccgcaggtgcgggagcgcgggccctacgtgtacagggagttcaggcacaaaagcaacatcaccttcaacaacaacgacaccgtgtccttcctcgagtaccgcaccttccagttccagccctccaagtcccacggctcggagagcgactacatcgtcatgcccaacatcctggtcttgggtgcggcggtgatgatggagaataagcccatgaccctgaagctcatcatgaccttggcattcaccaccctcggcgaacgtgccttcatgaaccgcactgtgggtgagatcatgtggggctacaaggacccccttgtgaatctcatcaacaagtactttccaggcatgttccccttcaaggacaagttcggattatttgctgagctcaacaactccgactctgggctcttcacggtgttcacgggggtccagaacatcagcaggatccacctcgtggacaagtggaacgggctgagcaaggttgacttctggcattccgatcagtgcaacatgatcaatggaacttctgggcaaatgtggccgcccttcatgactcctgagtcctcgctggagttctacagcccggaggcctgccgatccatgaagctaatgtacaaggagtcaggggtgtttgaaggcatccccacctatcgcttcgtggctcccaaaaccctgtttgccaacgggtccatctacccacccaacgaaggcttctgcccgtgcctggagtctggaattcagaacgtcagcacctgcaggttcagtgcccccttgtttctctcccatcctcacttcctcaacgctgacccggttctggcagaagcggtgactggcctgcaccctaaccaggaggcacactccttgttcctggacatccacccggtcacgggaatccccatgaactgctctgtgaaactgcagctgagcctctacatgaaatctgtcgcaggcattggacaaactgggaagattgagcctgtggtcctgccgctgctctggtttgcagagagcggggccatggagggggagactcttcacacattctacactcagctggtgttgatgcccaaggagaaatgctatttattttggagtagtagtaaaaagggctcaaaggataaggaggccattcaggcctattctgaatccctgatgacatcagctcccaagggctctgtgctgcaggaagcaaaactgtagggtcctgaggacaccgtgagccagccaggcctggccgctgggcctgaccggccccccagcccctacaccccgcttctcccggactctc

SEQ ID NO: 156816 - DNA, 1530 bp, Artificial Sequence
  derived and/or modified sequence
atgggctgcagcgccaaggccagatgggccgccggcgccctgggcgtggccggcctgctgtgcgccgtgctgggcgccgtgatgatcgtgatggtgcccagcctgatcaagcagcaggtgctgaagaacgtgagaatcgaccccagcagcctgagcttcaacatgtggaaggagatccccatccccttctacctgagcgtgtacttcttcgacgtgatgaaccccagcgagatcctgaagggcgagaagccccaggtgagagagagaggcccctacgtgtacagagagttcagacacaagagcaacatcaccttcaacaacaacgacaccgtgagcttcctggagtacagaaccttccagttccagcccagcaagagccacggcagcgagagcgactacatcgtgatgcccaacatcctggtgctgggcgccgccgtgatgatggagaacaagcccatgaccctgaagctgatcatgaccctggccttcaccaccctgggcgagagagccttcatgaacagaaccgtgggcgagatcatgtggggctacaaggaccccctggtgaacctgatcaacaagtacttccccggcatgttccccttcaaggacaagttcggcctgttcgccgagctgaacaacagcgacagcggcctgttcaccgtgttcaccggcgtgcagaacatcagcagaatccacctggtggacaagtggaacggcctgagcaaggtggacttctggcacagcgaccagtgcaacatgatcaacggcaccagcggccagatgtggccccccttcatgacccccgagagcagcctggagttctacagccccgaggcctgcagaagcatgaagctgatgtacaaggagagcggcgtgttcgagggcatccccacctacagattcgtggcccccaagaccctgttcgccaacggcagcatctacccccccaacgagggcttctgcccctgcctggagagcggcatccagaacgtgagcacctgcagattcagcgcccccctgttcctgagccacccccacttcctgaacgccgaccccgtgctggccgaggccgtgaccggcctgcaccccaaccaggaggcccacagcctgttcctggacatccaccccgtgaccggcatccccatgaactgcagcgtgaagctgcagctgagcctgtacatgaagagcgtggccggcatcggccagaccggcaagatcgagcccgtggtgctgcccctgctgtggttcgccgagagcggcgccatggagggcgagaccctgcacaccttctacacccagctggtgctgatgcccaaggtgatgcactacgcccagtacgtgctgctggccctgggctgcgtgctgctgctggtgcccgtgatctgccagatcagaagccaggagaagtgctacctgttctggagcagcagcaagaagggcagcaaggacaaggaggccatccaggcctacagcgagagcctgatgaccagcgcccccaagggcagcgtgctgcaggaggccaagctgtag

SEQ ID NO: 156817 - DNA, 1230 bp, Artificial Sequence
  derived and/or modified sequence
atgggctgcagcgccaaggccagatgggccgccggcgccctgggcgtggccggcctgctgtgcgccgtgctgggcgccgtgatgatcgtgatggtgcccagcctgatcaagcagcaggtgctgaagggcgccgccgtgatgatggagaacaagcccatgaccctgaagctgatcatgaccctggccttcaccaccctgggcgagagagccttcatgaacagaaccgtgggcgagatcatgtggggctacaaggaccccctggtgaacctgatcaacaagtacttccccggcatgttccccttcaaggacaagttcggcctgttcgccgagctgaacaacagcgacagcggcctgttcaccgtgttcaccggcgtgcagaacatcagcagaatccacctggtggacaagtggaacggcctgagcaaggtggacttctggcacagcgaccagtgcaacatgatcaacggcaccagcggccagatgtggccccccttcatgacccccgagagcagcctggagttctacagccccgaggcctgcagaagcatgaagctgatgtacaaggagagcggcgtgttcgagggcatccccacctacagattcgtggcccccaagaccctgttcgccaacggcagcatctacccccccaacgagggcttctgcccctgcctggagagcggcatccagaacgtgagcacctgcagattcagcgcccccctgttcctgagccacccccacttcctgaacgccgaccccgtgctggccgaggccgtgaccggcctgcaccccaaccaggaggcccacagcctgttcctggacatccaccccgtgaccggcatccccatgaactgcagcgtgaagctgcagctgagcctgtacatgaagagcgtggccggcatcggccagaccggcaagatcgagcccgtggtgctgcccctgctgtggttcgccgagagcggcgccatggagggcgagaccctgcacaccttctacacccagctggtgctgatgcccaaggtgatgcactacgcccagtacgtgctgctggccctgggctgcgtgctgctgctggtgcccgtgatctgccagatcagaagccaggagaagtgctacctgttctggagcagcagcaagaagggcagcaaggacaaggaggccatccaggcctacagcgagagcctgatgaccagcgcccccaagggcagcgtgctgcaggaggccaagctgtag

SEQ ID NO: 156818 - DNA, 1446 bp, Artificial Sequence
  derived and/or modified sequence
atgggctgcagcgccaaggccagatgggccgccggcgccctgggcgtggccggcctgctgtgcgccgtgctgggcgccgtgatgatcgtgatggtgcccagcctgatcaagcagcaggtgctgaagaacgtgagaatcgaccccagcagcctgagcttcaacatgtggaaggagatccccatccccttctacctgagcgtgtacttcttcgacgtgatgaaccccagcgagatcctgaagggcgagaagccccaggtgagagagagaggcccctacgtgtacagagagttcagacacaagagcaacatcaccttcaacaacaacgacaccgtgagcttcctggagtacagaaccttccagttccagcccagcaagagccacggcagcgagagcgactacatcgtgatgcccaacatcctggtgctgggcgccgccgtgatgatggagaacaagcccatgaccctgaagctgatcatgaccctggccttcaccaccctgggcgagagagccttcatgaacagaaccgtgggcgagatcatgtggggctacaaggaccccctggtgaacctgatcaacaagtacttccccggcatgttccccttcaaggacaagttcggcctgttcgccgagctgaacaacagcgacagcggcctgttcaccgtgttcaccggcgtgcagaacatcagcagaatccacctggtggacaagtggaacggcctgagcaaggtggacttctggcacagcgaccagtgcaacatgatcaacggcaccagcggccagatgtggccccccttcatgacccccgagagcagcctggagttctacagccccgaggcctgcagaagcatgaagctgatgtacaaggagagcggcgtgttcgagggcatccccacctacagattcgtggcccccaagaccctgttcgccaacggcagcatctacccccccaacgagggcttctgcccctgcctggagagcggcatccagaacgtgagcacctgcagattcagcgcccccctgttcctgagccacccccacttcctgaacgccgaccccgtgctggccgaggccgtgaccggcctgcaccccaaccaggaggcccacagcctgttcctggacatccaccccgtgaccggcatccccatgaactgcagcgtgaagctgcagctgagcctgtacatgaagagcgtggccggcatcggccagaccggcaagatcgagcccgtggtgctgcccctgctgtggttcgccgagagcggcgccatggagggcgagaccctgcacaccttctacacccagctggtgctgatgcccaaggagaagtgctacctgttctggagcagcagcaagaagggcagcaaggacaaggaggccatccaggcctacagcgagagcctgatgaccagcgcccccaagggcagcgtgctgcaggaggccaagctgtag

SEQ ID NO: 156819 - protein, 478 aa, Artificial Sequence
  derived and/or modified sequence
MGRCCFYTAGTLSLLLLVTSVTLLVARVFQKAVDQSIEKKIVLRNGTEAFDSWEKPPLPVYTQFYFFNVTNPEEILRGETPRVEEVGPYTYRELRNKANIQFGDNGTTISAVSNKAYVFERDQSVGDPKIDLIRTLNIPVLTVIEWSQVHFLREIIEAMLKAYQQKLFVTHTVDELLWGYKDEILSLIHVFRPDISPYFGLFYEKNGTNDGDYVFLTGEDSYLNFTKIVEWNGKTSLDWWITDKCNMINGTDGDSFHPLITKDEVLYVFPSDFCRSVYITFSDYESVQGLPAFRYKVPAEILANTSDNAGFCIPEGNCLGSGVLNVSICKNGAPIIMSFPHFYQADERFVSAIEGMHPNQEDHETFVDINPLTGIILKAAKRFQINIYVKKLDDFVETGDIRTMVFPVMYLNESVHIDKETASRLKSMINTTLIITNIPYIIMALGVFFGLVFTWLACKGQGSMDEGTADERAPLIRT

SEQ ID NO: 156820 - DNA, 1437 bp, Artificial Sequence
  derived and/or modified sequence
atgggacgttgctgtttttacaccgccggcaccctgtctcttttgctcctggtgactagtgtcacgcttttagttgccagggtgttccagaaggcggtcgatcagtcgatcgaaaagaagattgtgttaaggaatggcactgaggcctttgacagttgggagaagccacctctgcccgtctacacacagttttatttcttcaacgttaccaacccggaggagatcctgcgaggtgagacacctcgcgttgaagaagttggcccttacacctatcgcgagctgcgtaacaaggcaaatatccagtttggggacaatggaacgactatcagcgcagtatcgaacaaggcatatgtcttcgagagagatcagagtgttggggaccccaagatagatctgatccgaacactgaacatcccagtgttgactgtcatcgaatggtctcaggtgcactttcttcgggaaataatagaggccatgttaaaagcctatcagcagaagctgttcgtgactcataccgtggacgaattgctatgggggtacaaggacgagatcctgagtctgattcatgtttttaggcccgacatcagcccgtactttggcttgttttacgagaagaatggtacaaatgacggggattacgtttttttaaccggggaggacagttacctcaattttaccaagatcgtggaatggaatggcaaaacttcacttgattggtggataacagataagtgtaacatgatcaacggtactgacggcgatagtttccaccctctaattactaaagacgaggttctgtacgtgttcccttcagacttctgcaggtccgtctatattacattctccgattacgagtctgtgcaggggctgccagcattcagatacaaggtccccgccgagattctcgcaaataccagtgacaacgcgggcttttgtatccctgagggcaactgtctgggctccggagttcttaacgtgtcaatctgcaagaatggtgctcctattatcatgagttttccacacttctatcaggcggatgaacggtttgtcagtgctatcgaaggcatgcaccccaaccaggaggatcacgaaacttttgtcgatattaaccccctgacaggaatcattctgaaagctgccaagagattccagatcaatatctatgtgaagaaactggacgatttcgtggagaccggcgacattcgcaccatggtctttcctgtcatgtatttgaacgagtcagtgcacatagacaaggagaccgcaagtcgcttgaagtccatgattaatactaccctgataatcaccaacattccgtacattataatggccctcggtgtattcttcggcttggtgttcacctggttggcctgcaaggggcaggggtctatggacgagggcaccgccgatgaaagagcgccacttatcagaacttag

SEQ ID NO: 156821 - DNA, 1437 bp, Artificial Sequence
  derived and/or modified sequence
atgggccgctgctgcttctacacagctggcaccctgagcctgctgctgctggtgacctctgtgaccctgctggtggcccgggtcttccagaaggctgtggaccagagcattgagaagaagatcgtgctgagaaatggaacagaggcctttgacagctgggagaagccacccctgcctgtgtacacccagttctacttcttcaacgtgaccaaccctgaggagatcctgcggggggagaccccccgggtggaggaggtgggcccctacacctaccgggagctgaggaacaaggccaacatccagtttggagacaatggcaccaccatctctgctgtgagcaacaaggcctacgtgtttgagcgggaccagagcgtgggggaccccaagattgacctgatccgcaccctgaacatccctgtgctgaccgtcatcgagtggagccaggtgcacttcctgcgggagatcatcgaggccatgctgaaggcctaccagcagaagctgtttgtgacccacacagtggatgagctgctgtggggctacaaggatgagatcctgagcctcatccacgtgttccggccagacatcagcccctacttcggcctcttctatgagaagaatggcaccaatgatggagactatgtgttcctgactggagaagattcctacctgaacttcaccaagatcgtggagtggaatggcaagaccagcctggactggtggatcacagacaagtgcaacatgatcaatggaacagatggagacagcttccaccccctcatcaccaaggatgaggtgctgtatgtgttccccagcgacttctgccgctctgtgtacatcaccttcagtgactatgagagcgtgcagggcctgcctgccttccgctacaaggtgcctgctgagatcctggccaacaccagtgacaatgccggcttctgcatccctgagggcaactgcctgggcagcggcgtgctgaatgtgtccatctgcaagaatggagcccccatcatcatgtccttcccccacttctaccaggctgatgaaagatttgtgtctgccatcgagggcatgcaccccaaccaggaggaccacgagacctttgtggacatcaaccccctgaccggcatcatcctgaaggccgccaagcgcttccagatcaacatctacgtgaagaagctggatgactttgtggagaccggggacatccgcaccatggtgtttcctgtgatgtacctgaatgaatctgtgcacatcgacaaggagacagccagccggctgaagtccatgatcaacaccaccctcatcatcaccaacatcccctacatcatcatggccctgggcgtcttcttcggcctggtgttcacctggctggcctgcaagggccagggctccatggatgagggcacagcagatgagcgggcccccctcatccgcacctag

SEQ ID NO: 156822 - DNA, 1437 bp, Artificial Sequence
  derived and/or modified sequence
atgggccggtgctgcttctacaccgccggcaccctgagcctgctgctcctggtaacaagcgtaacactactggtggctagggtgtttcaaaaggctgtcgaccagtctattgagaaaaaaatcgtgctgcgtaacggcacggaggcattcgattcatgggaaaaacctcctctgcccgtctatacccagttctatttctttaacgtgacgaaccccgaggagatcctcaggggtgagactccccgagtggaggaagttggaccttacacctatagagaacttaggaataaagccaacatccagttcggcgataatggaactacgatcagtgccgtgtctaacaaagcttacgtttttgaacgcgaccagtctgtgggcgacccaaaaattgaccttattaggacccttaatatcccggtgctgactgtgattgaatggtcccaggtccatttcctaagggagatcatcgaagccatgttaaaagcttaccagcagaagctttttgtcacacacaccgtggatgagctcttgtggggctacaaggacgagattctatccttaattcatgtttttaggccagacatctcgccctatttcggcttattctatgagaagaatggcaccaacgacggcgattatgtcttcctcactggcgaggattcttacctcaatttcaccaagatcgtcgagtggaacggcaaaacctcgttggattggtggattactgacaaatgcaatatgatcaacggcaccgatggggatagcttccacccattgataaccaaagacgaagtcttgtacgtgttccccagtgatttctgtcgctcagtatacatcacgttcagcgactatgagtccgttcagggcctacctgcctttagatataaggtgcccgctgagattcttgcaaacactagtgataacgccggcttttgcatccctgaaggcaattgtctgggatctggcgtgctgaacgtcagtatatgtaagaacggcgctccaattatcatgtcgtttcctcacttctaccaggctgacgaaagattcgtcagcgcgatagaaggcatgcacccgaaccaagaggatcatgagacattcgtggacatcaaccccctgactggaatcatcctcaaagccgctaagagatttcagattaacatttacgtgaagaaacttgacgattttgtcgagactggggatatacgcaccatggtttttcccgttatgtatctgaacgagtccgtgcatattgataaagaaacagctagccggctcaagtcaatgattaacaccactttgattatcacaaacatcccctacataattatggctttaggggtgttttttggcctcgtattcacctggctcgcatgtaaaggacagggctccatggatgagggtaccgccgatgaacgagcccctctcattaggacttag

SEQ ID NO: 156823 - DNA, 1437 bp, Artificial Sequence
  derived and/or modified sequence
atgggtcggtgttgcttctatacagccggtactctcagtctgctccttctggttacctccgtaacgttactggtcgcacgcgtgttccagaaagcagtcgaccagtctatcgagaaaaagatagtcctaagaaatggtaccgaggcatttgactcctgggagaaaccccctcttccggtctatacccagttctatttcttcaatgtgactaatccggaggaaattttgcggggtgagacaccccgagttgaagaggtgggcccatatacatatagagagctacgcaacaaggcaaacatccaatttggggacaatgggacaaccattagtgcagtctcaaataaagcatatgtgttcgagagagaccagtccgttggcgaccctaaaatcgatctcatcaggaccttaaatataccggttctaactgttattgagtggagtcaagtgcatttcttgcgagagatcatcgaagccatgttaaaagcttaccaacagaagctattcgttacacacaccgttgacgaacttctgtggggatacaaggatgagatcttgtctcttatacacgtctttaggcccgacatctccccctactttggcctgttttacgagaagaacggaaccaacgacggagactatgtttttctcactggagaggactcatacttaaactttactaaaatcgtggaatggaatggtaaaacaagcctggattggtggatcaccgacaagtgtaacatgatcaacggaaccgacggggactccttccaccctttgatcacaaaggacgaggtgctctatgtgttcccctctgatttttgtcggtctgtgtacattaccttttctgactacgagtccgtacagggcctgcccgcattccgatacaaggttcctgctgagattctggctaacacttctgataacgccggattttgtatccccgaaggtaattgcttgggatccggcgtcctcaacgtcagcatctgtaaaaatggggcacccatcattatgtccttcccgcacttttatcaggctgacgaaaggtttgtatccgcgattgaaggcatgcatcccaaccaggaagatcatgagaccttcgtcgatattaatcctctgactgggatcattttgaaggccgctaagcgctttcagataaacatatatgtgaagaagcttgatgacttcgtggagacgggggatatccggactatggtgtttcctgtgatgtacttaaacgaaagtgtccacattgacaaagagaccgcctctcggctgaagagtatgatcaataccacactgattattaccaacatcccctacattattatggccctcggcgttttcttcgggctggtgtttacatggttagcgtgcaagggacaaggaagtatggatgagggcactgcagacgagcgtgcacctctgatcagaacctag

SEQ ID NO: 156824 - DNA, 4763 bp, Artificial Sequence
  derived and/or modified sequence
gccggcggttgcctcgcggggttgcggcgagcccggcccgcgaacgtcacgtccctgcgcgctccctgcactctcccgagctgcgctaggcgggcgccacggctgcccggcgaaggaaaccgaaaccgagtccgggcccgtccctccgcggccccatccgcccggtgcacccggggccgcgctcgccaggccgcggagcccagagctgcgcgcacgaaccgtgcgccgggagggcgtgggcgtggcgccgaagggtcccgggtcttcgacgcctctgcggcggctcctccctccttgcagttggatccctggcgggtgcggcccggcccggcccgtgagcggcgcacagaatgggccgatgctgcttctacacggcggggacgttgtccctgctcctgctggtgaccagcgtcacgctgctggtggcccgggtcttccagaaggctgtagaccagagtatcgagaagaaaattgtgttaaggaatggtactgaggcatttgactcctgggagaagccccctctgcctgtgtatactcagttctatttcttcaatgtcaccaatccagaggagatcctcagaggggagacccctcgggtggaagaagtggggccatacacctacagggaactcagaaacaaagcaaatattcaatttggagataatggaacaacaatatctgctgttagcaacaaggcctatgtttttgaacgagaccaatctgttggagaccctaaaattgacttaattagaacattaaatattcctgtattgactgtcatagagtggtcccaggtgcacttcctcagggagatcatcgaggccatgttgaaagcctatcagcagaagctctttgtgactcacacagttgacgaattgctctggggctacaaagatgaaatcttgtcccttatccatgttttcaggcccgatatctctccctattttggcctattctatgagaaaaatgggactaatgatggagactatgtttttctaactggagaagacagttaccttaactttacaaaaattgtggaatggaatgggaaaacgtcacttgactggtggataacagacaagtgcaatatgattaatggaacagatggagattcttttcacccactaataaccaaagatgaggtcctttatgtcttcccatctgacttttgcaggtcagtgtatattactttcagtgactatgagagtgtacagggactgcctgcctttcggtataaagttcctgcagaaatattagccaatacgtcagacaatgccggcttctgtatacctgagggaaactgcctgggctcaggagttctgaatgtcagcatctgcaagaatggtgcacccatcattatgtctttcccacacttttaccaagcagatgagaggtttgtttctgccatagaaggcatgcacccaaatcaggaagaccatgagacatttgtggacattaatcctttgactggaataatcctaaaagcagccaagaggttccaaatcaacatttatgtcaaaaaattagatgactttgttgaaacgggagacattagaaccatggttttcccagtgatgtacctcaatgagagtgttcacattgataaagagacggcgagtcgactgaagtctatgattaacactactttgatcatcaccaacataccctacatcatcatggcgctgggtgtgttctttggtttggtttttacctggcttgcatgcaaaggacagggatccatggatgagggaacagcggatgaaagagcacccctcattcgaacctaaacattgcctttgcttggtgaagaaactgtgtgagctgtcctgacctggacgatgacgtggggaaaccctccacctccttgcaggcttgttgcctgttgaaagaaggaaaaagacacggcgctggcaagtgataggaacattctggccagaggttaaagagcaggctgacatggctggccattaagctttataaaatcatgtgggctctgaaattgttcttttatgtgtctagcaagtatttaataaacccttgtatagtaattttgttgttgttgggtgctggtagctccagaattttgtgaccactattgtgggtaaaatgtctctgcatcacttgttaatgctactggtctaacttcattcagtatgcttcattcaccgaactttgtgctcaaaatgcgtatataccattttatgttgtattcctccatttcacttgcaaaacagaagtaaataagagttcgggacccagggtaaaatggtagcttcatccaatatatcattcaaatgcatctgatttctaaaacatattacattttatgctgatcttcagttcataattcttccaggaaaactcagtcttccaactgcaataaaatactgggtagaatcaaatgggaaaggggttgggtggggcaatacccatgagttgatagtgataagctcctaaggatttttaacttgtacttttgtgaacgaagagaatgcataaataatgttggtgaggataaagtacagatatttcatgtagaattaattgctagttatgatgcttgtggatagttaactgttttttttttagtcaaaatgatcatgctacgaaaagatgcttctgagagaatgtaatgagtaactgatttttcttcctgagtcgcccttgccaaatatgttactgtattaattaatctaatattgagtgattatttgtaaaattatgaatatgggaaatccatctatctacagcctaagttacacataagtttcagaaagtctgattagactaaagagatatttcttctgggacagccgccttcttggtaattttgaagttctttttacaagttccttcctcagtttcagttctttccagtgttttgtagctcactgtcactcactgaatagagaaacgtgtgccctatacttcctgtgacaatcattttgctgacagaatgatggatgtttaaaatattgcacaaagtactttaaagaaaggtctgttaggaccagaagcagagacaccacttttcaaaggacttcttggtttcagcataacctaagacagggaattgggagccatcatatgtcacagtgttcagaattcaagcatatttaagggcattttctttgattctcaaagttcagcattcattttgaattgagaagcctatacatttagctgacaaagtgcttatagaatttcttaacaactgaaccattcaaaaggattttttttgtttaaaactggatttcaatgtaagcaaatgaagaaaaaaatatagatttcatttccatagcttcttatccctgtattgaggtaataaattgttttactgacaatttttcctttttctacactaaaacaatatgtgatatatttcccctcttgaagaggcaattcattaaactctcaaattttctatagaatcaagatagaacctttagatactccaactcaccaaaatgtaaaaaaactaacaaaaatatttggtcttcaataatgctaaatatctacatttttagaatttatcaacatttaactagataattgggcatgtcttaattatgcatgtacttatccatactaataaaattgacaatgctagtgcatacttattggtttagtcctattatcaggatataatcatctgtgaggaggatattttaaatactgtaaatgataacagttaatgatatacacatttagactgagttgcacactggcagggagaccaaaaacattacttccatacttgtgtcatgattcttttttttttgagagagtctcactctgtcgccaggctggagtacagtggcatgatctcggctcactgcaacctctgcctcccgggttcaagcaattctcctgcctcagccacccaagtagctgggactacaggtgcgtgccaccacgcccagctaaattttgtatttttagtggagacggggtttcaccatgttggccaggatggtctcaatctcctgaccctgcgatctgcccacctcagcctcccaaagtgctgggattacaggcgtaagccaccgggcctggcctgttttatgattcttaatagttacttggtttaaatcacatttgatactatccttctgaaaagtctgagacagatctacaaactacagtcaaaattatagattaagaggaatgaatgcacctatttggctttaagttgaagatgaattatttctcatgctcattttcttgcggcagttatcttagaaagacccccaaaggctttgtgattgtaagcactgtcatgatcacagaatgcaagcttctggtaccatgatcctcaacttagagaggaagaaaccaagacagagagcttaactcacttctctcagggaaaattaggagttgagcacaggacaggaaatgggctttgccacttttagctccaggcttttctaaccagacttgatttcctcatgttctagaaagatcactaatggtcaagtggaacaagcactacacgactaacccctattggggtttttaacttaagggaggctaatttttaatttaaactgctcgagatatgagttctgcaaaaggtggtccgcatccttggccctctggacattatcactaaattgcttgtgcctgttaacaagaatactgaccagaatgctcttcatgtagcttatacagttggttcacttcatgcggttcttgacatgtttatttctacccttaatgcaatgaaatgtttcattaataaaaaaccactttatataaaa

SEQ ID NO: 156825 - DNA, 1437 bp, Artificial Sequence
  derived and/or modified sequence
atgggcagatgctgcttctacaccgccggcaccctgagcctgctgctgctggtgaccagcgtgaccctgctggtggccagagtgttccagaaggccgtggaccagagcatcgagaagaagatcgtgctgagaaacggcaccgaggccttcgacagctgggagaagccccccctgcccgtgtacacccagttctacttcttcaacgtgaccaaccccgaggagatcctgagaggcgagacccccagagtggaggaggtgggcccctacacctacagagagctgagaaacaaggccaacatccagttcggcgacaacggcaccaccatcagcgccgtgagcaacaaggcctacgtgttcgagagagaccagagcgtgggcgaccccaagatcgacctgatcagaaccctgaacatccccgtgctgaccgtgatcgagtggagccaggtgcacttcctgagagagatcatcgaggccatgctgaaggcctaccagcagaagctgttcgtgacccacaccgtggacgagctgctgtggggctacaaggacgagatcctgagcctgatccacgtgttcagacccgacatcagcccctacttcggcctgttctacgagaagaacggcaccaacgacggcgactacgtgttcctgaccggcgaggacagctacctgaacttcaccaagatcgtggagtggaacggcaagaccagcctggactggtggatcaccgacaagtgcaacatgatcaacggcaccgacggcgacagcttccaccccctgatcaccaaggacgaggtgctgtacgtgttccccagcgacttctgcagaagcgtgtacatcaccttcagcgactacgagagcgtgcagggcctgcccgccttcagatacaaggtgcccgccgagatcctggccaacaccagcgacaacgccggcttctgcatccccgagggcaactgcctgggcagcggcgtgctgaacgtgagcatctgcaagaacggcgcccccatcatcatgagcttcccccacttctaccaggccgacgagagattcgtgagcgccatcgagggcatgcaccccaaccaggaggaccacgagaccttcgtggacatcaaccccctgaccggcatcatcctgaaggccgccaagagattccagatcaacatctacgtgaagaagctggacgacttcgtggagaccggcgacatcagaaccatggtgttccccgtgatgtacctgaacgagagcgtgcacatcgacaaggagaccgccagcagactgaagagcatgatcaacaccaccctgatcatcaccaacatcccctacatcatcatggccctgggcgtgttcttcggcctggtgttcacctggctggcctgcaagggccagggcagcatggacgagggcaccgccgacgagagagcccccctgatcagaacctag

SEQ ID NO: 156826 - protein, 166 aa, Artificial Sequence
  derived and/or modified sequence
MASGVAVSDGVIKVFNDMKVRKSSTPEEVKKRKKAVLFCLSEDKKNIILEEGKEILVGDVGQTVDDPYATFVKMLPDKDCRYALYDATYETKESKKEDLVFIFWAPESAPLKSKMIYASSKDAIKKKLTGIKHELQANCYEEVKDRCTLAEKLGGSAVISLEGKPL

SEQ ID NO: 156827 - protein, 91 aa, Artificial Sequence
  derived and/or modified sequence
MASGVAVSDGVIKVFNDMKVRKSSTPEEVKKRKKAVLFCLSEDKKNIILEEGKEILVGDVGQTVDDPYATFVKMLPDKDCRYALYDATYET

SEQ ID NO: 156828 - DNA, 501 bp, Artificial Sequence
  derived and/or modified sequence
atggccagcggcgtggccgtgagcgacggcgtgatcaaggtgttcaacgacatgaaggtgagaaagagcagcacccccgaggaggtgaagaagagaaagaaggccgtgctgttctgcctgagcgaggacaagaagaacatcatcctggaggagggcaaggagatcctggtgggcgacgtgggccagaccgtggacgacccctacgccaccttcgtgaagatgctgcccgacaaggactgcagatacgccctgtacgacgccacctacgagaccaaggagagcaagaaggaggacctggtgttcatcttctgggcccccgagagcgcccccctgaagagcaagatgatctacgccagcagcaaggacgccatcaagaagaagctgaccggcatcaagcacgagctgcaggccaactgctacgaggaggtgaaggacagatgcaccctggccgagaagctgggcggcagcgccgtgatcagcctggagggcaagcccctgtag

SEQ ID NO: 156829 - DNA, 276 bp, Artificial Sequence
  derived and/or modified sequence
atggccagcggcgtggccgtgagcgacggcgtgatcaaggtgttcaacgacatgaaggtgagaaagagcagcacccccgaggaggtgaagaagagaaagaaggccgtgctgttctgcctgagcgaggacaagaagaacatcatcctggaggagggcaaggagatcctggtgggcgacgtgggccagaccgtggacgacccctacgccaccttcgtgaagatgctgcccgacaaggactgcagatacgccctgtacgacgccacctacgagacctag

SEQ ID NO: 156830 - DNA, 1234 bp, Artificial Sequence
  derived and/or modified sequence
ggccggcgggaagactccgttacccagcgagcgaggcggcggcgcagggccagcggactccatttcccgtcggctcgcggtgggagcgccggaagcccgccccacccctcattgtgcggctcctactaaacggaaggggccgggagaggccgcgttcagtcgggtcccggcagcggctgcagcgctctcgtcttctgcggctctcggtgccctctccttttcgtttccggaaacatggcctccggtgtggctgtctctgatggtgtcatcaaggtgttcaacgacatgaaggtgcgtaagtcttcaacgccagaggaggtgaagaagcgcaagaaggcggtgctcttctgcctgagtgaggacaagaagaacatcatcctggaggagggcaaggagatcctggtgggcgatgtgggccagactgtcgacgacccctacgccacctttgtcaagatgctgccagataaggactgccgctatgccctctatgatgcaacctatgagaccaaggagagcaagaaggaggatctggtgtttatcttctgggcccccgagtctgcgccccttaagagcaaaatgatttatgccagctccaaggacgccatcaagaagaagctgacagggatcaagcatgaattgcaagcaaactgctacgaggaggtcaaggaccgctgcaccctggcagagaagctggggggcagtgccgtcatctccctggagggcaagcctttgtgagccccttctggccccctgcctggagcatctggcagccccacacctgcccttgggggttgcaggctgcccccttcctgccagaccggaggggctggggggatcccagcagggggagggcaatcccttcaccccagttgccaaacagaccccccaccccctggattttccttctccctccatcccttgacggttctggccttcccaaactgcttttgatcttttgattcctcttgggctgaagcagaccaagttccccccaggcaccccagttgtgggggagcctgtattttttttaacaacatccccattccccacctggtcctcccccttcccatgctgccaacttctaaccgcaatagtgactctgtgcttgtctgtttagttctgtgtataaatggaatgttgtggagatgacccctccctgtgccggctggttcctctcccttttcccctggtcacggctactcatggaagcaggaccagtaagggaccttcgatt

SEQ ID NO: 156831 - DNA, 1752 bp, Artificial Sequence
  derived and/or modified sequence
aactgcgaagcccccctctctctccccgttgctcttggaaactctaaggctcagaaaagggggcgctagcctcatattcatgtagggtcgctcgcgggaggcggggtcaagctgctgtctccacctggagcgccgggagtccgggcgggggcggtgctgtggaatgtccccgactacaacccccggtcgggattccaggctaatcaatagttgcttcgattcagaaatgcaaaaccctaacctcactcaaaaatttcaggccaagggatccagataataccagatgggtcttaagaaagccgttttgctgtgggataaagagccgcttagtcggggatcgttttcgggtcattttactgagcgccgcctcgccgggctcagagcggttcctgggaaattggaccaatgggctcgcgctgcgcgctgcggtgccgcccaggacctgggcctacatttccctacatgcactgcagctcggagccggccggcgggaagactccgttacccagcgagcgaggcggcggcgcagggccagcggactccatttcccgtcggctcgcggtgggagcgccggaagcccgccccacccctcattgtgcggctcctactaaacggaaggggccgggagaggccgcgttcagtcgggtcccggcagcggctgcagcgctctcgtcttctgcggctctcggtgccctctccttttcgtttccggaaacatggcctccggtgtggctgtctctgatggtgtcatcaaggtgttcaacgacatgaaggtgcgtaagtcttcaacgccagaggaggtgaagaagcgcaagaaggcggtgctcttctgcctgagtgaggacaagaagaacatcatcctggaggagggcaaggagatcctggtgggcgatgtgggccagactgtcgacgacccctacgccacctttgtcaagatgctgccagataaggactgccgctatgccctctatgatgcaacctatgagaccaaggagagcaagaaggaggatctggtgtttatcttctgggcccccgagtctgcgccccttaagagcaaaatgatttatgccagctccaaggacgccatcaagaagaagctgacagggatcaagcatgaattgcaagcaaactgctacgaggaggtcaaggaccgctgcaccctggcagagaagctggggggcagtgccgtcatctccctggagggcaagcctttgtgagccccttctggccccctgcctggagcatctggcagccccacacctgcccttgggggttgcaggctgcccccttcctgccagaccggaggggctggggggatcccagcagggggagggcaatcccttcaccccagttgccaaacagaccccccaccccctggattttccttctccctccatcccttgacggttctggccttcccaaactgcttttgatcttttgattcctcttgggctgaagcagaccaagttccccccaggcaccccagttgtgggggagcctgtattttttttaacaacatccccattccccacctggtcctcccccttcccatgctgccaacttctaaccgcaatagtgactctgtgcttgtctgtttagttctgtgtataaatggaatgttgtggagatgacccctccctgtgccggctggttcctctcccttttcccctggtcacggctactcatggaagcaggaccagtaagggaccttcgattaaaaaaaaaaaagacaataataaaaaggctcattaa

SEQ ID NO: 156832 - DNA, 567 bp, Artificial Sequence
  derived and/or modified sequence
cgggagtccgggcgggggcggtgctgtggaatgtccccgactacaacccccgctcggagccggccggcgggaagactccgttacccagcgagcgaggcggcggcgcagggccagcggactccatttcccgtcggctcgcggtgggagcgccggaagcccgccccacccctcattgtgcggctcctactaaacggaaggggccgggagaggccgcgttcagtcgggtcccggcagcggctgcagcgctctcgtcttctgcggctctcggtgccctctccttttcgtttccggaaacatggcctccggtgtggctgtctctgatggtgtcatcaaggtgttcaacgacatgaaggtgcgtaagtcttcaacgccagaggaggtgaagaagcgcaagaaggcggtgctcttctgcctgagtgaggacaagaagaacatcatcctggaggagggcaaggagatcctggtgggcgatgtgggccagactgtcgacgacccctacgccacctttgtcaagatgctgccagataaggactgccgctatgccctctatgatgcaacctatgagac

SEQ ID NO: 156833 - DNA, 501 bp, Artificial Sequence
  derived and/or modified sequence
atggcctccggcgtggccgtgtcagatggagtgattaaagtcttcaatgacatgaaggtgcggaaatcaagtacaccagaagaggtaaaaaagcgtaaaaaagccgtccttttctgcctctccgaagacaagaaaaatatcatattggaggagggaaaagaaatccttgtcggtgacgtgggacaaactgtggatgatccatatgccacctttgtcaaaatgctccccgataaagattgccggtacgctctttacgacgccacctacgagacaaaggaatcgaagaaggaggatctggtgtttattttctgggcaccagaatccgctcctctcaaatccaagatgatctacgcatcttcaaaggatgctatcaaaaaaaagcttacaggaattaaacacgaattacaggccaattgttatgaagaggtgaaggaccggtgcactctagccgagaaactaggtggctccgccgttattagcctcgagggaaaaccactttag

SEQ ID NO: 156834 - DNA, 501 bp, Artificial Sequence
  derived and/or modified sequence
atggcttccggcgtggccgtgtccgacggagttataaaggtctttaacgacatgaaagtgaggaagtctagtacacccgaagaggtgaaaaaacgcaaaaaagccgtcctcttttgcctgtcggaggacaagaaaaacatcattttggaggaaggtaaagaaattctggtgggagatgtaggacagactgtggacgacccttatgcaacgtttgtcaaaatgctccctgacaaggactgtagatatgctttgtatgacgcaacttacgagacaaaagaaagcaaaaaggaggatcttgtgtttatcttttgggcaccagaaagcgcgccccttaaatcgaaaatgatttatgcatcatctaaagatgcaattaagaagaagctgacaggcattaagcacgaactgcaggccaactgttatgaggaagtgaaggatcgctgcaccttggcagaaaaactgggcggttcagccgtgattagcctagagggcaagccgctctag

SEQ ID NO: 156835 - DNA, 276 bp, Artificial Sequence
  derived and/or modified sequence
atggcttcgggggttgccgtcagcgatggggttatcaaggtgttcaacgatatgaaggtcaggaaatccagtacaccggaagaggtgaaaaaacggaaaaaggccgttttgttttgcctgtctgaggataagaagaatattatccttgaagagggcaaggaaatcctcgtcggagacgtgggtcaaacggttgacgatccatacgctaccttcgttaaaatgctccctgacaaggattgtaggtacgctctctacgatgccacctatgaaacatag

SEQ ID NO: 156836 - DNA, 501 bp, Artificial Sequence
  derived and/or modified sequence
atggccagcggcgtggccgtgtctgatggagtcatcaaggtgttcaatgacatgaaggtgaggaagagcagcaccccagaggaggtgaagaagaggaagaaggctgtgctcttctgcctgtctgaggacaagaagaacatcatcctggaggagggcaaggagatcctggtgggagatgtgggccagacagtggatgacccctatgccacctttgtgaagatgctgcctgacaaggactgccgctatgccctgtatgatgccacctatgagaccaaggagagcaagaaggaggacctggtgttcatcttctgggcccctgagagcgcccccctgaagagcaagatgatctatgccagcagcaaggatgccatcaagaagaagctgaccggcatcaagcatgagctgcaggccaactgctatgaggaggtgaaggaccgctgcaccctggccgagaagctgggcggcagcgctgtgatcagcctggagggcaagcccctgtag

SEQ ID NO: 156837 - DNA, 276 bp, Artificial Sequence
  derived and/or modified sequence
atggccagcggcgtggccgtgtctgatggagtcatcaaggtgttcaatgacatgaaggtgaggaagagcagcaccccagaggaggtgaagaagaggaagaaggctgtgctcttctgcctgtctgaggacaagaagaacatcatcctggaggagggcaaggagatcctggtgggagatgtgggccagacagtggatgacccctatgccacctttgtgaagatgctgcctgacaaggactgccgctatgccctgtatgatgccacctatgagacctag

SEQ ID NO: 156838 - DNA, 501 bp, Artificial Sequence
  derived and/or modified sequence
atggccagcggcgtggccgtgagcgacggcgtgatcaaggtgttcaacgatatgaaggtgcgtaagtcaagcactcccgaagaggtgaagaaaaggaaaaaggccgtgctgttctgtctgtctgaggataagaagaacataatcttggaagagggaaaagaaattctcgtgggtgacgtcggacagacggtggacgacccatacgcaactttcgtgaagatgctgcccgataaagactgtaggtacgccctctacgatgctacatacgagaccaaagaaagtaagaaggaggaccttgtgtttatattctgggcccctgagtccgcaccgctcaagagcaaaatgatttatgcctccagcaaggacgcgattaaaaaaaaactgaccggcatcaagcacgagctgcaggctaactgctatgaagaagttaaagaccgatgtacattggccgagaagctaggcgggagcgccgtcatcagtctggaaggaaaacccttgtag

SEQ ID NO: 156839 - DNA, 501 bp, Artificial Sequence
  derived and/or modified sequence
atggccagcggcgtggccgtgagcgacggcgtgatcaaggtgttcaatgatatgaaggtccgaaaatcaagcacccctgaagaagtaaagaaacggaagaaagcggtgctgttttgcctgtccgaggataaaaagaatattattctggaggagggcaaggaaatccttgtaggagacgtagggcaaacggtagacgacccctatgccacatttgtcaaaatgctgccagacaaagactgtcggtatgcgttatatgatgctacctatgaaactaaagagagtaagaaggaagatttggttttcattttctgggcccccgaaagcgcccccctcaagtccaagatgatttatgcgtcctctaaggatgcaattaaaaaaaagctgacaggtattaaacacgagctgcaagcaaattgctacgaggaggtgaaagatcgctgcacactggctgaaaagctgggcgggagtgcagtgatctctctcgagggaaagcctctttag

SEQ ID NO: 156840 - DNA, 276 bp, Artificial Sequence
  derived and/or modified sequence
atggccagcggcgtggccgtgagcgacggcgtgatcaaggtgttcaatgacatgaaagtaaggaaaagcagtactccagaggaagtgaagaagaggaaaaaagctgtgctgttctgccttagcgaagacaaaaaaaacatcatcctggaagagggcaaggagatccttgtaggtgatgttggacagaccgttgacgacccttatgctacatttgttaagatgctcccagacaaggactgcaggtacgctctctacgacgcaacatatgagacgtag

SEQ ID NO: 156841 - DNA, 501 bp, Artificial Sequence
  derived and/or modified sequence
atggccagcggagtggccgtatccgacggagtgattaaggtgttcaacgacatgaaggtgcggaaatcctcaactccagaggaagtgaagaaaagaaaaaaggccgtgctgttttgcctgagtgaagacaaaaaaaacatcatcttagaagagggcaaggagatactggtgggagatgtgggccagaccgtcgacgatccttatgccactttcgtgaagatgctccccgacaaagattgtcggtatgctctgtacgatgcgacatatgagaccaaagagtccaagaaggaggacctcgtattcatattttgggcccctgaaagtgcccctctcaagagcaaaatgatctatgcctctagcaaggacgctatcaagaagaagttaacaggaattaagcacgaactgcaagctaactgctacgaggaggtgaaggatcggtgcaccttggccgaaaaactagggggaagcgccgtgataagcttggagggaaaaccactgtag

SEQ ID NO: 156842 - DNA, 501 bp, Artificial Sequence
  derived and/or modified sequence
atggccagtggtgttgccgtctccgacggcgttatcaaggtgtttaacgatatgaaggtgaggaaatccagtaccccagaggaggtaaaaaagcggaagaaagctgtacttttttgtctttcagaagacaagaaaaacattatcctggaggaagggaaggagatcctggttggggatgtgggccagaccgtcgacgacccctacgctaccttcgtgaagatgctacccgataaggactgtaggtatgctctctatgatgcgacctacgaaacaaaggagagtaaaaaagaagatttggtgtttattttttgggccccagagagtgctccactgaagtccaaaatgatttacgcctcctcgaaagacgccatcaaaaagaaactcacaggaataaagcatgagctgcaggctaattgctacgaggaggtgaaggataggtgcacactcgcagaaaagctcggcggtagtgcagtgatctcactcgaggggaaacccctatag

SEQ ID NO: 156843 - DNA, 276 bp, Artificial Sequence
  derived and/or modified sequence
atggcctccggggtggcggtgtccgacggcgtgattaaagtgttcaacgacatgaaagtgcgaaaaagcagcacccctgaggaagtgaaaaaacgaaagaaagcagtgcttttttgcttgtctgaggataagaaaaacatcatcctggaagagggcaaggaaattctcgtcggggacgtgggtcaaacggtcgacgatccctatgccaccttcgtgaaaatgttaccagataaggactgccggtacgccctatatgacgcgacctatgagacctag

SEQ ID NO: 156844 - protein, 360 aa, Artificial Sequence
  derived and/or modified sequence
MNPTDIADTTLDESIYSNYYLYESIPKPCTKEGIKAFGELFLPPLYSLVFVFGLLGNSVVVLVLFKYKRLRSMTDVYLLNLAISDLLFVFSLPFWGYYAADQWVFGLGLCKMISWMYLVGFYSGIFFVMLMSIDRYLAIVHAVFSLRARTLTYGVITSLATWSVAVFASLPGFLFSTCYTERNHTYCKTKYSLNSTTWKVLSSLEINILGLVIPLGIMLFCYSMIIRTLQHCKNEKKNKAVKMIFAVVVLFLGFWTPYNIVLFLETLVELEVLQDCTFERYLDYAIQATETLAFVHCCLNPIIYFFLGEKFRKYILQLFKTCRGLFVLCQYCGLLQIYSADTPSSSYTQSTMDHDLHDAL

SEQ ID NO: 156845 - DNA, 1083 bp, Artificial Sequence
  derived and/or modified sequence
atgaatcccacagacattgccgatacgaccctcgatgagtcaatttattctaactactacctatatgagagcattcccaagccatgcacgaaagaggggatcaaagcatttggcgagctgttcctgcccccattgtattctctggttttcgtttttggactgctcggaaatagcgtagtagttttggtgctctttaaatataaacgcttacggagcatgactgatgtgtatctgctgaaccttgcaattagtgaccttctttttgttttcagcctccccttttggggctactatgctgccgatcagtgggtctttggcttgggtctgtgtaagatgattagttggatgtacttggtggggttctacagcgggattttttttgttatgctgatgtcaattgacagatacttagcgatcgtgcacgcagttttcagtcttcgcgcacgcacactgacgtacggggtaatcacttccctggccacttggtcagtagccgtattcgccagcctgcctggattcctgttctccacctgttacacggagcgtaatcatacctattgtaagaccaaatattctctgaattccactacctggaaagttctctcaagccttgaaataaacatcctgggactggtcatcccactcggcatcatgctcttctgctactccatgattattcggactttgcaacactgtaagaacgagaaaaagaacaaggcagtaaagatgatatttgctgtcgttgtcttattcctgggattttggactccctacaatatcgtgctgttcctggagacactcgtcgaactggaggtgttacaggactgcacatttgaaaggtacctggactacgctatccaggcaaccgaaaccctcgcttttgtgcactgctgtctaaatccaatcatctactttttcctcggggaaaaatttagaaaatatatcctgcagttgttcaagacttgtcgggggctctttgtgctgtgtcagtactgtggtctgctacagatatacagtgctgataccccctcttcctcatatacacagtcaaccatggaccatgacctgcacgacgctctctag

SEQ ID NO: 156846 - DNA, 1083 bp, Artificial Sequence
  derived and/or modified sequence
atgaaccccacagacattgctgacaccaccctggatgagagcatctacagcaactactacctgtatgagagcatccccaagccctgcaccaaggagggcatcaaggcctttggagagctgttcctgccccccctgtacagcctggtgtttgtgtttggcctgctgggcaacagcgtggtggtgctggtgctcttcaagtacaagaggctgcgctccatgacagatgtgtacctgctgaacctggccatcagtgacctgctgtttgtgttcagcctgcccttctggggctactatgctgctgaccagtgggtgtttggcctgggcctgtgcaagatgatctcctggatgtacctggtgggcttctacagcggcatcttctttgtgatgctgatgagcattgaccgctacctggccatcgtgcatgctgtgttcagcctgcgggcccggaccctgacctatggagtcatcaccagcctggccacctggagcgtggccgtgtttgccagcctgcccggcttcctgttcagcacctgctacacagagaggaaccacacctactgcaagaccaagtacagcctgaacagcaccacctggaaggtgctgagcagcctggagatcaacatcctgggcctggtgatccccctgggcatcatgctgttctgctacagcatgatcatccgcaccctgcagcactgcaagaatgagaagaagaacaaggctgtgaagatgatctttgctgtggtggtgctcttcctgggcttctggaccccctacaacatcgtgctcttcctggagaccctggtggagctggaggtgctgcaggactgcacctttgagcgctacctggactatgccatccaggccacagagaccctggcctttgtgcactgctgcctgaaccccatcatctacttcttcctgggggagaagttcaggaagtacatcctgcagctgttcaagacctgccggggcctgtttgtgctgtgccagtactgcggcctgctgcagatctacagcgctgacacccccagcagcagctacacccagagcaccatggaccatgacctgcatgatgccctgtag

SEQ ID NO: 156847 - DNA, 1083 bp, Artificial Sequence
  derived and/or modified sequence
atgaaccccaccgacatcgccgacaccaccctggacgagagcatctatagtaactattacctttatgagtctattcctaagccatgtaccaaggaaggcattaaagcttttggcgagctgtttctccctcccctgtattccttggtcttcgtgttcgggctgctggggaattccgtggtggtactggtccttttcaagtataagagactacgctctatgactgatgtgtatctgcttaacctggcgatttctgacctcctgtttgtcttttcactgccattctggggctattatgcagctgaccagtgggtgtttgggttgggcctatgtaagatgataagttggatgtatttagtcggattttattcggggatcttctttgtcatgctcatgtctatagatcggtacttagctatagtgcatgccgtgtttagtctgcgcgccaggactctgacttacggagtcattacgagtctggctacgtggtccgtggccgtcttcgcctctctgccaggatttctgttttcaacatgctatacggaaaggaaccacacctattgtaagacaaaatacagtctgaattctacaacctggaaagttctgtcttcactggaaatcaatattctggggctggtgattccattgggaatcatgctcttctgctacagcatgattatccggacgctccagcattgtaaaaatgaaaagaagaacaaagccgtcaaaatgatttttgcagtcgtcgtgctgtttcttggtttctggaccccttataacatagttttgtttctggaaactttagttgaactcgaggttctgcaggattgcacattcgagcggtatttggattacgccattcaggctaccgaaaccttggcgtttgtgcactgttgcttaaatccaataatttacttttttctgggtgaaaagttcaggaaatatatcctccagctgttcaagacatgtagaggactatttgtgttgtgccaatattgcgggctgctgcaaatctattccgccgacacaccctcgagctcttacacacaaagcaccatggatcacgacctgcacgatgccctatag

SEQ ID NO: 156848 - DNA, 1083 bp, Artificial Sequence
  derived and/or modified sequence
atgaatcccaccgatattgctgataccaccctcgatgagtctatttattctaattattatctttacgaatctatccccaaaccttgcactaaagaaggtattaaggccttcggtgaactgtttctccctccactttactctctagtgttcgtgttcggtctgcttggcaatagcgtggtggtgctcgtgctgttcaagtataagcggctgcggagcatgacagacgtctatttgctcaatctggccatctctgacttgctgttcgtgttcagcctgccattttggggctattatgccgctgaccagtgggtgttcggacttgggttgtgcaaaatgatctcctggatgtacctggtgggcttctacagtgggatttttttcgtgatgctcatgtccattgacaggtatctggccatcgttcatgccgtgtttagcttacgcgctcggacactgacgtatggggtgattacaagtcttgctacttggtccgtcgcggtatttgctagtttgccgggtttcctgtttagcacctgctacacagagaggaatcacacctattgcaaaacaaagtacagcctcaactcaactacatggaaagttctgagctccctggaaataaacattctgggtttggttatacccttgggtatcatgctgttctgttactcaatgatcataaggactctccaacattgtaaaaacgaaaagaagaacaaagccgtaaagatgatctttgccgtggtcgttcttttcctgggattctggactccctataatatcgtcctgtttctggagaccctcgtggaactggaggtgctgcaggattgtaccttcgaacggtacctggattacgccattcaagccacggagactctggccttcgtccattgctgtctgaatcctatcatctacttcttcttgggcgaaaagtttcgtaagtacatcctccaactattcaaaacttgtcgtggtctgtttgtcctgtgtcagtactgtggactgttgcagatttattcagctgacaccccttcatcaagctacactcagtccacaatggaccatgatctgcatgacgccctctag

SEQ ID NO: 156849 - DNA, 3095 bp, Artificial Sequence
  derived and/or modified sequence
gctcacaggaagccacgcacccttgaaaggcaccgggtccttcttagcatcgtgcttcctgagcaagcctggcattgcctcacagaccttcctcagagccgctttcagaaaagcaagctgcttctggttgggcccagacctgccttgaggagcctgtagagttaaaaaatgaaccccacggatatagcagacaccaccctcgatgaaagcatatacagcaattactatctgtatgaaagtatccccaagccttgcaccaaagaaggcatcaaggcatttggggagctcttcctgcccccactgtattccttggtttttgtatttggtctgcttggaaattctgtggtggttctggtcctgttcaaatacaagcggctcaggtccatgactgatgtgtacctgctcaaccttgccatctcggatctgctcttcgtgttttccctccctttttggggctactatgcagcagaccagtgggtttttgggctaggtctgtgcaagatgatttcctggatgtacttggtgggcttttacagtggcatattctttgtcatgctcatgagcattgatagatacctggcaattgtgcacgcggtgttttccttgagggcaaggaccttgacttatggggtcatcaccagtttggctacatggtcagtggctgtgttcgcctcccttcctggctttctgttcagcacttgttatactgagcgcaaccatacctactgcaaaaccaagtactctctcaactccacgacgtggaaggttctcagctccctggaaatcaacattctcggattggtgatccccttagggatcatgctgttttgctactccatgatcatcaggaccttgcagcattgtaaaaatgagaagaagaacaaggcggtgaagatgatctttgccgtggtggtcctcttccttgggttctggacaccttacaacatagtgctcttcctagagaccctggtggagctagaagtccttcaggactgcacctttgaaagatacttggactatgccatccaggccacagaaactctggcttttgttcactgctgccttaatcccatcatctacttttttctgggggagaaatttcgcaagtacatcctacagctcttcaaaacctgcaggggcctttttgtgctctgccaatactgtgggctcctccaaatttactctgctgacacccccagctcatcttacacgcagtccaccatggatcatgatctccatgatgctctgtagaaaaatgaaatggtgaaatgcagagtcaatgaactttccacattcagagcttacttaaaattgtattttagtaagagattcctgagccagtgtcaggaggaaggcttacacccacagtggaaagacagcttctcatcctgcaggcagctttttctctcccactagacaagtccagcctggcaagggttcacctgggctgaggcatccttcctcacaccaggcttgcctgcaggcatgagtcagtctgatgagaactctgagcagtgcttgaatgaagttgtaggtaatattgcaaggcaaagactattcccttctaacctgaactgatgggtttctccagagggaattgcagagtactggctgatggagtaaatcgctaccttttgctgtggcaaatgggccctctaattaatttcttgcttttgcggaacaatatagataactgtttttctaataacatatctcaggcaaagtatattccattgagccagatgtatgaagaaacaattagcgaagtgatgaaaccagatctcaattatttattgtaaaggattatctgttaattgaaaccaaactttttatactgatataagggtaaggatatgaagacattagccaaggtctgctttccaaacgtgaactacaaggcattcaaaatccaaacatatttatgaaaattcaaacacagtttctcacttgtttgtggacatgttttgttctaattttaacagaggaatattaaaaaattttaaataggctgggcacggtggcctgtaatcccagcactgtgggaggccaaggtgggcggatcacctgaggtcaggagttcgagaccagcctggccaacatggagaaaccctgtctctactaaaaaatacaaaattagccaggtgtggtggcgcatgcctgtaatcccagctactcaggaggctgaggctggagaataacttgaatccgggaggtggaggttgcggtgagccgagatcgcgccattgtactccaacctgggcaaaaagagcgaaactctgtctcaaaaaaaaaaaaaaaaaattaaataatacataggccaagaatacatttatttgaggtcatttacttgtttttttttttttttttttttttgagatggaatcttgctctgtcacccagtctggagtgcagtggcgcgatctcggctcactgcaagctctgcctcacgggttcgcaccattctcctgcctcagcctcccaagtaggtgggactacaggcacctgcccccatgcctggctaattttttgtattttcagtagagatggggtttcaccatgttagcaaggatggttttaatctcctgacctcgtgatccacccgcctcggcctcccaaagtgctgggattacaggtgtgagccatcacgcccggccacttgtttattttttattttattttattttatttttgagatggagtctcactctgtcacccaagctggagtgcagtggcactcggttcactgcaaagtctgcctcccaggttcaagcgattctcctgcctcagcttctcaagcagctgggattagaggtgtgcaccactacgccaggctaatttttgtatttttagtagagatggggtttcaccatattggccaggctagtcttgaactcctgacctcaggtgatctgcctgcttcagcctcccaaagtgctgggattacaggcgtgagccacctcgcccagccaaggtcttttacttgtttataaacagtctcttcataattaaaattaaggattaataaagtatgacaatacctccttaatcattttgaagtgcctgctatcaattgaaataaaaacaatcaactaaaa

SEQ ID NO: 156850 - DNA, 1083 bp, Artificial Sequence
  derived and/or modified sequence
atgaaccccaccgacatcgccgacaccaccctggacgagagcatctacagcaactactacctgtacgagagcatccccaagccctgcaccaaggagggcatcaaggccttcggcgagctgttcctgccccccctgtacagcctggtgttcgtgttcggcctgctgggcaacagcgtggtggtgctggtgctgttcaagtacaagagactgagaagcatgaccgacgtgtacctgctgaacctggccatcagcgacctgctgttcgtgttcagcctgcccttctggggctactacgccgccgaccagtgggtgttcggcctgggcctgtgcaagatgatcagctggatgtacctggtgggcttctacagcggcatcttcttcgtgatgctgatgagcatcgacagatacctggccatcgtgcacgccgtgttcagcctgagagccagaaccctgacctacggcgtgatcaccagcctggccacctggagcgtggccgtgttcgccagcctgcccggcttcctgttcagcacctgctacaccgagagaaaccacacctactgcaagaccaagtacagcctgaacagcaccacctggaaggtgctgagcagcctggagatcaacatcctgggcctggtgatccccctgggcatcatgctgttctgctacagcatgatcatcagaaccctgcagcactgcaagaacgagaagaagaacaaggccgtgaagatgatcttcgccgtggtggtgctgttcctgggcttctggaccccctacaacatcgtgctgttcctggagaccctggtggagctggaggtgctgcaggactgcaccttcgagagatacctggactacgccatccaggccaccgagaccctggccttcgtgcactgctgcctgaaccccatcatctacttcttcctgggcgagaagttcagaaagtacatcctgcagctgttcaagacctgcagaggcctgttcgtgctgtgccagtactgcggcctgctgcagatctacagcgccgacacccccagcagcagctacacccagagcaccatggaccacgacctgcacgacgccctgtag

SEQ ID NO: 156851 - protein, 3027 aa, Artificial Sequence
  derived and/or modified sequence
MNLHQVLTGAVNPGDHCFSVGSIGDQRFTAYASGCDIVILGSDFERLQIIPGAKHGNIQVGCVDCSMQQGKIAASYGNVISIFEPVNLPKQKKNLELYSQWQKSGQFFLESIAHNITWDPTGSRLLTGSSYLQLWSNTNLEKPTEDENLNKTDLNFGDWKCIWHCKTASQVHLMKFSPDGEFFATAGKDDCLLKVWYNVENWRTAVTSPDGSSEKQSQGEIDFSFVYLAHPRAVNGFSWRKTSKYMPRASVCNVLLTCCKDNVCRLWVETFLPNDCLLYGGDCSHWTESINLTNNFKRNASSKERVQNALEVNLRHFRRGRRRSLALVAHTGYLPHQQDPHHVHRNTPLHANALCHFHIAASINPATDIPLLPSITSLSLNENEEKTGPFVVHWLNNKELHFTLSMEVFLQQLRKSFEQPSSEASVEDSNQADVKSDEETDDGVDDLKINPEKKELGCDKMVPNSSFTSLSSAAIDHQIEVLLSEWSKNADMLFSIHPMDGSLLVWHVDWLDEYQPGMFRQVQVSFVSRIPVAFPTGDANSLCKSIMMYACTKNVDLAIQQGKQKPSGLTRSTSMLISSGHNKSSNSLKLSIFTPNVMMISKHADGSLNQWLVSFAEESAFSTVLSISHKSRYCGHRFHLNDLACHSVLPLLLTTSHHNALRTPDVDNPEQPFDALNIEECSLTQQNKSTVDVAFQDPSAVYSELILWRVDPVGPLSFSGGVSELARINSLHVSAFSNVAWLPTLIPSYCLGAYCNSPSACFVASDGQYLRLYEAVIDAKKLLSELSNPEISKYVGEVFNIVSQQSTARPGCIIALDPITKLHGRKTQLLHVFEEDFILNNLEKKSLGKDSILSNAGSSPNGFSEKFYLIVIECTQDNRSLLHMWNLHLKSIPVSLDEKVDTKLSEAVWQPEEHYSSSPEKILSPFSQKYQACRANLQSTSRLTLFSEMVYSQELHLPEGVEIISIKPSAGHLSSSSIYPACSAPYLLATSCSDEKVRFWRCRVTDGESATSKNGKIDLAYIWEEWPLLIEDGLQSNSSITVPGRPVEVSCAHTNRLAVAYKQPASNSRSSQDFVMHVSIFECESTGGSCWVLEQTIHLDELSTVLDSGISVDSNLVAYNKQDMYLSSKENITSNTKHLVHLDWMSREDGSHILTVGIGSKLFMYGPLAGKVQDQTGKETLAFPLWESTKVVPLSKFVLLRSVDLVSSVDGSPPFPVSLSWVRDGILVVGMDCEMHVYCQWQPSSKQEPVITDSYSGSTPSITSLIKQSNSSSGLHPPKKTLTRSMTSLAQKICGKKTAFDPSVDMEDSGLFEAAHVLSPTLPQYHPLQLLELMDLGKVRRAKAILSHLVKCIAGEVVALNEAESNHERRLRSLTISASGSTTRDPQAFNKAENTDYTEIDSVPPLPLYALLAADDDSCYSSLEKSSNESTLSKSNQLSKESYDELFQTQLLMTDTHMLETDEENTKPRVIDLSQYSPTYFGPEHAQVLSGHLLHSSLPGLSRMEQMSLMALADTIATTSTDIGESRDRSQGGETLDECGLKFLLAVRLHTFLTTSLPAYRAQLLHQGLSTSHFAWAFHSVAEEELLNMLPAMQKDDPTWSELRAMGVGWWVRNTRILRKCIEKVAKAAFYRKNDPLDAAIFYLAMKKKAVIWGLYRAEKNTRMTQFFGHNFEDERWRKAALKNAFSLLGKQRFEHSAAFFLLAGCLRDAIEVCLEKLNDIQLALVIARLYESEFDTSAAYKSILRKKVLGIDSPVSELCSLNINMHHDPFLRSMAYWILEDYSGALETLIKQPIRENDDQVLSASNPTVFNFYNYLRTHPLLLRRHFGSSDTFSTHMSLTGKSGLAGTINLSERRLFFTTASAHLKAGCPMLALEVLSKMPKVIKKTRPFYRASSFLDTSKDCSPSSPLKLDAREDKSSAVDWSQSLINGFGSSSEGSSEKQSNSTLSFDWSQPSVVFQDDSLELKWDSDNDEENEDVPISMKELKPLQRKTDKKLDDISSNYTESFSTLDENDLLNPSEDIIAVQLKFRACLKILTVELRTLSTGYEIDGGKLRYQLYHWLEKEVIALQRTCDFCSDAEELQSAFGRNEDEFGLNEDAEDLPHQTKVKQLRENFQEKRQWLLKYQSLLRMFLSYCILHGSHGGGLASVRMELILLLQESQQETSEPLFSSPLSEQTSVPLLFACTANAKTVVANPLLHLSNLTHDILHAIINFDSPPHPDIQSNKVYVMHTLAASLSACIYQCLCGSHNYSSFQTNQFTGMVYQTVLLPHRPSLKTGSLDEALTPNTSPAQWPGITCLIRLLNSSGEEAQSGLTVLLCEILTAVYLSLFIHGLATHSSNELFRIVAHPLNEKMWSAVFGGGAHVPSKEQTHSKTLPVSSLVEEGEKQNKRFRPSKMSCRESAPLTPSSAPVSQESLAVKEKFIPPELSIWDYFIAKPFLPSSQSRAEYDSEESLGSDDDDNDDDDDVLASDFHLQEHSNSNSYSWSLMRLAMVQLVLNNLKTFYPFAGHDLAELPVSSPLCHAVLKTLQCWEQVLLRRLEIHGGPPQNYIASHTAEESLSAGPAILRHKALLEPTNTPFKSKHHLALSVKRLWQYLVKQEEIQETFIKNIFTKKRCLNEIEADLGYPGGKARIIHKESDIITAFAVNKANRNCIAIASSHDVQELDVSGILATQVYTWVDDDIEVETKGSEDFLVIHARDDLTAVQGTTPYTHSNPGTPINMPWLGSTQTGRGASVMIKKAINNVRRMTSHPTLPYYLTGAQDGSVRMFEWGHSQQITCFRSGGNSRVTRMRFNYQGNKFGIVDADGYLSLYQTNWKCCPVTGSMPKPYLTWQCHNKTANDFVFVSSSSLIATAGLSTDNRNVCLWDTLVAPANSLVHAFTCHDSGATVLAYAPKHQLLISGGRKGFTYVFDLCQRQQRQLFQSHDSPVKAVAVDPTEEYFVTGSAEGNIKIWSLSTFGLLHTFVSEHARQSIFRNIGTGVMQIETGPANHIFSCGADGTMKMRILPDQFSPLNEVLKNDVKFML

SEQ ID NO: 156852 - DNA, 9084 bp, Artificial Sequence
  derived and/or modified sequence
atgaatctccaccaggtgctgactggtgccgtgaaccccggagaccactgcttctctgtaggctctattggcgatcaacgctttaccgcatatgcaagcgggtgtgatatcgtgatcctggggtctgatttcgagcgtctgcaaatcatccccggcgcgaaacacggaaatatccaggtgggttgtgtagattgctccatgcagcagggaaaaatcgccgcttcgtatggaaatgtgatcagtatatttgagcctgtgaacctccctaaacagaagaaaaatttggagctttactcccagtggcaaaagtccggccagttctttttagaatcaatcgctcataatatcacttgggacccgacagggtccagactgctgacggggtcctcctacttgcagctctggagcaatactaacctggagaaacctaccgaagacgaaaatctgaataagaccgacctcaatttcggggattggaagtgtatatggcactgcaaaaccgcaagccaagtgcacctaatgaagttttcaccagacggggagtttttcgcaacagcagggaaggacgactgtcttttgaaagtatggtacaacgttgagaactggagaaccgcagttacaagccctgacggctccagcgaaaaacaaagtcagggtgaaatagatttttcgtttgtatatttggcacaccctcgcgctgtgaatggtttttcatggaggaaaacttccaaatatatgcctcgcgcttcagtctgtaatgtgctgctgacttgttgtaaggataatgtctgtagactttgggtggagacgtttctgcctaatgattgtcttctctacgggggggactgttcccactggacggaaagtattaatctgacgaataacttcaaacggaatgcctcaagcaaggagcgcgtacagaacgctcttgaggtgaacctgcggcacttccggagggggcgtaggagatccctggccctggttgcccatacgggctacctgccacaccagcaggacccacaccacgtccatcgaaatactcccctgcacgccaacgctctctgtcactttcacatagcagccagcatcaaccccgccaccgatatacccctgctgcccagcatcacgtcactgtcattaaatgagaacgaagaaaagaccggtccgttcgttgtgcactggctgaataacaaagaacttcactttactctgagcatggaagtgtttctacagcagctgcgtaagagtttcgagcagccttcctcagaggcctctgtggaagactctaatcaagctgacgtcaaatccgacgaggagaccgacgacggcgtggacgatctgaaaatcaatccagagaagaaggagctcgggtgcgacaagatggtgccgaactcatcattcacctctctctccagtgcggcaatagaccaccaaatcgaggtactcctgtctgagtggtcaaagaatgccgacatgctgttttccatccaccccatggatgggagtctccttgtgtggcatgtggactggcttgatgagtaccagcctggtatgttcaggcaggttcaggtgagctttgtaagtagaatacccgtagcatttccaactggggatgcaaattcgctttgtaagagcataatgatgtatgcctgtaccaagaacgttgacctcgctattcaacagggcaagcagaagcccagcggactgacacgtagcacaagtatgctgatctcgagtgggcacaataagtccagcaacagtctgaaattgagtatcttcaccccaaatgtgatgatgattagcaagcacgccgatggatccctgaaccagtggctcgtaagctttgctgaggaatccgcattctctaccgtccttagcatcagtcataaatcccggtattgtggacacaggttccacctcaatgatctggcatgccactctgtactgccgctgctactcactacatctcaccataacgcgcttagaacacccgatgtggacaatcctgaacagccctttgatgctcttaacattgaagagtgcagcctgacacagcagaacaagtcaacagtggacgtcgccttccaggaccctagtgccgtttacagcgagctcatcttgtggcgcgtggaccccgttggccctcttagcttttctgggggtgtatccgaactggcacggataaacagtctgcatgtgagcgctttcagcaacgttgcctggctgcccacactcataccaagctactgtctcggtgcatattgtaattccccaagtgcctgttttgtcgcttccgacggacagtatctcaggctgtacgaagctgtgatcgatgccaagaagctgctgagcgagctgtctaatcccgagatcagtaagtacgtgggagaagtcttcaatatcgttagccaacaatcaacagctcggcctggatgcatcatagccctcgatccaatcacaaagcttcatggcagaaaaacacagctattgcacgtctttgaggaggatttcattctcaacaatctagaaaagaaaagcctgggcaaagattctattctgtcaaacgccggatccagtcccaacggattttccgagaagttctatctcattgtgatcgaatgcactcaagacaaccgcagcctcctccacatgtggaatctacatctgaagagtatccccgtttctctggacgagaaagtagatacaaaattgtcggaggccgtgtggcagccagaggagcattattcatctagtccagagaaaattctgtctcccttcagccagaaataccaggcatgtagggcaaatttgcagtcaacctcacggctcacactcttttccgaaatggtctattcacaggaattgcatctcccagagggggtcgagatcatctcaatcaagccaagcgctggccacctgtctagttcttccatctatcccgcctgtagcgctccgtatctcctggctacgtcctgcagcgacgaaaaggtgaggttttggcgttgtcgggtaaccgacggcgagtcagccacctcaaagaatggcaagatcgacttagcttacatctgggaagagtggcctctactcatcgaagacgggttgcaatcaaacagctcgatcactgtaccagggagacccgtagaagtgagctgtgcccacaccaatcgtctggcagtggcatataagcaacctgccagtaactctagatcgtcccaagattttgtgatgcatgtcagcatattcgagtgcgagtcaaccggcggcagttgttgggttctcgagcagactatacatctggatgagctttccaccgtgctcgattcaggcatttcagtagatagcaatttggttgcgtacaataaacaagatatgtatctttccagtaaagagaacattacctcgaacaccaagcatctggttcacctggattggatgagtcgcgaggacggtagccatatactcaccgtgggcattggttctaaacttttcatgtacggacccctcgctgggaaggtgcaggatcagacagggaaagaaaccctggctttcccactctgggaaagcacgaaggttgtccccttgtccaaattcgttttgctccgtagtgtcgacttggtgtccagcgtggatggctctccacccttccccgtgagcctgagctgggtaagggacggaattctggtcgttggcatggattgtgagatgcatgtgtactgccagtggcagccctctagtaaacaagagcccgtgattaccgacagttactcgggtagtacaccctccattaccagccttatcaagcaatccaacagtagcagcggacttcacccacccaaaaagaccctgacacgatccatgacttccttggcccagaagatctgtggtaagaagactgcattcgacccaagcgtggacatggaggactccggactctttgaggccgcacacgttttatcgcccacactgcctcagtatcatcctttgcagctattggagctgatggatctcgggaaggtccgccgcgccaaagccattctgagccatctggtgaaatgcattgcaggcgaggtggttgcattaaacgaggctgagtcaaatcatgagagaagactcaggagtttgacaatcagtgcgagtggctcgactacaagggatccccaagcttttaataaagcagaaaatactgactatacagaaatagacagcgtgccccctctacccctctacgcactgctggccgcagatgacgacagctgctactcgtctctcgaaaagtcctctaatgagagcacactgagtaaaagcaaccagctgtcgaaagagagctacgatgagctcttccaaactcagctcttgatgaccgatacccacatgttggaaaccgacgaagaaaacactaagccgagggtcatcgatctatcccaatatagtccgacctactttgggccagagcatgctcaggtactgtccggccacctcctgcactcttccctgccaggtctgtcacgaatggaacagatgtcgttgatggccctggccgataccattgctaccacgagcacggacattggggagagtagggacagaagccaaggtggcgaaacactggatgagtgcggactgaaattcttgctcgccgtacgactgcacactttcctaactaccagtctccccgcttatagggctcagctccttcatcaaggcctgagcacatcacattttgcttgggccttccactcagtggctgaggaggaattgctgaatatgttacccgctatgcagaaggacgacccaacctggtcagaattaagagcaatgggcgttggctggtgggtgaggaacactcgcattcttcgtaagtgtatcgagaaagtagcaaaggccgccttctaccgcaaaaacgaccctctggatgccgcaatcttttatttggcaatgaagaaaaaggctgtgatttggggattgtacagagccgagaagaatacacggatgacccagttctttgggcacaacttcgaagatgagagatggcggaaggccgcactgaagaatgccttttcattgcttggaaaacagcggtttgagcattccgcagccttcttccttctggccggttgcctgcgggatgctatcgaagtttgcctggaaaagctcaatgacattcagctggccctagtcatagctcggctttatgaaagtgaatttgatacttcagctgcgtataagtccatactgagaaaaaaagtgctcggaattgactctcccgtgtccgagctgtgcagcctcaacatcaatatgcaccatgatcctttcctgcggtcgatggcctattggatcctcgaggactattctggggcactggagactctcatcaaacaaccaatccgagagaacgatgaccaggtgctttctgcttcaaaccctaccgtgttcaatttctataattacctgcgcactcatcccttgctcctccggaggcatttcggctcttctgacacatttagtacccatatgtccttgaccggcaaaagcggcttagccggtactatcaacctgtcggaacggcgcctattctttacaacagcaagtgctcatttgaaagcgggctgccccatgctggccttagaagtgctgagtaaaatgcccaaggtgataaaaaagacaaggccattttaccgcgcctcctcctttctcgacacctcaaaggactgctctccctcttctcccctcaagctggacgcacgcgaagataaatcctctgccgttgactggagccagtcgctgatcaacggttttggctctagcagtgaggggtcaagcgaaaagcagtccaactctacgctgtcattcgattggagtcagcccagtgtcgtcttccaggacgactccttagagctgaagtgggatagcgacaacgatgaggagaatgaggacgtgccaattagcatgaaggagctaaaaccactgcagaggaagactgataagaagctggacgacataagctctaactatacggagtctttcagcacactggatgaaaacgatctcctgaatcccagcgaggatataatcgctgtgcagctaaagtttagagcctgcctaaaaatccttactgttgaactgagaacattgagcaccggctacgagatcgatgggggtaagctgcgttaccagctgtaccactggcttgaaaaggaggttatagctctgcagcgcacctgtgacttctgctctgatgcagaggaactgcagagcgcattcggccggaatgaagacgaatttgggttgaacgaggacgccgaggacctgccgcaccaaacaaaagtcaagcaactgagagaaaatttccaggagaagaggcaatggttactgaaatatcaatctctgctgcggatgttcttgagctactgcattttgcatggctcccacggcggaggcttagccagcgttagaatggagctgatcctactcctgcaagagtcacagcaggaaacttcagagccattgttctcgtctccactgagtgaacagacttccgtccctctcttgtttgcctgtaccgcaaatgctaagactgtggtcgctaatccattattacatctgagtaatctgacgcatgatatccttcacgccatcataaacttcgactcacctccccatcctgatattcagagcaataaagtatatgttatgcacactctggctgcttctcttagtgcgtgcatatatcagtgcctgtgcggctctcacaactacagttcattccagaccaatcaattcaccggaatggtgtaccaaaccgtcctgctgccccacaggcccagccttaagaccggaagcttggatgaggcactgactcctaatacttcacccgcacagtggcctggcattacctgtctgatcaggctgctgaacagctcaggcgaggaagcacaatcaggccttaccgtgctgctgtgtgagattctgaccgccgtttatttaagcttgtttatccacggtttggccactcactcctctaacgagctttttcggattgttgcccatccacttaatgagaagatgtggtcagctgtcttcggtggaggagctcacgtgccaagcaaggaacaaactcacagcaagacgctgccggtgtcaagccttgtcgaggagggcgagaagcaaaacaagaggttcaggccatcaaagatgagctgtcgtgagagcgcccctctgacaccgtcctctgctcctgtttctcaagagagtttggcagtcaaggaaaaattcatcccccccgaacttagtatctgggattacttcattgccaagccatttcttccatcctcccagtccagagcagagtacgacagcgaagaatccctgggctctgacgacgatgacaacgacgacgatgatgatgtgctagcctcagatttccatttacaggaacattctaatagcaattcttacagctggtctttgatgcgcctggccatggtgcaactggtcctgaataacctaaaaaccttttatcctttcgccgggcacgatttagctgagctgcctgtaagcagtcctttgtgtcatgcagttctcaagaccctacagtgctgggaacaggtgctgcttcggaggttggagatccacggaggtcctcctcagaattacatcgcctcacacacggccgaagagagcctgagtgccggaccagctattcttagacataaagccctgctagaacctacgaataccccctttaagtccaagcaccatctagctttgtcagtaaaaaggctctggcagtatctggtgaagcaggaggagatccaagaaacatttatcaaaaatatctttacgaagaaaaggtgcctcaatgagattgaagctgatctgggataccctggcggcaaagcacggattatacacaaggaatccgacattatcaccgccttcgccgtgaacaaagctaaccggaattgtatcgccatcgccagtagccacgacgtccaagaactcgatgtgtccggcatactcgccactcaggtctatacttgggttgacgacgacattgaagtcgagacaaaggggtctgaggatttcctcgtgatccatgccagggatgatttaaccgctgtccagggcaccaccccttatacccatagcaaccctgggacccccattaacatgccatggttgggatccacccaaaccggtcgcggggcttcagtaatgattaagaaagctattaataacgtgcgacgaatgacatctcatcctaccttgccgtactaccttacaggcgcccaggatgggagcgtgcggatgttcgagtggggacactcccaacagatcacttgtttcagaagcggggggaactcccgtgttacgaggatgaggtttaactatcaagggaacaagttcggaatagtcgacgccgatggatacttgagtttgtatcaaaccaattggaaatgctgtccggtgacaggctctatgcctaaaccctaccttacctggcagtgccacaacaagactgccaatgacttcgtctttgtctccagcagttctctgatcgccacagccggcctttccactgacaacaggaacgtttgtctttgggacaccctggtcgcgccagccaacagcctggtccatgctttcacatgccatgatagcggggcgaccgtcctggcctatgcccccaagcatcagctgcttatttctggaggacgaaaaggctttacttatgtgtttgacctctgtcagcggcagcagagacaactgttccagagccacgactcccctgttaaagccgtggccgtggaccctacagaggagtattttgtgaccggttctgccgagggcaacatcaagatttggtccctctccacattcgggcttctgcacacctttgtttctgagcacgcccgccagagcatattcagaaatattggcaccggagtgatgcaaatcgaaaccgggcccgctaatcatattttctcctgtggggcagatgggaccatgaagatgcgtatactgcctgaccagttctcaccacttaacgaggttctgaagaacgacgttaagtttatgctatag

SEQ ID NO: 156853 - DNA, 9084 bp, Artificial Sequence
  derived and/or modified sequence
atgaacctgcaccaggtgctgaccggggctgtgaaccctggggaccactgcttctctgtgggcagcattggagaccagcgcttcaccgcctatgccagcggctgtgacatcgtcatcctgggcagtgactttgagcggctgcagatcatccctggggccaagcacggcaacatccaggtgggctgtgtggactgcagcatgcagcagggcaagattgctgccagctatggaaatgtcatcagcatctttgagcctgtgaacctgcccaagcagaagaagaacctggagctgtacagccagtggcagaagagcggccagttcttcctggagagcatcgcccacaacatcacctgggaccccaccggcagccggctgctgaccggcagcagctacctgcagctgtggagcaacaccaacctggagaagcccacagaagatgagaacctgaacaagacagacctgaactttggagactggaagtgcatctggcactgcaagacagccagccaggtgcacctgatgaagttctccccagatggagagttctttgccacagctgggaaggatgactgcctgctgaaggtgtggtacaacgtggagaactggaggacagctgtgaccagcccagatggcagcagcgagaagcagagccagggcgagattgacttctcctttgtgtacctggcccaccccagggctgtgaatggcttctcctggaggaagaccagcaagtacatgccccgggcctctgtgtgcaatgtgctgctgacctgctgcaaggacaacgtgtgccgcctgtgggtggagaccttcctgcccaatgactgcctgctgtatggaggagactgcagccactggacagagagcatcaacctgaccaacaacttcaagagaaatgccagcagcaaggagcgggtgcagaatgccctggaggtgaacctgcggcacttccggcggggcagaagaagaagcctggccctggtggcccacacaggctacctgccccaccagcaggacccccaccacgtgcacaggaacacccccctgcacgccaatgccctgtgccacttccacatcgccgccagcatcaacccagccacagacatccccctgctgcccagcatcaccagcctgagcctgaatgaaaatgaggagaagacaggcccctttgtggtgcactggctgaacaacaaggagctgcacttcaccctgtccatggaggtgttcctgcagcagctgaggaagagctttgagcagcccagcagcgaggcctctgtggaggacagcaaccaggctgatgtgaagagtgatgaggagacagatgatggagtggatgacctgaagatcaaccctgagaagaaggagctgggctgtgacaagatggtgcccaacagcagcttcaccagcctgagcagcgctgccatcgaccaccagatcgaggtgctgctgtctgagtggagcaagaatgctgacatgctgttcagcatccaccccatggatggcagcctgctggtgtggcacgtggactggctggatgagtaccagcccggcatgttccggcaggtgcaggtgtcctttgtgagccgcatccctgtggccttccccactggagatgccaacagcctgtgcaagagcatcatgatgtatgcctgcaccaagaatgtggacctggccatccagcagggcaagcagaagcccagcggcctgaccaggagcacctccatgctgatcagcagcggccacaacaagagcagcaacagcctgaagctgagcatcttcacccccaacgtgatgatgatcagcaagcatgctgatggcagcctgaaccagtggctggtgtcctttgctgaggagagcgccttcagcacagtgctgagcatcagccacaagagccgctactgcggccaccgcttccacctgaatgacctggcctgccacagcgtgctgcccctgctgctgaccaccagccaccacaatgccctgcggaccccagatgtggacaaccctgagcagccctttgatgccctgaacatcgaggagtgcagcctgacccagcagaacaagagcacagtggatgtggccttccaggaccccagcgctgtgtacagcgagctgatcctgtggagggtggaccctgtgggccccctgtccttctctggaggagtgtctgagctggcccgcatcaacagcctgcacgtgtctgccttcagcaatgtggcctggctgcccaccctcatccccagctactgcctgggcgcctactgcaacagccccagcgcctgctttgtggccagtgatggccagtacctgcggctgtatgaagctgtgattgatgccaagaagctgctgtctgagctgagcaaccctgagatcagcaaatatgtgggggaggtgttcaacatcgtgtcccagcagagcacagcccggcccggctgcatcatcgccctggaccccatcaccaagctgcacggcaggaagacccagctgctgcacgtgtttgaggaggacttcatcctgaacaacctggagaagaagagcctgggcaaggacagcatcctgagcaatgccggcagcagccccaacggcttcagcgagaagttctacctgattgtgattgaatgtacccaggacaacagaagcctgctgcacatgtggaacctgcacctgaagagcatccctgtgtccctggatgagaaggtggacaccaagctgtctgaggccgtgtggcagcctgaggagcactacagcagcagccctgagaagatcctgagccccttcagccagaagtaccaggcctgccgggccaacctgcagagcaccagccggctgaccctcttcagcgagatggtgtacagccaggagctgcacctgcctgagggcgtggagatcatcagcatcaagcccagcgctggccacctgagcagcagcagcatctacccagcctgcagcgccccctacctgctggccaccagctgcagtgatgagaaggtgcgcttctggcgctgccgggtgacagatggagagagcgccaccagcaagaatggcaagattgacctggcctacatctgggaggagtggcccctgctgattgaagatggcctgcagagcaacagcagcatcaccgtgcccggccggcctgtggaggtgtcctgtgcccacaccaaccggctggccgtggcctacaagcagcctgccagcaacagccgcagcagccaggactttgtgatgcacgtgtccatctttgaatgtgagagcactggaggcagctgctgggtgctggagcagaccatccacctggatgagctgagcacagtgctggacagcggcatctctgtggacagcaacctggtggcctacaacaagcaggacatgtacctgagcagcaaggagaacatcaccagcaacaccaagcacctggtgcacctggactggatgagccgggaggatggcagccacatcctgactgtgggcatcggcagcaagctgttcatgtatggccccctggccggcaaggtgcaggaccagacaggcaaggagaccctggccttccccctgtgggagagcaccaaggtggtgcccctgagcaagtttgtgctgctgcggtctgtggacctggtgtcctctgtggatggcagcccccccttccctgtgtccctgtcctgggtgagagatggcatcctggtggtgggcatggactgtgagatgcacgtgtactgccagtggcagcccagcagcaagcaggagcctgtgatcacagacagctacagcggcagcacccccagcatcaccagcctcatcaagcagagcaacagcagcagcggcctgcacccccccaagaagaccctgaccaggtccatgaccagcctggcccagaagatctgtgggaagaagacagcctttgaccccagcgtggacatggaggacagcggcctgtttgaggccgcccacgtgctgagccccaccctgccccagtaccaccccctgcagctgctggagctgatggacctgggcaaggtgcggcgggccaaggccatcctgagccacctggtgaagtgcatcgccggggaggtggtggccctgaatgaagctgagagcaaccatgaaagaaggctgcggagcctgaccatcagcgccagcggcagcaccacccgggacccccaggccttcaacaaggcagaaaatacagactacacagaaattgacagcgtgccccccctgcccctgtatgccctgctggccgcagatgatgacagctgctacagcagcctggagaagagcagcaatgaaagcaccctgagcaagagcaaccagctgagcaaggagagctatgatgagctgttccagacccagctgctgatgacagacacccacatgctggagacagatgaggagaacaccaagccccgggtgattgacctgagccagtacagccccacctactttggacctgagcacgcccaggtgctgagcggccacctgctgcacagcagcctgcccggcctgagcaggatggagcagatgagcctgatggccctggccgacaccatcgccaccaccagcacagacattggagagagccgggacaggagccagggcggggagaccctggatgaatgtggcctgaagttcctgctggccgtgcggctgcacaccttcctgaccaccagcctgcctgcctaccgggcccagctgctgcaccagggcctgagcaccagccactttgcctgggccttccacagcgtggccgaggaggagctgctgaacatgctgcctgccatgcagaaggatgaccccacctggagcgagctgcgggccatgggcgtgggctggtgggtgaggaacacccgcatcctgaggaagtgcatcgagaaggtggccaaggccgccttctacaggaagaatgaccccctggatgctgccatcttctacctggccatgaagaagaaggccgtcatctggggcctgtacagagctgagaagaacaccaggatgacccagttcttcggccacaactttgaagatgagcgctggaggaaggccgccctgaagaatgccttcagcctgctgggcaagcagagatttgagcacagcgctgccttcttcctgctggccggctgcctgagagatgccatcgaggtgtgcctggagaagctgaatgacatccagctggccctggtgattgcccggctgtatgaaagtgaatttgacaccagcgctgcctacaagagcatcctgaggaagaaggtgctgggcatcgacagccctgtgtctgagctgtgcagcctgaacatcaacatgcaccacgaccccttcctgcgctccatggcctactggatcctggaggactacagcggggccctggagaccctcatcaagcagcccatcagagaaaatgatgaccaggtgctgagcgccagcaaccccaccgtcttcaacttctacaactacctgcggacccaccccctgctgctgcggcggcacttcggcagcagtgacaccttcagcacccacatgagcctgaccgggaagagcggcctggccggcaccatcaacctgtctgaaagaagactcttcttcaccacagccagcgcccacctgaaggccggctgccccatgctggccctggaggtgctgagcaagatgcccaaggtgatcaagaagacccggcccttctaccgggccagcagcttcctggacaccagcaaggactgcagccccagcagccccctgaagctggatgcccgggaggacaagagcagcgctgtggactggagccagagcctcatcaatggcttcggcagcagcagcgagggcagcagcgagaagcagagcaacagcaccctgagctttgactggagccagcccagcgtggtgttccaggatgacagcctggagctgaagtgggacagcgacaatgatgaagaaaatgaagatgtgcccatctccatgaaggagctgaagcccctgcagaggaagacagacaagaagctggatgacatcagcagcaactacacagagagcttcagcaccctggatgaaaatgacctgctgaaccccagcgaggacatcatcgctgtgcagctgaagttccgggcctgcctgaagatcctgactgtggagctgcggaccctgagcacaggctatgaaattgatggcggcaagctgcgctaccagctgtaccactggctggagaaggaggtgattgccctgcagaggacctgtgacttctgcagtgatgctgaggagctgcagagcgcctttggaagaaatgaagatgaatttggcctgaatgaagatgctgaggacctgccccaccagaccaaggtgaagcagctgcgggagaacttccaggagaagaggcagtggctgctgaagtaccagagcctgctgaggatgttcctgagctactgcatcctgcacggcagccatggaggcggcctggcctctgtgaggatggagctgatcctgctgctgcaggagagccagcaggagaccagcgagcccctcttcagcagccccctgtctgagcagacctctgtgcccctgctgtttgcctgcacagccaatgccaagacagtggtggccaaccccctgctgcacctgagcaacctgacccatgacatcctgcacgccatcatcaactttgacagccccccccacccagacatccagagcaacaaggtgtatgtgatgcacaccctggccgccagcctgagcgcctgcatctaccagtgcctgtgtggcagccacaactacagcagcttccagaccaaccagttcaccggcatggtgtaccagacagtgctgctgccccaccggcccagcctgaagacaggcagcctggatgaggccctgacccccaacaccagccctgcccagtggccaggcatcacctgcctgatccggctgctgaacagcagtggagaggaggcccagagcggcctgactgtgctgctgtgtgagatcctgacagctgtgtacctgagcctcttcatccacggcctggccacccacagcagcaatgaactcttccgcatcgtggcccaccccctgaatgagaagatgtggagcgctgtgtttggaggaggagcccacgtgcccagcaaggagcagacccacagcaagaccctgcctgtgagcagcctggtggaggagggggagaagcagaacaagcgcttccggcccagcaagatgagctgccgggagagcgcccccctgacccccagcagcgcccctgtgtcccaggagagcctggccgtgaaggagaagttcatccccccagagctgagcatctgggactacttcatcgccaagcccttcctgcccagcagccagagcagagcagaatatgacagcgaggagagcctgggcagtgatgatgatgacaatgatgatgatgatgatgtgctggccagtgacttccacctgcaggagcacagcaacagcaacagctacagctggagcctgatgaggctggccatggtgcagctggtgctgaacaacctgaagaccttctacccctttgctggccatgacctggccgagctgcctgtgagcagccccctgtgccacgctgtgctgaagaccctgcagtgctgggagcaggtgctgctgcggcggctggagatccacggcggccccccccagaactacatcgccagccacacagctgaggagagcctgtctgctggccctgccatcctgcggcacaaggccctgctggagcccaccaacacccccttcaagagcaagcaccacctggccctgtctgtgaagaggctgtggcagtacctggtgaagcaggaggagatccaggagaccttcatcaagaacatcttcaccaagaagcgctgcctgaatgaaattgaggccgacctgggctacccaggcggcaaggcccgcatcatccacaaggagagtgacatcatcacagcctttgctgtgaacaaggccaacagaaactgcatcgccatcgccagcagccatgatgtgcaggagctggatgtgtctggcatcctggccacccaggtgtacacctgggtggatgatgacatcgaggtggagaccaagggcagcgaggacttcctggtgattcatgccagagatgacctgacagctgtgcagggcaccaccccctacacccacagcaaccctggcacccccatcaacatgccctggctgggcagcacccagacaggccgcggggcctctgtgatgatcaagaaggccatcaacaacgtgcggaggatgaccagccaccccaccctgccctactacctgactggagcccaggacggctctgtgaggatgtttgagtggggccacagccagcagatcacctgcttccgcagcggcggcaacagccgggtgaccaggatgaggttcaactaccagggcaacaagtttggcatcgtggatgctgatggctacctgagcctgtaccagaccaactggaagtgctgccctgtgacaggctccatgcccaagccctacctgacctggcagtgccacaacaagacagccaatgactttgtgtttgtgagcagcagcagcctgattgccacagctggcctgagcacagacaacagaaatgtgtgcctgtgggacaccctggtggccccagccaacagcctggtgcacgccttcacctgccatgattctggggccaccgtgctggcctatgcccccaagcaccagctgctgatcagcggcggcaggaagggcttcacctacgtgtttgacctgtgccagaggcagcagaggcagctgttccagagccatgacagccctgtgaaggctgtggccgtggaccccacagaggagtactttgtgactggatctgctgagggcaacatcaagatctggagcctgagcaccttcggcctgctgcacacctttgtgtctgagcacgcccggcagagcatcttcagaaatattggaactggagtgatgcagatcgagaccggccctgccaaccacatcttcagctgtggggctgatggcaccatgaagatgaggatcctgcctgaccagttcagccccctgaatgaggtgctgaagaatgatgtgaagttcatgctgtag

SEQ ID NO: 156854 - DNA, 9084 bp, Artificial Sequence
  derived and/or modified sequence
atgaacctgcaccaggtgctgaccggcgccgtgaaccccggcgaccactgcttttctgtgggcagcataggcgaccagagatttactgcctatgccagtggctgtgacatcgttatccttggctctgatttcgaaaggctgcagattatcccgggtgccaaacacggaaatattcaagtcggatgcgtcgactgctctatgcagcagggtaaaatcgcagctagttacggcaacgtgatcagcatttttgaacccgtaaaccttccaaagcagaagaagaatctggagttgtacagtcagtggcagaagagtggccagttctttctggaaagcatagcacataatattacctgggacccgacaggttcacgtctgttgacaggttccagctatctgcaactatggtcaaacacgaacttagaaaaaccaacagaagacgagaatctgaacaagaccgatctgaactttggcgactggaaatgtatctggcactgcaagactgcctcccaggtacacctcatgaaatttagccccgacggggagttctttgccacagccggaaaggacgattgtttactgaaggtttggtacaacgtggaaaattggcgcactgcggtgaccagccccgatggctcctcagagaaacagtctcagggcgaaatcgatttctcgttcgtgtaccttgcacaccccagagccgtcaatggcttttcatggaggaagacttctaaatacatgccccgggcctccgtgtgtaatgtcttgctgacatgctgcaaggataacgtttgcagactgtgggtagagacctttttacccaatgactgccttttgtatggcggagattgctctcattggacagagagcattaatttgaccaataacttcaagaggaacgctagctcaaaagagcgcgtccaaaacgctttagaagtgaaccttaggcacttcaggagaggtcgccggagatcacttgccctggtggcccatactggctatctgccacatcagcaggatccgcaccacgtgcacaggaatacgcctctacacgctaacgcgctctgtcactttcatatagctgcctctattaaccccgctacagatatccccttattaccgagcataaccagcctttcactaaatgaaaacgaggagaaaacaggcccctttgtagtgcactggctgaacaataaggagcttcactttacactgagtatggaggtgttccttcaacagttaagaaagtctttcgaacagccaagcagcgaggccagtgtcgaggactccaatcaagccgacgtgaaatccgatgaagagactgacgacggagttgatgatctgaaaattaatccagaaaaaaaggaactgggctgtgacaaaatggtgccaaattctagtttcaccagcctaagcagcgctgctatcgaccatcagattgaggtgttattgagcgagtggagtaagaacgccgacatgcttttttccatccacccgatggatggttctttgcttgtgtggcacgttgactggcttgatgaataccaaccgggaatgtttcggcaagtccaggtgtccttcgttagtagaatccccgtggccttcccgaccggagatgcaaactccctgtgtaagagtattatgatgtatgcttgtaccaagaatgtggatttggccatacagcaaggcaagcagaagccaagcggcctgactaggagtacctcgatgctgatttcatcaggacataataaaagtagtaattctctgaagctatcaatattcacaccaaatgttatgatgattagcaagcacgcagatggctccctgaaccagtggctggtttcctttgccgaggagtcggcgttctctactgtcctgtctattagccataagtcacggtactgcgggcaccggttccacctgaatgaccttgcctgtcattctgttctgcctctattattgaccacttcgcaccataacgccttacggacccccgatgttgacaatcccgaacagccattcgatgccctgaacatcgaagaatgctccttgacccaacagaacaaatccaccgtcgacgtggcttttcaggacccttcagccgtctacagtgaactgatcctttggagggttgaccccgtggggcctctatcctttagcgggggagttagcgaactggcacgtattaattcacttcatgtgagcgcattttccaacgtggcctggttgcccaccctgattccatcatactgcctgggagcctactgtaattccccttctgcctgtttcgtggcgtccgatggtcagtatttgaggctgtacgaggccgtcatcgatgccaaaaaactactgtccgagctaagcaaccccgaaatcagcaaatatgtaggcgaggtcttcaatattgtatcacagcagagcactgcgagaccaggttgtatcattgccctggacccgattaccaaactccacggccgtaagacccagctgttgcatgtgttcgaagaagattttatcttgaataaccttgagaagaagagccttggtaaagatagcatcttatctaacgcgggaagttcaccgaacggcttttcggaaaaattctacctgattgtcatagagtgtacccaggacaaccggagcctcttacacatgtggaaccttcacctcaaatctatccctgtgagtctggatgagaaagtggatactaagctgtccgaagctgtttggcagcctgaggaacattacagctctagcccagagaagatcctctcacctttttctcagaaataccaagcttgtcgagcaaacttgcagtcaacatcacggctgacactgttctccgaaatggtatattcacaagaacttcacttacccgaaggggttgaaatcatcagcatcaaaccttctgccggtcacctctctagctcctccatttaccccgcttgcagcgcaccatatctgctggctacatcttgttctgatgagaaggtgcgcttttggagatgccgagtaacagatggcgagtctgcaacctccaagaacgggaagatagacttagcttatatctgggaagagtggccattgctgatcgaggacgggctgcagtcaaattctagcatcacagtccctggtcggccagtagaggtgagctgtgctcatactaatcggctcgcggtcgcatacaagcagcctgccagcaacagcagatctagccaggactttgtgatgcacgtgagcatattcgaatgcgaatccacaggaggatcctgttgggttctcgaacagaccatccacctcgacgaactgtctacagtgctcgatagtggaatctccgtcgattccaatctcgtggcctataataagcaggacatgtacctctcctcaaaagagaatataacgtctaacacaaaacacctcgtacacctcgactggatgtcacgggaggatggctcccatattctgacagtaggcatagggagcaaattgttcatgtacggccccctagccggcaaggtccaggaccagacaggcaaggaaacgttagcattccccctctgggaatcgaccaaagttgttccgctgtctaagttcgtgctgctcaggagtgtcgacctggtgtccagtgtggacggctctccaccattccccgtatctcttagctgggtccgcgatggtattttagtggttgggatggattgcgagatgcacgtttattgtcaatggcaaccctcctccaagcaagagcccgttatcactgactcatactcaggcagtacaccctccataacctccctcataaagcagtccaattcctcttccggcctgcacccaccaaagaaaaccctgactcgatcaatgacatcactggcccagaaaatttgcggcaagaagaccgcttttgatccttccgtcgacatggaggattctggactgttcgaggccgcacatgtgctgtcccctaccttgcctcagtaccatcccttacagctgctggagctgatggatctggggaaggtgcggagggctaaggcaatactcagccatcttgtgaagtgcatcgctggagaagtcgtggccctgaacgaggccgagtcgaaccatgagcgccgcctgagatctcttacgattagcgcctctggttctaccacccgggatcctcaggcattcaataaagccgaaaacacagattacactgaaattgacagtgtgcccccgctccctctgtatgccctactggccgcagacgacgattcctgctattcatcacttgagaaatcatccaatgaatccacactgtccaagtccaatcaattatcaaaggaatcttatgatgagctgttccagacccagctcctgatgaccgacacacacatgttggagactgacgaagagaatactaaaccacgggttattgatctgagccagtacagccctacctattttggtcccgaacacgcacaggtcctatccgggcacctcctgcattcttctctcccgggcctcagccgaatggaacaaatgtcactcatggccctcgccgacaccattgccaccacgagcacggacatcggcgagagccgggacagatcacagggcggtgaaacactagacgagtgtggactgaagttcctgctagctgttagactgcacacttttctgactactagcctccctgcttatagggcacaacttctacatcaggggctttctacctcccacttcgcgtgggcttttcactcggtggcggaggaagagctactgaatatgctccccgcaatgcagaaggacgatcccacctggagcgaactgagagccatgggagtgggttggtgggtgcgaaacactcggattcttcgtaagtgcatcgagaaggtggcgaaagccgcgttttacagaaaaaacgatcccctagatgccgccatattttatcttgcgatgaagaaaaaggcagtaatttggggactgtacagggctgagaagaatacacggatgacacagttcttcggacacaatttcgaagatgaacgctggaggaaagctgcgcttaagaacgccttcagcctcctggggaagcaacgattcgagcactccgcagccttctttctgttggccggctgcttgagagacgccatcgaggtctgccttgagaaactgaatgatatccagttggcccttgtgatcgctcgactctatgagtctgagttcgatacttctgctgcttataaaagtatactcagaaagaaagtcctagggattgattcccctgtgtctgaactgtgctccctcaacatcaacatgcatcatgatccgttcctgagaagcatggcgtattggatcctggaagactactcaggcgccctggaaaccctgatcaaacagcccatccgagagaacgatgatcaagtgctatcagcatctaaccccaccgtgttcaacttctataattacctgcggacacaccctctcctcctgcgtagacattttggcagctcggacaccttttccacccatatgagcctgactggcaaaagtggcctcgccggaactataaacttgtctgaacggcggttattcttcactactgcctcggcccacctaaaagccgggtgcccaatgttagcgctggaggtgctctccaaaatgccgaaagtgattaaaaagacccgccctttttacagagcaagttcctttctggacacttcaaaggattgttccccgagctcgccactgaagctggacgcaagagaggataaatcttcagccgtagactggtcccaatcactgattaatggatttggaagctctagcgaaggttcttccgagaagcagagcaactcaactctgtctttcgactggagtcaaccctccgtggtttttcaagacgacagcctcgaactcaagtgggactccgacaatgacgaagagaatgaggacgtgcccatcagcatgaaagagctcaagcccctgcagcggaagactgataagaagttagatgacatctcttcaaactacacggaaagtttttctaccctcgatgaaaatgacttgcttaatccctccgaggatatcattgctgtccagctaaagttccgggcatgtttgaagatcttgactgtcgaactcaggacactcagtaccggctacgaaatcgatggtgggaaactcaggtaccagctgtaccactggctggagaaggaagtgatcgccctccagcgcacgtgtgatttttgcagcgacgcagaggagctccaatcagcctttgggaggaacgaggatgagtttggattaaacgaagacgcagaagacctgccccatcaaaccaaggtaaaacagctgagggagaacttccaagagaaacgtcaatggttgctgaagtaccagtctctgctacgtatgttcctttcttattgtatacttcacggatcacacggaggtggcctcgccagcgttcgcatggagttaattctgcttcttcaggagtcacagcaggaaacgagcgagccgctgtttagcagcccactgagcgagcaaacttccgtacccctgctcttcgcctgcacagcaaatgcaaagacggttgtagcgaatccattacttcacttatcaaatcttacacacgacattctgcatgcaattatcaactttgattcgccaccacatcctgacatccagtctaacaaagtgtatgtaatgcacacactagcagcttcactctcagcctgcatttaccagtgtctctgtggctctcataactattcttcatttcagacgaaccaatttaccggaatggtttatcaaactgtgcttctgccccacagacccagcctgaagaccgggagccttgacgaagctctgacgccgaatacctcgccggcccagtggccagggattacctgcctaattcggctactgaatagtagcggcgaggaagcacagtcgggactgactgtgctcctctgtgagattctgacagctgtctacttgagcctcttcattcatggcctcgcaactcatagttctaatgagctgttcagaatcgtagcccaccctctcaatgaaaaaatgtggtcggctgtgttcggtgggggcgcccacgtgccatcaaaagaacagactcactccaagactctgccagtctcctctctggtggaagagggtgaaaaacaaaacaagcgattccggccgtccaagatgagctgcagagagagtgctcctttgaccccctcctcagcgcctgtgtcacaggagagtctggccgtgaaagaaaagtttatcccgcccgaactcagcatttgggactattttatagccaaaccatttttgcctagctcccagagccgtgctgaatatgactccgaagagagtctggggagtgacgacgatgataatgatgacgacgatgacgttctcgcatccgacttccacctccaagaacattcaaattccaattcctacagttggtctctaatgcgcctggcaatggtgcagctggtgttaaataacctgaagaccttttatccgttcgcggggcacgacctagctgagctgcctgtgagttcacccctgtgccacgctgtgttgaagaccctgcagtgttgggagcaggtactgctgcgccggttggaaatccacggcgggcccccccagaactatatcgcttctcacacagccgaggaaagtcttagcgcaggccccgctatactgcgccacaaggcactcctagagcccaccaacacgccctttaagtctaagcaccacttggctttgagcgtgaaacggctatggcaatacctagtgaaacaggaagagattcaggaaacattcatcaaaaacatcttcactaagaagcggtgcttgaatgaaatcgaggctgatctggggtatcccggagggaaggctcgcattatccacaaggaatctgacattatcaccgcatttgcagtgaataaggctaatagaaattgtattgctatcgctagttcccacgacgtacaagagctggacgtgtctggtattctggccacccaagtttatacctgggtcgacgacgacattgaggttgagactaagggaagcgaggactttctggtgatccatgctcgagatgatctcactgcagtccagggaacaacgccctacacacacagtaaccccggcacacccattaacatgccgtggctcggaagtacccagacaggaaggggtgcttctgttatgatcaaaaaggcaattaataacgtgcgccgaatgacaagccatcctacactgccatactacctgaccggggcccaagatggctccgtgaggatgtttgaatggggacactcacagcaaatcacctgcttccgtagcggaggcaattcccgggtgacacggatgaggttcaattatcaggggaataaatttgggatcgtggatgcagatggctacctcagcctctatcagacaaactggaaatgctgtccagtgacaggcagcatgccaaaaccatatctgacctggcaatgtcacaacaagactgctaatgatttcgtgtttgtgagttcgagcagtctgatagccacggccggtctgtccaccgataatcggaatgtctgcctatgggatactttggtggctcccgccaattcactcgtgcatgcgttcacctgccacgattcaggagccaccgttctcgcttatgccccaaagcatcaactgctcatatctggtggacgaaaaggcttcacttatgtttttgatctctgtcagcgtcaacagagacaattgttccagtcccacgactcccctgtgaaggcggtcgcagtcgaccctaccgaggaatattttgtcaccggtagcgcggaaggcaatattaagatatggagtttgtcgacctttggattgctgcacacgtttgtcagcgagcacgccagacagtccatcttccgcaacatagggaccggggtgatgcagattgagaccggtcccgccaaccatatcttctcctgtggagctgacggcacaatgaaaatgcggatcctccccgaccaatttagccctttgaatgaagttctgaagaatgatgtcaaattcatgctatag

SEQ ID NO: 156855 - DNA, 9084 bp, Artificial Sequence
  derived and/or modified sequence
atgaatctacaccaggttctcacgggagccgtgaatccaggcgatcattgtttttcagtgggctccattggcgatcagaggtttactgcttacgcgtctggctgcgatatagtgatccttggtagtgatttcgagcgcctgcagatcatccctggagctaagcacgggaatatccaggttggatgcgtcgactgcagcatgcagcagggtaagatagccgcttcttatggcaacgtgatctctatttttgagccagtgaacctgccaaaacagaagaagaatctggaactgtacagtcagtggcagaagtcagggcagttttttctagagagtattgcccataatattacgtgggaccctactggaagtcgtctcctgactggctcctcgtatctgcagttgtggtctaataccaatcttgagaagcctaccgaagacgaaaacctaaacaaaaccgatttaaacttcggtgactggaaatgcatctggcactgcaagaccgcctcccaggttcatctgatgaaattcagccccgacggagaattttttgcaaccgccggaaaggatgactgcctgctgaaggtgtggtacaacgttgaaaattggcgaaccgcagtcacgtccccagacggaagttccgaaaagcaaagccagggcgagatcgactttagtttcgtctatctggctcaccccagggccgtgaacggtttcagttggaggaagactagcaagtatatgcctcgagcctccgtttgtaacgtcctgctgacttgctgcaaagacaacgtatgtagactatgggtggaaacctttctacctaatgattgcctcttatacggcggtgattgttctcactggacagaatccatcaacctgaccaacaatttcaagcgcaacgctagctccaaggagcgagtgcagaacgcccttgaggtgaatctacggcacttcagaagggggagacgccgatccttggctttagtcgcacatacaggctacttgccacatcagcaggaccctcaccatgtccatagaaacactccgctgcacgccaacgccctgtgtcacttccacattgcagcgagcatcaatcctgctacagatataccactcctgcccagcatcacttcactcagcctgaacgagaatgaagaaaagacgggcccatttgtagtgcattggctgaataacaaggaactacatttcacccttagcatggaggtgttcctgcagcagctacgtaaaagttttgaacagccgtcgagcgaggcctccgtcgaagactctaatcaggccgacgtgaaatcggatgaagagacagatgacggtgtggatgatttaaagatcaatcccgagaaaaaagagttgggctgtgacaagatggtgcccaattcaagcttcacgtctctgtcgagcgctgcaattgaccaccagattgaggtactcttgtctgagtggtcaaagaatgccgacatgctgtttagcatccatcctatggacggcagccttctggtatggcacgtggactggttagacgagtaccagcctgggatgtttcgccaggtgcaggtgtcctttgtgagccggattccggtggcttttcccaccggcgatgctaacagtctgtgcaaatcaattatgatgtacgcatgcacgaaaaacgtggaccttgcaattcaacagggcaaacagaaacctagcggcctaacacgctccacctccatgttaatctccagcggccataacaaaagtagcaatagcctcaaattgtctatcttcacacccaacgtcatgatgatcagcaaacatgctgacggtagcctgaatcaatggcttgtgtcttttgcggaggaatctgccttcagtacggtgctttcaattagccacaaatccaggtattgtggacaccgattccacctgaacgacctcgcctgccactcagtgctgccactactcttaacaacgagtcaccacaatgccctgcgaacacccgatgtggacaatccagaacaaccctttgacgcccttaatattgaagaatgctctttaacccagcagaataagagtacggtggacgtcgcctttcaagacccgtccgcagtgtattcagagctgattctctggcgggtagacccagtaggccctttaagcttctcgggtggagtttctgaactcgccaggatcaactctttacatgtctcagcattctcaaatgtcgcttggttgccaaccctgattccatcatattgcctgggggcttactgcaattcccctagtgcgtgctttgtcgccagtgatggacagtatttaaggctctatgaggcagtcattgacgctaaaaaactcctatcagagctgtcaaatcccgagatcagtaagtatgtgggagaggtgtttaacatcgtgtcccaacagtctactgcccgtccaggatgcatcatagccctggatcccattaccaagctgcacgggaggaaaacacagcttctgcatgtttttgaggaggactttatattgaataaccttgagaagaaatcactgggaaaagactctatcctctcgaacgcaggaagctcacctaacggcttttctgagaagttttatttgattgtgatcgagtgcacacaagataacagatcccttctgcacatgtggaaccttcacctcaaatcaattccagttagtctcgatgaaaaggtcgatacaaagctttccgaagctgtttggcaaccagaagagcactactccagctctcctgaaaagattctgtcgcccttcagtcagaagtaccaggcttgcagggccaatttgcaatctaccagcaggttgacattgtttagtgagatggtgtattcacaggaattgcatctcccagagggcgttgaaatcatttctatcaaaccctccgccggacacctgagctcctcgtccatttatcccgcttgttccgccccttacctgctggctacttcttgcagcgatgaaaaggtaagattctggcgatgtcgggtcacagatggcgaatctgcgacatccaaaaatggtaaaattgacctagcttacatctgggaggagtggcctctgctgatcgaagacgggctccagtcgaattcctctattaccgttccgggacggcctgtggaggtgtcctgcgcccatacgaacagactggctgttgcatacaagcagccagcaagtaactcgcggtcctcacaggatttcgtcatgcacgtatctatcttcgaatgtgaatcgaccggcggatcctgttgggtcctagagcagaccatacacctggatgagctatcaaccgtgctagattccggaattagcgtggactcgaatctagtcgcttacaataagcaggatatgtacttgtcgtctaaagaaaacattaccagtaataccaagcacctagtgcacctggactggatgtccagggaagatggttctcacatcctcacagttggcatcggcagcaagctgttcatgtatgggccactggctggtaaagtgcaagatcagactggaaaggaaacactagcctttccactgtgggaaagtacaaaagtcgtgcccttgtcaaagtttgtgctccttaggagcgtggacctcgtgtccagtgttgatggctcacccccttttccagtctccctgagctgggtcagggatgggatccttgtagttggcatggactgcgaaatgcacgtgtactgccagtggcaaccatcatctaaacaggagccggtcatcactgacagttatagtggctccacccccagcatcacctccctcataaagcagtcgaattcatcttcagggctgcatccaccaaagaaaactttgaccagatctatgacctccctggcgcaaaagatctgcgggaagaagacagcatttgaccccagtgtcgacatggaggacagcggattgtttgaggccgctcatgtgctgagtccaacactgcctcagtatcacccactgcagctgctcgaactaatggatttgggaaaggttcgacgcgcaaaggctatcttgagccacttggttaaatgtatagccggtgaagtggtagcactgaatgaggctgagtcgaatcatgagcgtcgactcaggagtctgactatctccgctagtggcagcacaaccagagaccctcaggcatttaacaaggcggagaacaccgattacaccgaaatcgattccgttccacccctgccattgtacgcgttactagccgcagatgacgactcatgctattcatcactggaaaagtcgtccaacgagtcaaccctgtccaaatcaaaccagctgtcgaaggagtcatatgacgagctgttccagacccagctgctgatgaccgacacacacatgctcgaaacagacgaggaaaacacaaagccacgtgtaattgatctcagccagtatagtcctacatacttcggccctgagcacgcgcaggtgttgagcggtcacctgctgcatagctcattacctggactcagccgcatggagcagatgagtctgatggctctggctgacaccatcgctacgacttccacagatatcggtgaatctcgcgacaggagtcaagggggagaaacactggatgagtgtggactgaagttcctcctcgctgtgaggttgcatacatttctcacaactagtctacctgcataccgagctcagctcctccaccaaggtctcagcaccagccatttcgcctgggcatttcactccgtggcagaggaggagctgcttaatatgctaccagcaatgcagaaagatgaccctacctggtctgagttgagagctatgggcgtaggctggtgggtgcgaaacaccaggattctgcgcaaatgtatcgaaaaagtagctaaagcggcattctacaggaaaaacgacccactcgatgcggcaatcttctacctggcaatgaaaaaaaaagccgtaatctggggactgtaccgtgcggagaaaaacaccaggatgacccaattttttggccataattttgaggatgaacgctggcgcaaagccgctttgaagaacgccttctctctcctcggtaagcagcgctttgaacattctgcagcttttttcctcctcgccggttgtcttagagatgcgattgaggtctgcctcgaaaagctcaacgacattcagctggccctggtgatcgccagactgtacgagtccgagttcgatacgtcagccgcttataagagcatcttgcggaaaaaggtacttgggattgactccccagtcagcgagctgtgttcccttaatattaatatgcaccacgacccatttttgaggtcaatggcttattggattctcgaagactatagcggcgctttggaaacactcatcaaacagccaatacgggagaatgacgaccaggtgttatcagcttctaacccaacagtgttcaacttttataattacttgcgcacccaccccctgctcctgaggcggcacttcggttcctcagacacatttagcactcatatgtctctgaccgggaagagcggactggccggaacaattaacctcagcgagcggcgtttattttttaccacagcttccgctcacctcaaggccggatgtcctatgctggcactggaggtcttgtccaagatgcccaaagtgataaagaagactaggccgttctaccgcgctagctccttcctggatacttcgaaagattgttcaccaagctctcccttaaagctcgatgcaagggaagacaaatcctccgctgtagactggagccagagcttaatcaacggcttcggttcctcttcagagggttccagtgaaaagcaaagtaatagcaccctttctttcgattggtcccagccatcagtagtctttcaagatgattcactggagttgaagtgggatagcgacaatgatgaggagaatgaggacgtgcctatttccatgaaggagctgaaaccactgcagaggaagactgacaaaaagttggatgacattagcagcaattatacagaatcgttcagcaccctggacgagaatgaccttctaaatccctctgaggatatcatcgctgtgcaattgaagtttagagcatgcctgaagatcctgacagttgaactgcgaaccctatctacaggatatgagatcgatggcggaaaattaagatatcaactctaccactggctggaaaaggaagtgatagctcttcagcgaacttgtgacttctgttcggatgcagaagagctgcagtcagcctttggcaggaacgaggatgaattcggtctgaacgaagacgccgaagatttgcctcatcaaaccaaggtgaagcagctacgcgagaactttcaggagaagaggcaatggctcctgaaataccagtccctgctacggatgtttctcagctactgcatcttacacggtagtcatggaggtggcctcgctagtgtgcggatggagctgattctcctactccaggagtcgcagcaggagaccagcgagcctctgttctcttctcccctgtccgagcagacctcagtgccattgctgttcgcgtgcacagcgaatgccaagactgtggtagctaatccactactacacttgtctaatctgactcatgacattctgcacgctattattaactttgactcaccaccccatccagatattcagagcaacaaagtctacgttatgcataccctggcagctagcctctcagcctgtatctatcagtgcctgtgtggcagccacaactattccagcttccaaaccaaccagtttaccggtatggtgtatcagactgtccttttgccccacagaccatccctgaaaactggaagcctcgatgaggccctgacaccaaatacaagtccggcacaatggccgggtatcacttgtctcatcagactcctgaactcctcaggcgaagaagctcagagtggtctcaccgttctgctgtgcgagatccttactgcggtgtacctttccttgtttatacatggcctggccacccattcaagcaacgagctatttcgcatcgttgcgcacccactgaatgagaagatgtggtcggccgtctttggtggaggagcccacgtccccagcaaggaacagacgcacagcaaaacactgccggtctccagtctggtggaagaaggcgagaagcagaacaagcgattccgaccctctaagatgtcatgtagagagagcgctcctctgactccttcctctgcccctgtgagccaggagtccctggcagtgaaagagaagttcatcccaccagaactgtctatctgggactatttcattgcgaagcccttcctcccatcctcccaatctagagccgagtatgactctgaagagtcgctgggaagtgatgatgacgataacgacgacgatgacgatgtccttgcaagcgactttcatctacaggagcactccaactccaattcttacagctggagcctgatgcggctggccatggttcagctagtcctcaataacctgaagacattctacccattcgctggtcacgacctggctgagctgccggtaagctcaccgctctgtcatgctgtcctgaagacactgcagtgctgggagcaggttctgcttcggcgattagagatacacggtggacctccccagaactacatagcctcgcacacagccgaggaatctctgtccgccggacccgcaatcctacggcataaggcccttctggagcccactaacactccctttaaatcgaagcaccatctcgccttgagcgtgaagcgactgtggcaatatctggtgaagcaggaggaaatccaagagactttcataaaaaatatttttactaaaaagcggtgccttaatgaaattgaggcggacctgggttatccagggggaaaagccaggatcatccataaagaaagcgacattataaccgcctttgccgtcaacaaagccaatagaaactgtatcgccatagcttcctctcacgacgtacaagagctagacgtcagcggcatcttggccacgcaggtgtatacctgggttgacgacgacatcgaggtcgagacaaagggctccgaggattttctggttatccatgcccgtgacgacctgaccgctgtacaggggacaaccccttacacacactcaaaccctggcacacctattaatatgccttggcttggaagcacacagaccgggagaggcgctagcgtgatgattaaaaaggctattaataatgttagaaggatgacctcacatccaacactcccatactatctaactggggctcaggacggatccgtcaggatgtttgaatggggtcatagccagcagattacttgcttccgctcaggaggcaacagccgagtcactaggatgagattcaattatcagggcaacaagttcggaattgttgatgcagacgggtatctgtctctgtaccagacaaactggaaatgttgcccagtcacaggatcaatgccaaagccttacctgacctggcagtgccacaataaaacggctaatgacttcgttttcgtcagctcctccagtttgatagccaccgccggactgtcgaccgataatagaaacgtgtgtctgtgggacaccctggtagccccagccaacagcttggtgcacgccttcacctgccacgatagcggcgcaacagtgctggcctacgctcccaaacaccagttgttaattagcgggggacggaagggtttcacttacgtcttcgacttatgccagcgccaacagcgtcaactgttccaatctcacgattcccccgtcaaggctgttgcggtagaccccactgaagagtattttgtgactggctctgccgagggaaacataaagatctggtcattatctacctttgggctcctgcacacattcgtctccgagcatgctcgccagtccatcttcagaaacatagggactggggtcatgcaaatcgaaaccggacctgccaatcatattttcagttgcggcgctgacggtacgatgaaaatgcggatcctccctgatcagttctcaccgctgaacgaagtcttgaagaatgacgttaagttcatgctgtat

SEQ ID NO: 156856 - DNA, 9084 bp, Artificial Sequence
  derived and/or modified sequence
atgaacctgcaccaggtgctgaccggcgccgtgaaccccggcgaccactgcttcagcgtgggcagcatcggcgaccagagattcaccgcctacgccagcggctgcgacatcgtgatcctgggcagcgacttcgagagactgcagatcatccccggcgccaagcacggcaacatccaggtgggctgcgtggactgcagcatgcagcagggcaagatcgccgccagctacggcaacgtgatcagcatcttcgagcccgtgaacctgcccaagcagaagaagaacctggagctgtacagccagtggcagaagagcggccagttcttcctggagagcatcgcccacaacatcacctgggaccccaccggcagcagactgctgaccggcagcagctacctgcagctgtggagcaacaccaacctggagaagcccaccgaggacgagaacctgaacaagaccgacctgaacttcggcgactggaagtgcatctggcactgcaagaccgccagccaggtgcacctgatgaagttcagccccgacggcgagttcttcgccaccgccggcaaggacgactgcctgctgaaggtgtggtacaacgtggagaactggagaaccgccgtgaccagccccgacggcagcagcgagaagcagagccagggcgagatcgacttcagcttcgtgtacctggcccaccccagagccgtgaacggcttcagctggagaaagaccagcaagtacatgcccagagccagcgtgtgcaacgtgctgctgacctgctgcaaggacaacgtgtgcagactgtgggtggagaccttcctgcccaacgactgcctgctgtacggcggcgactgcagccactggaccgagagcatcaacctgaccaacaacttcaagagaaacgccagcagcaaggagagagtgcagaacgccctggaggtgaacctgagacacttcagaagaggcagaagaagaagcctggccctggtggcccacaccggctacctgccccaccagcaggacccccaccacgtgcacagaaacacccccctgcacgccaacgccctgtgccacttccacatcgccgccagcatcaaccccgccaccgacatccccctgctgcccagcatcaccagcctgagcctgaacgagaacgaggagaagaccggccccttcgtggtgcactggctgaacaacaaggagctgcacttcaccctgagcatggaggtgttcctgcagcagctgagaaagagcttcgagcagcccagcagcgaggccagcgtggaggacagcaaccaggccgacgtgaagagcgacgaggagaccgacgacggcgtggacgacctgaagatcaaccccgagaagaaggagctgggctgcgacaagatggtgcccaacagcagcttcaccagcctgagcagcgccgccatcgaccaccagatcgaggtgctgctgagcgagtggagcaagaacgccgacatgctgttcagcatccaccccatggacggcagcctgctggtgtggcacgtggactggctggacgagtaccagcccggcatgttcagacaggtgcaggtgagcttcgtgagcagaatccccgtggccttccccaccggcgacgccaacagcctgtgcaagagcatcatgatgtacgcctgcaccaagaacgtggacctggccatccagcagggcaagcagaagcccagcggcctgaccagaagcaccagcatgctgatcagcagcggccacaacaagagcagcaacagcctgaagctgagcatcttcacccccaacgtgatgatgatcagcaagcacgccgacggcagcctgaaccagtggctggtgagcttcgccgaggagagcgccttcagcaccgtgctgagcatcagccacaagagcagatactgcggccacagattccacctgaacgacctggcctgccacagcgtgctgcccctgctgctgaccaccagccaccacaacgccctgagaacccccgacgtggacaaccccgagcagcccttcgacgccctgaacatcgaggagtgcagcctgacccagcagaacaagagcaccgtggacgtggccttccaggaccccagcgccgtgtacagcgagctgatcctgtggagagtggaccccgtgggccccctgagcttcagcggcggcgtgagcgagctggccagaatcaacagcctgcacgtgagcgccttcagcaacgtggcctggctgcccaccctgatccccagctactgcctgggcgcctactgcaacagccccagcgcctgcttcgtggccagcgacggccagtacctgagactgtacgaggccgtgatcgacgccaagaagctgctgagcgagctgagcaaccccgagatcagcaagtacgtgggcgaggtgttcaacatcgtgagccagcagagcaccgccagacccggctgcatcatcgccctggaccccatcaccaagctgcacggcagaaagacccagctgctgcacgtgttcgaggaggacttcatcctgaacaacctggagaagaagagcctgggcaaggacagcatcctgagcaacgccggcagcagccccaacggcttcagcgagaagttctacctgatcgtgatcgagtgcacccaggacaacagaagcctgctgcacatgtggaacctgcacctgaagagcatccccgtgagcctggacgagaaggtggacaccaagctgagcgaggccgtgtggcagcccgaggagcactacagcagcagccccgagaagatcctgagccccttcagccagaagtaccaggcctgcagagccaacctgcagagcaccagcagactgaccctgttcagcgagatggtgtacagccaggagctgcacctgcccgagggcgtggagatcatcagcatcaagcccagcgccggccacctgagcagcagcagcatctaccccgcctgcagcgccccctacctgctggccaccagctgcagcgacgagaaggtgagattctggagatgcagagtgaccgacggcgagagcgccaccagcaagaacggcaagatcgacctggcctacatctgggaggagtggcccctgctgatcgaggacggcctgcagagcaacagcagcatcaccgtgcccggcagacccgtggaggtgagctgcgcccacaccaacagactggccgtggcctacaagcagcccgccagcaacagcagaagcagccaggacttcgtgatgcacgtgagcatcttcgagtgcgagagcaccggcggcagctgctgggtgctggagcagaccatccacctggacgagctgagcaccgtgctggacagcggcatcagcgtggacagcaacctggtggcctacaacaagcaggacatgtacctgagcagcaaggagaacatcaccagcaacaccaagcacctggtgcacctggactggatgagcagagaggacggcagccacatcctgaccgtgggcatcggcagcaagctgttcatgtacggccccctggccggcaaggtgcaggaccagaccggcaaggagaccctggccttccccctgtgggagagcaccaaggtggtgcccctgagcaagttcgtgctgctgagaagcgtggacctggtgagcagcgtggacggcagcccccccttccccgtgagcctgagctgggtgagagacggcatcctggtggtgggcatggactgcgagatgcacgtgtactgccagtggcagcccagcagcaagcaggagcccgtgatcaccgacagctacagcggcagcacccccagcatcaccagcctgatcaagcagagcaacagcagcagcggcctgcacccccccaagaagaccctgaccagaagcatgaccagcctggcccagaagatctgcggcaagaagaccgccttcgaccccagcgtggacatggaggacagcggcctgttcgaggccgcccacgtgctgagccccaccctgccccagtaccaccccctgcagctgctggagctgatggacctgggcaaggtgagaagagccaaggccatcctgagccacctggtgaagtgcatcgccggcgaggtggtggccctgaacgaggccgagagcaaccacgagagaagactgagaagcctgaccatcagcgccagcggcagcaccaccagagacccccaggccttcaacaaggccgagaacaccgactacaccgagatcgacagcgtgccccccctgcccctgtacgccctgctggccgccgacgacgacagctgctacagcagcctggagaagagcagcaacgagagcaccctgagcaagagcaaccagctgagcaaggagagctacgacgagctgttccagacccagctgctgatgaccgacacccacatgctggagaccgacgaggagaacaccaagcccagagtgatcgacctgagccagtacagccccacctacttcggccccgagcacgcccaggtgctgagcggccacctgctgcacagcagcctgcccggcctgagcagaatggagcagatgagcctgatggccctggccgacaccatcgccaccaccagcaccgacatcggcgagagcagagacagaagccagggcggcgagaccctggacgagtgcggcctgaagttcctgctggccgtgagactgcacaccttcctgaccaccagcctgcccgcctacagagcccagctgctgcaccagggcctgagcaccagccacttcgcctgggccttccacagcgtggccgaggaggagctgctgaacatgctgcccgccatgcagaaggacgaccccacctggagcgagctgagagccatgggcgtgggctggtgggtgagaaacaccagaatcctgagaaagtgcatcgagaaggtggccaaggccgccttctacagaaagaacgaccccctggacgccgccatcttctacctggccatgaagaagaaggccgtgatctggggcctgtacagagccgagaagaacaccagaatgacccagttcttcggccacaacttcgaggacgagagatggagaaaggccgccctgaagaacgccttcagcctgctgggcaagcagagattcgagcacagcgccgccttcttcctgctggccggctgcctgagagacgccatcgaggtgtgcctggagaagctgaacgacatccagctggccctggtgatcgccagactgtacgagagcgagttcgacaccagcgccgcctacaagagcatcctgagaaagaaggtgctgggcatcgacagccccgtgagcgagctgtgcagcctgaacatcaacatgcaccacgaccccttcctgagaagcatggcctactggatcctggaggactacagcggcgccctggagaccctgatcaagcagcccatcagagagaacgacgaccaggtgctgagcgccagcaaccccaccgtgttcaacttctacaactacctgagaacccaccccctgctgctgagaagacacttcggcagcagcgacaccttcagcacccacatgagcctgaccggcaagagcggcctggccggcaccatcaacctgagcgagagaagactgttcttcaccaccgccagcgcccacctgaaggccggctgccccatgctggccctggaggtgctgagcaagatgcccaaggtgatcaagaagaccagacccttctacagagccagcagcttcctggacaccagcaaggactgcagccccagcagccccctgaagctggacgccagagaggacaagagcagcgccgtggactggagccagagcctgatcaacggcttcggcagcagcagcgagggcagcagcgagaagcagagcaacagcaccctgagcttcgactggagccagcccagcgtggtgttccaggacgacagcctggagctgaagtgggacagcgacaacgacgaggagaacgaggacgtgcccatcagcatgaaggagctgaagcccctgcagagaaagaccgacaagaagctggacgacatcagcagcaactacaccgagagcttcagcaccctggacgagaacgacctgctgaaccccagcgaggacatcatcgccgtgcagctgaagttcagagcctgcctgaagatcctgaccgtggagctgagaaccctgagcaccggctacgagatcgacggcggcaagctgagataccagctgtaccactggctggagaaggaggtgatcgccctgcagagaacctgcgacttctgcagcgacgccgaggagctgcagagcgccttcggcagaaacgaggacgagttcggcctgaacgaggacgccgaggacctgccccaccagaccaaggtgaagcagctgagagagaacttccaggagaagagacagtggctgctgaagtaccagagcctgctgagaatgttcctgagctactgcatcctgcacggcagccacggcggcggcctggccagcgtgagaatggagctgatcctgctgctgcaggagagccagcaggagaccagcgagcccctgttcagcagccccctgagcgagcagaccagcgtgcccctgctgttcgcctgcaccgccaacgccaagaccgtggtggccaaccccctgctgcacctgagcaacctgacccacgacatcctgcacgccatcatcaacttcgacagccccccccaccccgacatccagagcaacaaggtgtacgtgatgcacaccctggccgccagcctgagcgcctgcatctaccagtgcctgtgcggcagccacaactacagcagcttccagaccaaccagttcaccggcatggtgtaccagaccgtgctgctgccccacagacccagcctgaagaccggcagcctggacgaggccctgacccccaacaccagccccgcccagtggcccggcatcacctgcctgatcagactgctgaacagcagcggcgaggaggcccagagcggcctgaccgtgctgctgtgcgagatcctgaccgccgtgtacctgagcctgttcatccacggcctggccacccacagcagcaacgagctgttcagaatcgtggcccaccccctgaacgagaagatgtggagcgccgtgttcggcggcggcgcccacgtgcccagcaaggagcagacccacagcaagaccctgcccgtgagcagcctggtggaggagggcgagaagcagaacaagagattcagacccagcaagatgagctgcagagagagcgcccccctgacccccagcagcgcccccgtgagccaggagagcctggccgtgaaggagaagttcatcccccccgagctgagcatctgggactacttcatcgccaagcccttcctgcccagcagccagagcagagccgagtacgacagcgaggagagcctgggcagcgacgacgacgacaacgacgacgacgacgacgtgctggccagcgacttccacctgcaggagcacagcaacagcaacagctacagctggagcctgatgagactggccatggtgcagctggtgctgaacaacctgaagaccttctaccccttcgccggccacgacctggccgagctgcccgtgagcagccccctgtgccacgccgtgctgaagaccctgcagtgctgggagcaggtgctgctgagaagactggagatccacggcggccccccccagaactacatcgccagccacaccgccgaggagagcctgagcgccggccccgccatcctgagacacaaggccctgctggagcccaccaacacccccttcaagagcaagcaccacctggccctgagcgtgaagagactgtggcagtacctggtgaagcaggaggagatccaggagaccttcatcaagaacatcttcaccaagaagagatgcctgaacgagatcgaggccgacctgggctaccccggcggcaaggccagaatcatccacaaggagagcgacatcatcaccgccttcgccgtgaacaaggccaacagaaactgcatcgccatcgccagcagccacgacgtgcaggagctggacgtgagcggcatcctggccacccaggtgtacacctgggtggacgacgacatcgaggtggagaccaagggcagcgaggacttcctggtgatccacgccagagacgacctgaccgccgtgcagggcaccaccccctacacccacagcaaccccggcacccccatcaacatgccctggctgggcagcacccagaccggcagaggcgccagcgtgatgatcaagaaggccatcaacaacgtgagaagaatgaccagccaccccaccctgccctactacctgaccggcgcccaggacggcagcgtgagaatgttcgagtggggccacagccagcagatcacctgcttcagaagcggcggcaacagcagagtgaccagaatgagattcaactaccagggcaacaagttcggcatcgtggacgccgacggctacctgagcctgtaccagaccaactggaagtgctgccccgtgaccggcagcatgcccaagccctacctgacctggcagtgccacaacaagaccgccaacgacttcgtgttcgtgagcagcagcagcctgatcgccaccgccggcctgagcaccgacaacagaaacgtgtgcctgtgggacaccctggtggcccccgccaacagcctggtgcacgccttcacctgccacgacagcggcgccaccgtgctggcctacgcccccaagcaccagctgctgatcagcggcggcagaaagggcttcacctacgtgttcgacctgtgccagagacagcagagacagctgttccagagccacgacagccccgtgaaggccgtggccgtggaccccaccgaggagtacttcgtgaccggcagcgccgagggcaacatcaagatctggagcctgagcaccttcggcctgctgcacaccttcgtgagcgagcacgccagacagagcatcttcagaaacatcggcaccggcgtgatgcagatcgagaccggccccgccaaccacatcttcagctgcggcgccgacggcaccatgaagatgagaatcctgcccgaccagttcagccccctgaacgaggtgctgaagaacgacgtgaagttcatgctgtag

SEQ ID NO: 156857 - DNA, 11072 bp, Artificial Sequence
  derived and/or modified sequence
gagggaaggagggagggaagcagccgctgacccgtggcatgagctggatgcggtgtccgttgcaggactagggcgccgacatgaacctgcaccaggtgctgaccggggctgtgaaccctggcgaccactgcttctccgtgggcagcattggcgaccagcgcttcacggcttatgcatctggatgtgacattgtaatactgggaagcgattttgaaagattacagataatcccaggagctaaacatggaaatattcaagtgggatgtgtagactgttcaatgcaacaaggcaagattgcagcgtcttatggaaatgttatctccatttttgaaccagttaacctaccaaaacaaaagaaaaatttggaattatatagtcagtggcagaaaagtggccaattttttctggaatcaatagcacacaatataacctgggatcccacaggcagtcgtcttttaactggttccagctatttgcaactctggtccaatactaacttggagaagccaactgaagatgaaaatttaaataaaacagatcttaactttggagattggaaatgcatttggcattgcaaaactgcttcccaagttcatttaatgaaattttcaccagatggagaattttttgccactgctgggaaggatgactgtcttttgaaggtttggtataatgtagaaaactggcggacagctgttacttctccagatggaagttcagaaaaacaatcccaaggagaaattgacttttcttttgtgtatctggcccatcctcgagcagtaaatggattttcctggcgtaaaacaagcaaatatatgcctagggcttctgtatgtaatgtactgttgacttgctgcaaagataatgtgtgtcgtctttgggtagagacatttttaccaaatgattgtttgctatacggaggtgactgcagccattggactgaatcaattaatttaacaaataacttcaagagaaatgcttccagtaaagaacgagttcaaaatgctttagaagtaaatctgagacattttcgtagaggtcggaggagatcacttgctcttgtagcacatacgggatatctaccacatcagcaggatcctcatcatgttcacaggaacactccactgcatgccaatgcactttgccactttcatattgcagccagcatcaacccagccacagacattccacttcttccatctattacatctctgagtctaaatgaaaatgaagagaagaccggaccttttgttgtacactggctaaacaataaagaactgcattttactttgtccatggaagtttttttacagcaacttagaaaaagttttgaacaaccatcttctgaggccagtgtagaagattctaatcaggcagatgtaaaatctgatgaagaaactgatgatggtgttgatgatctgaaaataaatcccgaaaagaaggaattaggctgtgataaaatggtaccaaactcaagttttacatcattatcgtcagctgccattgatcatcagattgaagtacttctgtctgaatggagtaaaaatgcagatatgctatttagtattcatcccatggatggttctttgctagtttggcatgtggattggctggatgaataccagcctggtatgtttcgtcaagtacaggtgtcctttgtttccagaattccagtagctttccccacaggtgatgcaaactctctctgtaaaagcataatgatgtatgcctgtaccaagaatgttgacttggctattcagcaggggaaacaaaaaccttctggcctcacccgttccacatcaatgcttatttcttctggtcacaataaatcatctaatagtttaaaattaagtatttttacgcctaatgttatgatgatatcaaaacatgctgatggttctctgaatcagtggctggtcagttttgccgaggaatctgctttttctactgttctcagtatttcccacaaatccagatattgtggtcatcgttttcatcttaatgatttagcttgccactcagtattaccattattgctgacaacatcacaccataatgcattaaggacaccagatgttgataacccagagcaaccttttgatgctctaaatattgaagaatgctctttgacacaacaaaataaaagcactgttgacgtggcatttcaggatcccagtgcagtttacagtgagcttattctgtggagggttgacccagttgggccattgtctttttctggaggagtttctgagcttgcccggattaattctcttcatgtttctgccttttccaatgtggcatggctgcccactcttatacccagttattgtctgggtgcatactgcaactctcctagtgcatgctttgtagccagtgatggacaatatctgagattatatgaagcagttattgatgctaagaaacttttatctgagctttctaaccctgaaatttctaaatatgttggtgaagtctttaacatcgtcagtcaacaatcaacagccaggccaggatgcattattgcattagatcccattaccaaacttcatggcagaaaaacccaactgcttcatgtttttgaagaagacttcattttgaataaccttgagaagaaaagccttggcaaagacagcattttatctaatgcaggcagctcacctaatggattttctgagaagttctacctaattgtaatagaatgcactcaagacaaccgttcactgttacacatgtggaatttacatctaaagtcaattcctgtctcattagatgaaaaagtagatacaaaattatccgaagcggtttggcagccagaagaacattattcttcttctccagagaagatcctatctcctttttcacaaaagtatcaggcttgcagagcaaatctccagagtaccagcaggttgactctgttttcagaaatggtttatagccaagaattgcatttaccagaaggagttgagataataagtattaagccatcagcaggacatctgagttcatcttctatatatcctgcatgcagtgctccttatttattggcaacttcatgttcagatgagaaagtaagattctggagatgcagagtaacagatggagaatctgccacgtcaaagaatggaaaaattgatcttgcatacatttgggaagaatggccattacttattgaagatggacttcagagcaatagtagtataactgtacctggtaggcctgtagaagttagctgtgcacatacaaatcgtttagcagtagcttataagcagcctgcatctaatagtagatcttcccaggactttgtgatgcatgtaagtatttttgaatgtgagtcaacaggaggttcatgttgggtccttgagcagacaattcatttagatgagttaagcacagtattggattctggcattagtgttgatagcaatttagtggcctataataaacaagacatgtatttatctagtaaagagaatatcacatcaaacacaaagcatttagttcacttagattggatgtctagagaagacggttctcatatcctgactgtaggaattggatcaaaactttttatgtatggacccctggctggcaaggtacaagaccaaactggtaaggaaaccctggcatttcctctctgggagagtaccaaagttgtgcccctttctaaatttgtactattacgaagtgtggacctagtttcttctgtagatggctccccaccttttcctgtttctttatcgtgggtccgggatggcatccttgtggtaggaatggactgtgaaatgcatgtgtattgccaatggcaaccatcttctaaacaagaacctgttataacagattcgtacagtgggagcactccatctataacaagtttaataaaacagagtaactccagttctgggttacatcctccaaagaaaactctgactcgatccatgaccagtcttgcacagaaaatctgtggaaagaaaactgcattcgatccttcagtggatatggaagattcaggtctttttgaagcagctcatgtactttccccgactctacctcagtatcatcccttgcagcttttggaactcatggatcttggtaaagttcggagagccaaggccatcttgtcccatcttgttaagtgcattgctggggaagttgtggctctgaatgaagctgaatctaatcatgaacgccgccttaggtctctcacaatcagtgctagtggaagcactaccagagacccccaggcattcaacaaggctgaaaatacagattacacagaaatagattctgttcctccacttcctttatatgccttacttgcagcagatgatgatagctgttactcatctttggagaaatctagtaatgagagtacgttaagtaaatcaaaccaattatctaaagaaagttatgatgagctttttcagactcaacttctaatgactgatactcatatgttagagacagatgaagaaaatacaaagcctagagttattgacctttcacagtacagtccgacttactttggacctgagcatgctcaggttctttctggccacttacttcattctagtttaccaggactcagccggatggagcagatgtctttgatggccttagcagatacaattgcaactacaagcactgatattggagaaagccgagacagaagccaaggtggagaaactcttgatgaatgtgggttaaaatttcttttggctgttcgactccatacctttcttacaacttcccttccagcctatcgagctcaactccttcaccaaggcctgtctacaagtcattttgcttgggcatttcactcagtagcagaagaagaactgctgaacatgttgccagccatgcagaaagatgatcccacttggtctgaactaagagctatgggtgtggggtggtgggtccggaatacccgcatcttacgcaaatgcatagaaaaagtagctaaagcagccttttatagaaagaatgatcctttagatgctgccattttttaccttgcaatgaaaaagaaagctgtgatttggggattatatagagctgaaaaaaacaccaggatgacacagttttttggacacaattttgaggatgagaggtggcgtaaagcagctttaaagaatgctttttctttgctaggcaaacaaagatttgaacattctgcagcattttttcttttagctggttgcctcagagatgcaattgaggtatgtcttgagaaattgaatgacattcagttggctcttgtaatagcaagactctatgagtctgaatttgatacatctgcagcatataaatctattttacgtaaaaaagttttgggaatcgattctcctgtcagtgaactgtgttcattgaacataaatatgcatcatgatccttttcttcggagcatggcatattggattttggaagattatagtggtgctctggaaacattaataaagcaacctatcagagagaatgatgatcaagttttatcagccagtaatcctacagtttttaatttctacaattatctaagaacacatcctcttttgctgagacgtcattttggatcatctgatacattttccacacatatgagcctaacaggaaaaagtggactggcaggaacaattaatttaagtgaaagacgtttattttttaccactgccagtgctcatttaaaagctggctgcccaatgttggctttggaagtattatcaaagatgcctaaagtcatcaagaaaacaagacctttttatagggcttctagttttctggatactagtaaagactgttctccttcttctccattaaagttggatgcaagggaagataagtcttctgctgttgattggtcacagtcactgataaatggttttggatcttcttcagagggttcctcagagaagcaatcaaactccactctttcttttgactggagccaaccaagtgttgtgtttcaggatgactctttagagttaaaatgggacagtgataatgatgaagaaaatgaggatgtccctatttcaatgaaagaactaaaacctttacagagaaaaacagataaaaagttggatgacataagttctaactacacagaatctttcagcacactagatgaaaatgaccttttaaatccatcagaagatataattgcagttcagttaaaatttagagcatgtttaaagattctcacagtagaacttcgtactttatctactggctatgaaatagatggtggaaaattgcgttaccaactataccactggcttgaaaaagaggtgatagctcttcagaggacttgtgacttttgctcagatgctgaagaactacagtctgcatttggcagaaatgaagatgaatttggattaaatgaggatgctgaagatttgcctcaccaaacaaaagtgaaacaactgagagaaaattttcaggaaaaaagacagtggctcttgaagtatcagtcacttttgagaatgtttcttagttactgcatacttcatggatcccatggtgggggtcttgcatctgtaagaatggaattgattttgcttttgcaagaatctcagcaggaaacatcagaaccactattttctagccctctgtcagagcaaacctcagtgcctctcctctttgcttgtacagccaatgccaaaacagtagttgccaatccattattgcaccttagtaatctgacacatgatattctccatgccataataaactttgattcaccaccccaccctgatatccaaagcaataaagtgtatgtaatgcatactttagcagcttcactttctgcttgtatttatcagtgcctttgtggtagtcataactacagttcatttcagacgaatcagtttactggaatggtatatcagacagtactgcttcctcatcgaccttctttgaaaacaggaagcttagatgaagcattaactcccaatacgtcaccagctcaatggccaggaataacttgtctaattcgacttttgaattcttctggcgaggaagcccagtcagggcttacagtcttgctctgtgagattctcacagcagtgtatcttagtctcttcatccatggcctggccacacattcaagtaatgagctatttcggattgtggcccatcctctaaatgagaaaatgtggtctgctgtgtttggtggaggtgcacatgttcctagcaaagaacagacacattcaaaaactttacctgtttcttcactagttgaagaaggagaaaaacagaacaaacgttttaggccgtcaaaaatgtcttgcagagaatctgccccactgaccccttcctcggcaccagtaagccaggagtcactggcggttaaagaaaagttcatcccacctgagctcagtatctgggactatttcatagctaagccttttctaccctcttctcaaagtagagccgaatatgattcagaggagagtctgggaagtgatgatgatgacaatgatgatgatgatgatgttttagcatcagatttccatctccaggaacattctaattcaaattcatatagttggtccttgatgcggttggcgatggtgcaattggtgctcaacaatttgaagactttttatcccttcgcaggtcatgatcttgcagagcttccagttagttcacctctttgtcatgcggttctaaaaactcttcaatgttgggaacaagttcttctccgacgacttgaaatccatggtgggccacctcaaaattatatcgcaagtcataccgccgaagagagtttgtctgcaggtcctgcaattcttcgccacaaagctttactggaacctacaaacactcctttcaaatccaaacaccatctggcactgtctgtgaagaggctttggcagtatttggtgaagcaggaagaaattcaggaaacctttatcaaaaatatattcacaaagaaacggtgtctaaatgagatagaagcagatttgggatatcctggaggtaaagcaagaattattcataaggaatctgatatcattactgcgtttgctgttaataaggcaaatagaaactgcatagcaatcgcttccagtcatgatgttcaagaactggatgtttctggaattctggccacacaggtctacacttgggtagatgatgatatagaagtggaaaccaaaggatcagaagatttcttggttatacatgctcgtgatgatttaacagctgttcaaggtacaactccatatacacatagcaatcctggcactccaatcaacatgccatggcttggtagtacacagactggcagaggagcatctgtgatgattaagaaagccattaataatgttagaagaatgacttctcatccaactcttccttactatctgacaggagctcaagatggaagtgtcagaatgtttgaatggggccattctcaacaaataacctgttttcgatctggtggcaattcaagagttacaagaatgagatttaactatcagggaaataagtttggaatagttgatgctgatggatatttaagtttgtatcaaacaaactggaaatgttgtccagttactggaagcatgcctaagccatacctgacttggcagtgtcataacaaaacagccaatgattttgtcttcgttagttcctcctctctgatagctacagctggtctttcaactgacaatagaaacgtatgtttgtgggatactcttgtagcacctgccaatagtttagtccatgcatttacctgccatgacagtggagccacagttttagcatatgctccaaaacatcagctactaatatcaggtggcagaaaaggttttacatatgtatttgacctttgtcaacgacaacagaggcagcttttccagagccatgattctcctgttaaagccgttgctgttgatccaactgaagagtactttgttacaggatctgccgaaggcaatataaagatttggagtctctctacctttggtcttctccatacttttgtcagtgaacatgctcggcagtccatttttagaaatattggaactggagtgatgcaaattgagacagggcctgcaaatcacattttctcctgtggagctgatggaacaatgaaaatgagaatactgccagatcagtttagccctttaaatgaagtgttgaaaaatgatgtgaaatttatgctataacatttttacaataagatgtacaatttattacctatatggaagtggccaacagatataatatacagtgatcattctctatgccacaaattagctaatgctttcttgtttttatatttattttatggagctttgcccttgatgcactgatgccttaaaaattaacaaggtcattcagaagtagattacattgcctaaagtagaatgtgtaagtaatgctgtaataatacatatcatagtatattataatcagtatgtcatagtgttaaaggtgttttgttttcttattgatacttttccacaggcatctctgcatgaatttcttccacagtaaaaatacgttttttgtaaaggcaattgtacataatactcatcacttaattcaccacactctcacttcctttattagccttatacatctcaaactcttctcttaattaatgataggtatttgagtaagaatgaaaaaaataatgaacatcttcattaaaattgtcattgagacgtcagtgataaatgagctagatggctcaatatgtaaggttttcagtagtttaccctccggaacccaagttgtatgtatgtatacgtgtgtgtgtgtgtgtgtgtgtgtatcttacacatcttatttgaacttagttgtatatattagcgaaaactggtttttcatgtgtttttgtgccataacaactattgccaccagaataactttttttttgcaactgtgcttttcatttttaaaaaatttttgaattcccatcctaattttcaaataagtttcaaggagactatcaggattattattttaaagattagatttagtcaaataagtcttagcaggcaataaagtttctgtggtggcatatatcatgtaagacacttaaagtaagtttgtgaatttgtcaactttcgagcatcaaacaaatattttacttaaattttattttatcttatttttaggtgcttttaatctcaaaattctgaaaagcgaatagcagtgttttcagaaacaaatgtgaaagcagtcaaattaagtagatactatttagaaatgtaaaatactctccagatctaccattaatagaaaataaactaaaccttatattttatttttgccaaaatattttattataaaatatgaccaaaatatttaaaatgcacaatgcttttaacttaaatgtgctaaccctgtttctgtctgttttgtgctgtaccttttctgattcagaattatagaaaacttgataaatacttgattttaaccaatgagactacaggcagatgggactaagtgtttatgggacaattatgtactatttaacttaaatatattttgtttaataggaaatatataataatagcattttatgtaataaaatatgggcaacgattatcttggaaattaaagagtcaaagcaaagaaatgaagggctggtaaaatgaattttgtaatatcctcaggatacttttatcttaaaagtatgttgttaaagattttgtaaattgtatttcaacaattttaaatgtgttgagcaagttgcagtgcaaacactgtcattatgtagagagtttatatgcacataataacctgtacctataaatcgtgcaataaccatatgcgactattttgccatggagaaatctgacagcattgcaaacaatagtattgtttgatgtagttaaccttaagttatttttcagtaatttcttcacaaatcaagattcaaacagctttaaacacttccaatgagataaaatatttactattatgcttattagaacaaaaggtgtttaaggatgaactaaatattttaattgagcatttatatggataatcatacattatgtaagcccatatgtatttacatccagagtcataatattttaaataaacaatcatgcagaaacttt

SEQ ID NO: 156858 - protein, 118 aa, Artificial Sequence
  derived and/or modified sequence
MPREDAHFIYGYPKKGHGHSYTTAEEAAGIGILTVILGVLLLIGCWYCRRRNGYRALMDKSLHVGTQCALTRRCPQEGFDHRDSKVSLQEKNCEPVVPNAPPAYEKLSAEQSPPPYSP

SEQ ID NO: 156859 - DNA, 357 bp, Artificial Sequence
  derived and/or modified sequence
atgccccgtgaggacgcgcactttatttacggttatcccaaaaagggacatggtcactcttacacaaccgccgaggaggccgccggtattggcatccttaccgtcattctgggcgtgctactgctgataggctgttggtactgccgcagacgcaatggatatcgggccctgatggacaagtctctccacgttgggactcagtgtgccctgacccgcaggtgccctcaggaaggcttcgatcaccgggacagtaaagtatccttgcaagaaaagaattgtgagcccgtcgtcccaaacgcccctccagcttacgagaaacttagtgccgaacagagtcctccaccatactccccctag

SEQ ID NO: 156860 - DNA, 357 bp, Artificial Sequence
  derived and/or modified sequence
atgcccagagaagatgcccactttatctatgggtatcccaagaaaggccatggccacagctacacaaccgctgaagaggcggctgggatcggaatcttgactgtaattttaggcgttctgctgctgattggatgctggtattgtaggcgccgcaacggctatcgcgcactcatggataaatccctgcatgtgggaacccagtgtgccctgaccagacgatgtccccaggagggattcgaccacagagattcaaaggtaagccttcaagaaaagaactgcgaacccgtggtgccaaatgctcctcctgcctacgagaagctgtcagctgagcagtctccgccaccatatagcccctag

SEQ ID NO: 156861 - DNA, 357 bp, Artificial Sequence
  derived and/or modified sequence
atgccccgagaggacgcccattttatctacggatatcctaagaaggggcatgggcactcctatactacagcggaggaggcggcaggcatcggaatcctgacggtgattctgggagtgctccttttaatcggctgttggtactgtcgaagaagaaatgggtatcgagctctgatggacaagagcctccacgtgggaactcaatgcgccctgactaggcgttgtccgcaggagggctttgatcaccgagacagcaaagtcagtctgcaggaaaagaattgtgaaccagtcgtgcctaatgcacctcctgcctacgagaagctgagcgcagagcagagcccccccccttacagcccctag

SEQ ID NO: 156862 - DNA, 357 bp, Artificial Sequence
  derived and/or modified sequence
atgccccgggaggatgcccacttcatctacggctaccccaagaagggccacggccacagctacaccacagctgaggaggccgccggcatcggcatcctgaccgtcatcctgggcgtgctgctgctgattggctgctggtactgcagaagaagaaatggctaccgggccctgatggacaagagcctgcacgtgggcacccagtgtgccctgacccggcgctgcccccaggagggctttgaccaccgggacagcaaggtgtccctgcaggagaagaactgtgagcctgtggtgcccaatgcccccccagcctatgagaagctgtctgctgagcagagccccccaccctacagcccctag

SEQ ID NO: 156863 - DNA, 1000 bp, Artificial Sequence
  derived and/or modified sequence
ctctcattaaggaaggtaagagcgttgccttctcgccataatcatagtcctcttctcccagaataggatttgggaaattctggctaagtcctctgcctaccctcattgccccgctgatgtgtgacatcaacagaatttctccgcaacgtttgtcagtctccaacctcagagggctcacaaagcctcctcctgaatcctctctcagtcctccaacactaccaagaagaaaagcaattattcaggatggcatcttgctggggagaagcagcctccctgaggtagatgtgttctcctgtcacttaaagaaccacttctcctggtctgagtagtaagaggcgcatttgctgttgctgcaccatttgccaaggctctgagtttgaggtgtcctgtgccctgaccctacaagatgccaagagaagatgctcacttcatctatggttaccccaagaaggggcacggccactcttacaccacggctgaagaggccgctgggatcggcatcctgacagtgatcctgggagtcttactgctcatcggctgttggtattgtagaagacgaaatggatacagagccttgatggataaaagtcttcatgttggcactcaatgtgccttaacaagaagatgcccacaagaagggtttgatcatcgggacagcaaagtgtctcttcaagagaaaaactgtgaacctgtggttcccaatgctccacctgcttatgagaaactctctgcagaacagtcaccaccaccttattcaccttaagagccagcgagacacctgagacatgctgaaattatttctctcacacttttgcttgaatttaatacagacatctaatgttctcctttggaatggtgtaggaaaaatgcaagccatctctaataataagtcagtgttaaaattttagtaggtccgctagcagtactaatcatgtgaggaaatgatgagaaatattaaattgggaaaactccatcaataaatgttgcaatgcatgatact

SEQ ID NO: 156864 - DNA, 791 bp, Artificial Sequence
  derived and/or modified sequence
cagcagacagaggactctcattaaggaagaatttctccgcaacgtttgtcagtctccaacctcagagggctcacaaagcctcctcctgaatcctctctcagtcctccaacactaccaagaagaaaagcaattattcaggatggcatcttgctggggagaagcagcctccctgaggtgtcctgtgccctgaccctacaagatgccaagagaagatgctcacttcatctatggttaccccaagaaggggcacggccactcttacaccacggctgaagaggccgctgggatcggcatcctgacagtgatcctgggagtcttactgctcatcggctgttggtattgtagaagacgaaatggatacagagccttgatggataaaagtcttcatgttggcactcaatgtgccttaacaagaagatgcccacaagaagggtttgatcatcgggacagcaaagtgtctcttcaagagaaaaactgtgaacctgtggttcccaatgctccacctgcttatgagaaactctctgcagaacagtcaccaccaccttattcaccttaagagccagcgagacacctgagacatgctgaaattatttctctcacacttttgcttgaatttaatacagacatctaatgttctcctttggaatggtgtaggaaaaatgcaagccatctctaataataagtcagtgttaaaattttagtaggtccgctagcagtactaatcatgtgaggaaatgatgagaaatattaaattgggaaaactccatcaataaatgttgcaatgcatgata

SEQ ID NO: 156865 - DNA, 2415 bp, Artificial Sequence
  derived and/or modified sequence
ccgtcagaaatctaaacccgtgactatcatgggactcaaaaccaggaaaaaaaataagtcaaaacgattaagagccagagaagcagtcttcatacacgcggccagccagcagacagaggactctcattaaggaaggtgtcctgtgccctgaccctacaagatgccaagagaagatgctcacttcatctatggttaccccaagaaggggcacggccactcttacaccacggctgaagaggccgctgggatcggcatcctgacagtgatcctgggagtcttactgctcatcggctgttggtattgtagaagacgaaatggatacagagccttgatggataaaagtcttcatgttggcactcaatgtgccttaacaagaagatgcccacaagaagggtttgatcatcgggacagcaaagtgtctcttcaagagaaaaactgtgaacctgtggttcccaatgctccacctgcttatgagaaactctctgcagaacagtcaccaccaccttattcaccttaagagccagcgagacacctgagacatgctgaaattatttctctcacacttttgcttgaatttaatacagacatctaatgttctcctttggaatggtgtaggaaaaatgcaagccatctctaataataagtcagtgttaaaattttagtaggtccgctagcagtactaatcatgtgaggaaatgatgagaaatattaaattgggaaaactccatcaataaatgttgcaatgcatgatactatctgtgccagaggtaatgttagtaaatccatggtgttattttctgagagacagaattcaagtgggtattctggggccatccaatttctctttacttgaaatttggctaataacaaactagtcaggttttcgaaccttgaccgacatgaactgtacacagaattgttccagtactatggagtgctcacaaaggatacttttacaggttaagacaaagggttgactggcctatttatctgatcaagaacatgtcagcaatgtctctttgtgctctaaaattctattatactacaataatatattgtaaagatcctatagctctttttttttgagatggagtttcgcttttgttgcccaggctggagtgcaatggcgcgatcttggctcaccataacctccgcctcccaggttcaagcaattctcctgccttagcctcctgagtagctgggattacaggcgtgcgccactatgcctgactaattttgtagttttagtagagacggggtttctccatgttggtcaggctggtctcaaactcctgacctcaggtgatctgcccgcctcagcctcccaaagtgctggaattacaggcgtgagccaccacgcctggctggatcctatatcttaggtaagacatataacgcagtctaattacatttcacttcaaggctcaatgctattctaactaatgacaagtattttctactaaaccagaaattggtagaaggatttaaataagtaaaagctactatgtactgccttagtgctgatgcctgtgtactgccttaaatgtacctatggcaatttagctctcttgggttcccaaatccctctcacaagaatgtgcagaagaaatcataaaggatcagagattctggaatggtgtcattatttgcatagcaacattgcaatttgttttcctttggctacatcaacgtatcacctacactattatttatctaatatttctctttcaggcagctcatttaaactttttttggctttaattcctattgccatcctgagtggaaaaccagtatcattttccatagtagaggataactataacaacgaagataatgaaagtaatttttttaacctaagaaaatactaatggtcacagaaggctatgaacctgagacctgctctctttgtcaaacagagattaacaaggatcagagaaaagttaaaggctgtctttgacataactggaaggcttacaagagttttaaagaaattactttctcactatatgattcattgctatttaacggtgagtcagtaaaccacctaaaaatcatcttgtctcatcagaaacactagtgtaacataactgcatcattttctactaaagacaaaatttcaccaaaggggaaaaagaaaacacaggataaagagatgtattacacacatcgaaaaaaacaacatttaacaaaatattaaaatatttccccactcttctgatactgtcaagtcttactacttaaaataaggcttccacctctcccacttcaaacaaataaatgaattctaaaccaaagaaacttcatcaggcatttgggtacctcctcccctcaccacgaggtctctgctgaacctcaatcctgtacactgaggaacctgtggcttgaaccctacatccctccagaacccccagactg

SEQ ID NO: 156866 - DNA, 357 bp, Artificial Sequence
  derived and/or modified sequence
atgccccgggaggacgcccacttcatctacggctaccccaagaagggacacggacacagttacacaactgccgaagaagctgccggaataggtatactgaccgttattctcggggtccttctcctgattgggtgttggtattgtcgaaggagaaatggctatcgggcattgatggacaaatctcttcatgtgggaacacagtgtgcactgacgcgccggtgtccacaggagggctttgaccatcgggactctaaagtgtctctccaagaaaaaaattgcgagccagttgtaccaaatgcccccccagcgtatgaaaaattgtcagccgagcagtctccacctccctacagcccttag

SEQ ID NO: 156867 - DNA, 357 bp, Artificial Sequence
  derived and/or modified sequence
atgccccgggaggacgcccacttcatctacggctaccccaagaagggacatggacacagctatactactgctgaggaagcggccggcatcggtatactcacagtgatattgggtgtgttgctgctaatcggctgttggtactgccgaaggcgaaatgggtacagggctctgatggacaaaagcctgcatgtgggcacacagtgtgctcttacccgaagatgcccacaggagggatttgatcatagagacagcaaggttagcctacaggaaaaaaattgtgagcccgtggtacctaacgcaccacctgcttacgagaaactgtccgctgagcagtccccaccaccctactcgccttag

SEQ ID NO: 156868 - DNA, 357 bp, Artificial Sequence
  derived and/or modified sequence
atgccccgggaggacgcccacttcatctacggctaccccaagaagggacacggtcattcgtatacaacagcagaagaagccgccggcattggaatccttaccgttatcctgggcgtgttattgctgatcggatgttggtactgtcgccggagaaatgggtatcgggctctgatggacaaaagcctccatgtgggcacacagtgcgccttgacccgccggtgtccccaggagggattcgaccacagggattcaaaagtgagcctgcaggagaaaaactgcgagccagttgtacctaatgctccccccgcttatgaaaagctgtccgccgagcagtcaccgcccccttatagtccatag

SEQ ID NO: 156869 - DNA, 357 bp, Artificial Sequence
  derived and/or modified sequence
atgccccgagaggatgcacactttatttatggatatcccaagaaggggcacggacacagttacacaaccgcggaggaagcagccggtatcggaatcttgactgtgatcctgggagtactcttacttattgggtgttggtactgtcgcaggagaaacggttacagagccttaatggacaaatctctgcatgtaggcacacagtgtgccttaacccggagatgtccccaggaggggttcgatcatcgagactctaaggtctccctgcaggaaaaaaattgcgagcccgtcgtacccaacgcaccccctgcttatgagaaactctcagcagaacagtctcctccaccctattccccctag

SEQ ID NO: 156870 - DNA, 357 bp, Artificial Sequence
  derived and/or modified sequence
atgccacgcgaggatgcacattttatttacggataccctaaaaaaggccacgggcattcctacacaacagcagaggaggccgctgggatcggcatccttacggtgattcttggcgtgctacttctgatcggatgttggtattgtaggcgacgcaatggctaccgtgctttaatggataaaagcctgcacgtgggaactcagtgtgccttgacgaggcggtgtccccaggaggggtttgatcatagagatagtaaagtgtccttacaggaaaagaattgtgagcccgtggttccaaacgcccctcctgcctacgagaaactttccgctgagcagtcaccccctccctacagcccatag

SEQ ID NO: 156871 - DNA, 357 bp, Artificial Sequence
  derived and/or modified sequence
atgccacgagaggatgcccactttatttatggatatccaaaaaaagggcacggccacagctatacgaccgctgaggaggccgctgggattggcatcctgactgtcattttgggcgtcctcttactgattgggtgctggtactgtcggaggcgcaacggatacagagccctgatggataaaagtctccacgtggggacacagtgcgcactgacccggcgttgtccgcaagaaggctttgaccatcgagactccaaggtgagtcttcaggaaaagaattgcgaacccgtcgtccctaatgcacccccagcttacgaaaaactctctgcagagcagtctccacccccatacagcccctag

SEQ ID NO: 156872 - DNA, 357 bp, Artificial Sequence
  derived and/or modified sequence
atgcccagagaggacgcccacttcatctacggctaccccaagaagggccacggccacagctacaccaccgccgaggaggccgccggcatcggcatcctgaccgtgatcctgggcgtgctgctgctgatcggctgctggtactgcagaagaagaaacggctacagagccctgatggacaagagcctgcacgtgggcacccagtgcgccctgaccagaagatgcccccaggagggcttcgaccacagagacagcaaggtgagcctgcaggagaagaactgcgagcccgtggtgcccaacgccccccccgcctacgagaagctgagcgccgagcagagcccccccccctacagcccctag

SEQ ID NO: 156873 - protein, 439 aa, Artificial Sequence
  derived and/or modified sequence
MADPDVLTEVPAALKRLAKYVIRGFYGIEHALALDILIRNSCVKEEDMLELLKFDRKQLRSVLNNLKGDKFIKCRMRVETAADGKTTRHNYYFINYRTLVNVVKYKLDHMRRRIETDERDSTNRASFKCPVCSSTFTDLEANQLFDPMTGTFRCTFCHTEVEEDESAMPKKDARTLLARFNEQIEPIYALLRETEDVNLAYEILEPEPTEIPALKQSKDHAATTAGAASLAGGHHREAWATKGPSYEDLYTQNVVINMDDQEDLHRASLEGKSAKERPIWLRESTVQGAYGSEDMKEGGIDMDAFQEREEGHAGPDDNEEVMRALLIHEKKTSSAMAGSVGAAAPVTAANGSDSESETSESDDDSPPRPAAVAVHKREEDEEEDDEFEEVADDPIVMVAGRPFSYSEVSQRPELVAQMTPEEKEAYIAMGQRMFEDLFE

SEQ ID NO: 156874 - protein, 49 aa, Artificial Sequence
  derived and/or modified sequence
MADPDVLTEVPAALKRLAKYVIRGFYGIEHALALDILIRNSCVKEEDML

SEQ ID NO: 156875 - protein, 122 aa, Artificial Sequence
  derived and/or modified sequence
MADPDVLTEVPAALKRLAKYVIRGFYGIEHALALDILIRNSCVKEEDMLELLKFDRKQLRSVLNNLKGDKFIKCRMRVETAADGKTTRHNYYFINYRTLVNVVKYKLDHMRRRIETDERDST

SEQ ID NO: 156876 - DNA, 3033 bp, Artificial Sequence
  derived and/or modified sequence
gtcgcgcaaggggcgtggttcatttaagccggtagttgaagcgctgggggcagctgtagtgggagtgttccaggattcgccttgtatatttaaagttggagttcgttgctaaagatggcagacccagatgtcctcactgaagttccagcagcattgaagcggttagccaagtatgtgatccggggattttatggcattgagcatgccttggccttggacatcttgatcaggaactcctgtgtgaaagaggaggatatgctggagctgctcaagtttgatcggaagcaacttcgatcagttttgaataatttaaagggagacaagtttatcaaatgcagaatgagggtagagactgctgcagacgggaaaaccactcgccataactactacttcatcaattatcgtactcttgttaatgtggtaaaatataaactggaccacatgagaagaagaattgagaccgatgagagagattcgaccaaccgggcttccttcaaatgtcctgtctgtagtagtactttcacagacttagaagctaatcagctctttgatcctatgacaggaactttccgctgtactttttgccatacagaggtagaagaggatgaatcagcaatgcccaaaaaagatgcacgcacacttttggcaaggtttaatgaacaaattgagcccatttatgcattgcttcgggagacagaggatgtgaacttggcctatgaaatacttgagccagaacccacagaaatcccagccctgaaacagagcaaggaccatgcagcaactactgctggagctgctagcctagcaggtgggcaccaccgggaagcatgggccaccaaaggtccttcctatgaagacttatacactcagaatgttgtcattaacatggatgaccaagaagatcttcatcgagcctcactggaagggaaatctgccaaagagaggcctatttggttgagagaaagcactgtccaaggggcatatggttctgaagatatgaaagaagggggcatagatatggacgcatttcaggagcgtgaggaaggccatgctgggcctgatgacaacgaagaggtcatgcgagcactgctcattcacgagaaaaagacttcctctgccatggctggttcagtgggggcagctgctccagtgaccgctgccaatggcagtgactcagaaagcgagaccagtgagtcagatgatgattctccaccccgtccggcagctgtggctgtgcataaacgagaagaggatgaagaggaagatgacgagtttgaagaagtagcagatgaccccattgtcatggtggctggccgtccgttctcctacagtgaagtgagccaacggccagagctagtggcccagatgacaccagaagaaaaggaagcatatatagcaatgggacaacgcatgtttgaggacctctttgagtgagctttccctaattctttctcctttctctaatgctcagttcaaaaaggaatgtctcatctttgaagaaaagtatttaagtggctttctgcccctcttgatgtaagcaactgtccatccttgtgcaaagattgatggtagagagtttgacttttatgccagaaactttcccagcaaggtagggtgctgagaatcctacccttccttgctgtcactacagtattaatattttactgtattttcttttcttttttttttttttttggagatgaagtctcactcttgtaccccaggctggagtgcaatggcgtgatctcggctcactgcaacctctgcctcctgggttcaagcgattctcctgcctcagcctcccgagtagctgggattacaggtgcctgccaccatgcctggctaatttttgtatttttagtagaggcagggtttcaccatgttagccaggatgatctcgatctcctgacctcatgatccacccgcctcggcctcccaaagtgctgtattttcttatctgatttttttcttgccttattaagacataattttctcccttctgaaatgagtgagggaagttcataaggtaaatccttcccatccatctgtttactacaataggttacaataattcactgatcacatccattttatctgttctagccaggcattccaaacaatttcttatactgctgcccaccaaagcagcttgccaacagtcaaatcactgattgggggaaaaaatcctgaaattttgcttagaatttgagcatttcctcaaaattgagatggatcaatatgtaaggggaggtgggagcgtgtgtggaagggggagagatatacttgagtcttatgattaatgtctaaaccagaatttgtgtctttagaactgaccagactggtagattttattgtattgcttaatgtcttttggtttggatttaggatgatagaaaacagaagtataattggtaaacccttaggaagaaattagaaaaacatggacgtaagacaagaagtctctgtgaagggttgaagagtgacaagcattggtaacagtgccttagaactgtgtcagttagtctgatttggaaatcctttatgtaaagctgagactggtcctggttttgttccctttgggtacagacctcttgtcagtgctataaattgtttaatgaggccattccagcagaaatcaacagaataattgattactcttctctctctctgtcactctccctctttctaaacatcattgaaggctgtctctcttttaatttttgtcagacacagtattttagggtgcatccagtataccattgagcattgtaacctcaggaaacagtttattttgggttctgatatgtagcatggtattttccctaaggcagaactttaaaaataaagaactttcacacaagggtctgtaacaattgtatatcttacaatatttttccttgcattgtaatttttaagtatttatcattttatagtacacatgtaaagaatatatgagccttgtatggagtgatgtttcatttacctgggttgtgttaatgactgaatgttgacaataaatctgttttatactga

SEQ ID NO: 156877 - DNA, 1320 bp, Artificial Sequence
  derived and/or modified sequence
atggccgatcctgacgtcctaaccgaggtgcccgcggcactgaagcggctggcaaaatatgtgattagagggttttatggcatcgaacacgccttggccctggacatacttattagaaactcatgtgtgaaggaagaagacatgcttgaacttcttaaattcgatcggaaacaactgagaagtgtgttgaataacctcaaaggcgacaaattcatcaaatgtagaatgcgagtcgaaacagcagccgatggcaaaacaacaaggcacaattattattttatcaactaccggactttggttaatgtggtgaagtacaagcttgaccacatgcgaagaaggattgaaacagacgagagggatagcactaatcgtgctagttttaagtgccccgtgtgctcctctactttcactgatctagaagctaaccagctgttcgaccccatgactggaactttccgctgcacgttctgtcacactgaggttgaggaagacgagtcagccatgccaaagaaggacgcgagaacactgctcgcccgctttaatgagcagattgaaccaatatacgccctattgcgcgagactgaagacgtcaacctggcctatgaaattctggagcccgaacctacagaaatcccggccctcaagcagtcgaaggaccacgcagccacaaccgccggagcagcctcactggcaggcggccaccatagggaggcgtgggcgactaagggacccagttacgaggacttatacacacaaaacgtggtgatcaacatggatgaccaggaagacctgcaccgcgcgtcccttgagggaaaaagcgcaaaagaacgtcctatatggctaagagagagtacagttcagggcgcttatggcagtgaggatatgaaggagggtgggatcgatatggatgcgttccaggagcgggaagaaggtcacgccggcccggacgataatgaagaggtcatgcgcgccctgctgattcatgagaaaaaaacgtctagcgccatggccggaagcgtgggtgccgctgcccccgtgaccgccgcgaatggctccgatagcgaatctgaaacatccgaatcagacgacgacagtccccctcggccagcagctgtagccgtgcacaagagagaggaagatgaggaggaggatgacgagttcgaagaagtggccgacgatcctattgtgatggtcgctggcaggccattctcttactcagaggtttcccagagacccgaacttgtggctcagatgacacccgaggaaaaggaggcctacattgcaatggggcaacgaatgtttgaggacctgttcgagtag

SEQ ID NO: 156878 - DNA, 150 bp, Artificial Sequence
  derived and/or modified sequence
atggcggaccctgacgtgctcacagaagttcccgctgcactcaagaggctggccaagtacgtcatcaggggattctatgggatcgaacatgccctcgccctggacatactcatccggaattcgtgtgtaaaggaagaagatatgctttag

SEQ ID NO: 156879 - DNA, 369 bp, Artificial Sequence
  derived and/or modified sequence
atggcagatccagatgtacttacagaagtacctgcagccctgaaaagactagcgaaatacgttatacgagggttctacgggatcgagcacgcgttggccctcgatattctcatccgaaactcttgcgttaaggaggaggatatgttggaactgctaaagttcgaccgcaagcaactgcgtagtgttttgaacaacctaaaaggcgataagttcataaagtgtcgcatgcgcgtggagacagcagcggatgggaaaactactagacataattactacttcattaattaccggacgcttgttaatgtggtgaaatataaattagatcacatgcgcaggcgcattgagaccgacgagagagactccacctag

SEQ ID NO: 156880 - DNA, 1320 bp, Artificial Sequence
  derived and/or modified sequence
atggctgaccctgatgtgctgacagaggtgcctgctgccctgaagaggctggccaagtatgtgatccggggcttctacggcatcgagcacgccctggccctggacatcctgatccggaacagctgtgtgaaggaggaggacatgctggagctgctgaagtttgacaggaagcagctgcggtctgtgctgaacaacctgaagggggacaagttcatcaagtgcaggatgagggtggagacagctgctgatggcaagaccaccaggcacaactactacttcatcaactaccgcaccctggtgaatgtggtgaagtacaagctggaccacatgagaagacgcatcgagacagatgagcgggacagcaccaacagagccagcttcaagtgccctgtgtgcagcagcaccttcacagacctggaggccaaccagctgtttgaccccatgacaggcaccttccgctgcaccttctgccacacagaggtggaggaggatgagagcgccatgcccaagaaggatgcccggaccctgctggcccgcttcaatgagcagatcgagcccatctatgccctgctgcgggagacagaagatgtgaacctggcctatgagatcctggagcctgagcccacagagatcccagccctgaagcagagcaaggaccatgctgccaccacagctggagctgccagcctggccggcggccaccaccgggaggcctgggccaccaagggccccagctatgaagatctctacacccagaatgtggtgatcaacatggatgaccaggaggacctgcaccgggccagcctggagggcaagagcgccaaggagcggcccatctggctgcgggagagcacagtgcagggcgcctacggcagcgaggacatgaaggagggcggcatcgacatggatgccttccaggagcgggaggagggccatgctggcccagatgacaatgaggaggtgatgagggccctgctgatccacgagaagaagaccagcagcgccatggccggctctgtgggcgctgctgcccctgtgacagctgccaacggcagtgacagcgagagcgagaccagcgagagtgatgatgacagcccccccaggcctgctgctgtggccgtgcacaagcgggaggaggatgaggaggaggatgatgaatttgaggaggtggctgatgaccccatcgtgatggtggccggccggcccttctcctacagcgaggtgtcccagaggcctgagctggtggcccagatgaccccagaggagaaggaggcctacatcgccatgggccagaggatgtttgaggacctgtttgaatag

SEQ ID NO: 156881 - DNA, 150 bp, Artificial Sequence
  derived and/or modified sequence
atggctgaccctgatgtgctgacagaggtgcctgctgccctgaagaggctggccaagtatgtgatccggggcttctacggcatcgagcacgccctggccctggacatcctgatccggaacagctgtgtgaaggaggaggacatgctgtag

SEQ ID NO: 156882 - DNA, 369 bp, Artificial Sequence
  derived and/or modified sequence
atggctgaccctgatgtgctgacagaggtgcctgctgccctgaagaggctggccaagtatgtgatccggggcttctacggcatcgagcacgccctggccctggacatcctgatccggaacagctgtgtgaaggaggaggacatgctggagctgctgaagtttgacaggaagcagctgcggtctgtgctgaacaacctgaagggggacaagttcatcaagtgcaggatgagggtggagacagctgctgatggcaagaccaccaggcacaactactacttcatcaactaccgcaccctggtgaatgtggtgaagtacaagctggaccacatgagaagacgcatcgagacagatgagcgggacagcacctag

SEQ ID NO: 156883 - DNA, 1320 bp, Artificial Sequence
  derived and/or modified sequence
atggccgaccccgacgtgctgaccgaggtgcccgccgccctgaagaggctcgcaaagtatgtgattcggggtttttatgggatcgagcacgcactggcgcttgacatactgattcggaatagttgcgtcaaggaagaggacatgttggagctattgaagttcgatcgaaagcagctgaggagcgttttaaataatctgaagggcgataaattcattaaatgtcgcatgcgcgtggagacagctgctgatggcaaaaccactcgacataactattacttcatcaactatcgaactctagttaatgttgtcaaatacaaacttgaccatatgcggcgcaggattgagaccgacgagagagacagcacaaatcgagcgagttttaagtgccccgtgtgcagctccacttttactgacctggaggccaatcagctcttcgaccctatgacagggacctttaggtgcacattttgtcacaccgaggttgaagaggatgagagtgcaatgcctaagaaagatgcacgcaccctgcttgcccgcttcaatgagcagatcgaacctatttatgctctgctccgtgagacagaggacgtgaacctcgcatatgagattctcgaaccagagcctactgaaatccctgccttgaagcagtcaaaagaccacgctgcgactaccgcaggggcagcttccctcgcaggaggccatcatagggaagcatgggcgaccaaagggccttcctatgaagatctttatactcagaatgtagtaattaatatggacgatcaggaggatctgcaccgggcttcactggaggggaagtctgcgaaagaacgcccaatttggttacgagagtcgactgtgcagggcgcctacgggtcagaggatatgaaggaaggcggaatcgacatggacgccttccaggaacgggaggaaggccacgcagggcccgatgacaacgaggaggttatgagagcattgctgatccacgagaagaaaacaagctccgccatggccggcagcgtcggggctgcagcccccgtcaccgcagctaacggctctgacagcgagagcgagacaagcgagagtgatgacgacagtccaccccgtccggccgccgtggcagtgcataagagggaagaagacgaagaggaggacgatgagttcgaggaggtcgccgatgaccccatcgtaatggtagccggtcggccgtttagctactccgaggtgagccagcggcctgagctggtggcccaaatgacccccgaggaaaaagaagcttacattgcaatgggtcagaggatgtttgaagatctgttcgaatag

SEQ ID NO: 156884 - DNA, 150 bp, Artificial Sequence
  derived and/or modified sequence
atggccgaccccgacgtgctgaccgaggtgcccgccgccctgaagcggctggccaagtacgtgattcggggcttttacggcatcgaacatgcccttgctctcgatatactcattagaaattcttgcgtgaaggaggaagatatgctgtag

SEQ ID NO: 156885 - DNA, 369 bp, Artificial Sequence
  derived and/or modified sequence
atggccgaccccgacgtgctgaccgaggtgcccgccgccctgaagcgtctggccaagtatgtcattagaggcttctatggcatagaacacgctctcgcactcgacatcctgatccggaatagttgcgtcaaggaggaagatatgttagaactattaaagttcgaccgcaaacagctgaggtcagtcttgaacaatctaaagggagataaattcatcaaatgtagaatgagggtcgaaaccgcagcagacggcaaaacaacaaggcataattactacttcatcaattataggacactcgtgaacgtagtcaaatacaagctggaccacatgcgtcgcagaatcgagacagacgagcgggacagtacctag

SEQ ID NO: 156886 - DNA, 1320 bp, Artificial Sequence
  derived and/or modified sequence
atggctgatcccgacgtgctcaccgaagttcctgccgctttgaagcgattggccaaatacgttattcgaggcttctacgggatagagcacgctctagctctagacatcttaattcgaaattcttgcgtgaaggaggaagacatgctcgagttgctcaagtttgatcggaagcagctgaggagtgtgttgaacaatctcaaaggagacaaattcatcaaatgtcgtatgcgcgtggaaacggcagcggatggaaagacaactaggcacaactactactttattaattaccgcacattggtaaatgtagtcaaatacaaactggaccacatgcgcagacgcattgaaacagatgagcgcgattcaactaatcgggcatcctttaaatgtcctgtgtgtagctctaccttcaccgacctggaggccaatcagctgtttgatcccatgacaggaacatttcgttgtactttttgccacactgaagtggaggaggacgagagcgccatgcccaagaaagatgctcggaccctgctggccaggtttaatgagcaaattgaacctatttacgcactgcttcgcgagaccgaggatgtgaacctggcatacgaaatcctggaaccggagccaaccgaaattcctgccctgaaacagagcaaagatcacgctgcaaccacggccggagcggcatcgcttgccggtgggcatcacagagaagcttgggcgacaaaaggcccttcttatgaggacttgtatacacaaaatgtggtgatcaacatggatgatcaggaagacctccaccgcgcatctctggagggaaagagcgctaaggagcggccaatttggctcagagaaagcaccgtgcagggagcctacggcagtgaggatatgaaggagggaggtatcgatatggacgctttccaagagagagaggagggccacgcgggtcctgatgacaacgaagaagttatgcgtgccctgttaatccatgagaaaaaaacctcatctgctatggcgggttcagtcggggcagctgcccctgtgacagccgcaaacggctccgactcagaatccgagacgagcgagagcgatgacgacagtccacctcggcctgctgcagtggccgttcacaagcgggaagaggatgaggaggaggacgacgaatttgaggaggttgcagacgaccctatcgtgatggtggccggaagacccttttcctatagtgaggtctctcaacggcctgagttggttgcccagatgacaccagaagagaaggaggcttatatcgcaatggggcagcggatgttcgaagatttgtttgagtag

SEQ ID NO: 156887 - DNA, 150 bp, Artificial Sequence
  derived and/or modified sequence
atggccgatcctgatgttcttacagaggtccctgctgccctcaagaggcttgccaaatatgtgattaggggattttacggcatcgaacacgcactggctttggatatcctgatacgcaactcctgcgtaaaggaggaggacatgctttag

SEQ ID NO: 156888 - DNA, 369 bp, Artificial Sequence
  derived and/or modified sequence
atggccgaccctgatgtgctgacggaggttccagccgctctgaagcgtctggcgaagtatgttatacgcggattttacggaattgaacacgctttggctctcgatatcctgattaggaattcctgcgtcaaggaagaggacatgctggagcttctaaagttcgacaggaagcagctgcggtcagtgctcaacaacctgaagggcgataaattcataaaatgtagaatgcgggtggagacagctgctgacggaaagactacccgacacaattactacttcatcaattacagaacgttggttaacgtggtaaagtataaactggatcacatgcgacgaagaattgagaccgatgagcgcgattcaacttag

SEQ ID NO: 156889 - DNA, 3012 bp, Artificial Sequence
  derived and/or modified sequence
atttaagccggtagttgaagcgctgggggcagctgtagtgggagtgttccaggattcgccttgtatatttaaagttggagttcgttgctaaagatggcagacccagatgtcctcactgaagttccagcagcattgaagcggttagccaagtatgtgatccggggattttatggcattgagcatgccttggccttggacatcttgatcaggaactcctgtgtgaaagaggaggatatgctggagctgctcaagtttgatcggaagcaacttcgatcagttttgaataatttaaagggagacaagtttatcaaatgcagaatgagggtagagactgctgcagacgggaaaaccactcgccataactactacttcatcaattatcgtactcttgttaatgtggtaaaatataaactggaccacatgagaagaagaattgagaccgatgagagagattcgaccaaccgggcttccttcaaatgtcctgtctgtagtagtactttcacagacttagaagctaatcagctctttgatcctatgacaggaactttccgctgtactttttgccatacagaggtagaagaggatgaatcagcaatgcccaaaaaagatgcacgcacacttttggcaaggtttaatgaacaaattgagcccatttatgcattgcttcgggagacagaggatgtgaacttggcctatgaaatacttgagccagaacccacagaaatcccagccctgaaacagagcaaggaccatgcagcaactactgctggagctgctagcctagcaggtgggcaccaccgggaagcatgggccaccaaaggtccttcctatgaagacttatacactcagaatgttgtcattaacatggatgaccaagaagatcttcatcgagcctcactggaagggaaatctgccaaagagaggcctatttggttgagagaaagcactgtccaaggggcatatggttctgaagatatgaaagaagggggcatagatatggacgcatttcaggagcgtgaggaaggccatgctgggcctgatgacaacgaagaggtcatgcgagcactgctcattcacgagaaaaagacttcctctgccatggctggttcagtgggggcagctgctccagtgaccgctgccaatggcagtgactcagaaagcgagaccagtgagtcagatgatgattctccaccccgtccggcagctgtggctgtgcataaacgagaagaggatgaagaggaagatgacgagtttgaagaagtagcagatgaccccattgtcatggtggctggccgtccgttctcctacagtgaagtgagccaacggccagagctagtggcccagatgacaccagaagaaaaggaagcatatatagcaatgggacaacgcatgtttgaggacctctttgagtgagctttccctaattctttctcctttctctaatgctcagttcaaaaaggaatgtctcatctttgaagaaaagtatttaagtggctttctgcccctcttgatgtaagcaactgtccatccttgtgcaaagattgatggtagagagtttgacttttatgccagaaactttcccagcaaggtagggtgctgagaatcctacccttccttgctgtcactacagtattaatattttactgtattttcttttcttttttttttttttttggagatgaagtctcactcttgtaccccaggctggagtgcaatggcgtgatctcggctcactgcaacctctgcctcctgggttcaagcgattctcctgcctcagcctcccgagtagctgggattacaggtgcctgccaccatgcctggctaatttttgtatttttagtagaggcagggtttcaccatgttagccaggatgatctcgatctcctgacctcatgatccacccgcctcggcctcccaaagtgctgtattttcttatctgatttttttcttgccttattaagacataattttctcccttctgaaatgagtgagggaagttcataaggtaaatccttcccatccatctgtttactacaataggttacaataattcactgatcacatccattttatctgttctagccaggcattccaaacaatttcttatactgctgcccaccaaagcagcttgccaacagtcaaatcactgattgggggaaaaaatcctgaaattttgcttagaatttgagcatttcctcaaaattgagatggatcaatatgtaaggggaggtgggagcgtgtgtggaagggggagagatatacttgagtcttatgattaatgtctaaaccagaatttgtgtctttagaactgaccagactggtagattttattgtattgcttaatgtcttttggtttggatttaggatgatagaaaacagaagtataattggtaaacccttaggaagaaattagaaaaacatggacgtaagacaagaagtctctgtgaagggttgaagagtgacaagcattggtaacagtgccttagaactgtgtcagttagtctgatttggaaatcctttatgtaaagctgagactggtcctggttttgttccctttgggtacagacctcttgtcagtgctataaattgtttaatgaggccattccagcagaaatcaacagaataattgattactcttctctctctctgtcactctccctctttctaaacatcattgaaggctgtctctcttttaatttttgtcagacacagtattttagggtgcatccagtataccattgagcattgtaacctcaggaaacagtttattttgggttctgatatgtagcatggtattttccctaaggcagaactttaaaaataaagaactttcacacaagggtctgtaacaattgtatatcttacaatatttttccttgcattgtaatttttaagtatttatcattttatagtacacatgtaaagaatatatgagccttgtatggagtgatgtttcatttacctgggttgtgttaatgactgaatgttgacaataaatctgttttatactga

SEQ ID NO: 156890 - DNA, 543 bp, Artificial Sequence
  derived and/or modified sequence
gaactcattggctggtctggtaaaaggtagcggggtgcttccccagctggtcgcaggaatagtgcgttttctttgtcgcgcaaggggcgtggttcatttaagccggtagttgaagcgctgggggcagctgtagtgggagtgttccaggattcgccttgcccaggtttttaaagtaaactatatgccaatgtgggctttgagaagacagctttctgggtcatggtacggaaatgagatacacttagtttctgctttgtcaagggatccagtatttaagaatattttgggctgctctccctccctcattttctacctttttaaggactggatggtctttccttgattatcagattcaatttttcaagtatatttaaagttggagttcgttgctaaagatggcagacccagatgtcctcactgaagttccagcagcattgaagcggttagccaagtatgtgatccggggattttatggcattgagcatgccttggccttggacatcttgatcaggaactcctgtgtgaaagaggaggatatgctgg

SEQ ID NO: 156891 - DNA, 551 bp, Artificial Sequence
  derived and/or modified sequence
agttgaagcgctgggggcagctgtagtgggagtgttccaggattcgccttgggatccagtatttaagaatattttgggctgctctccctccctcattttctacctttttaaggactggatggtctttccttgattatcagattcaatttttcaagtatatttaaagttggagttcgttgctaaagatggcagacccagatgtcctcactgaagttccagcagcattgaagcggttagccaagtatgtgatccggggattttatggcattgagcatgccttggccttggacatcttgatcaggaactcctgtgtgaaagaggaggatatgctggagctgctcaagtttgatcggaagcaacttcgatcagttttgaataatttaaagggagacaagtttatcaaatgcagaatgagggtagagactgctgcagacgggaaaaccactcgccataactactacttcatcaattatcgtactcttgttaatgtggtaaaatataaactggaccacatgagaagaagaattgagaccgatgagagagattcgacc

SEQ ID NO: 156892 - DNA, 1320 bp, Artificial Sequence
  derived and/or modified sequence
atggccgaccccgacgtgctgaccgaggtgcccgccgccctgaagagactggccaagtacgtgatcagaggcttctacggcatcgagcacgccctggccctggacatcctgatcagaaacagctgcgtgaaggaggaggacatgctggagctgctgaagttcgacagaaagcagctgagaagcgtgctgaacaacctgaagggcgacaagttcatcaagtgcagaatgagagtggagaccgccgccgacggcaagaccaccagacacaactactacttcatcaactacagaaccctggtgaacgtggtgaagtacaagctggaccacatgagaagaagaatcgagaccgacgagagagacagcaccaacagagccagcttcaagtgccccgtgtgcagcagcaccttcaccgacctggaggccaaccagctgttcgaccccatgaccggcaccttcagatgcaccttctgccacaccgaggtggaggaggacgagagcgccatgcccaagaaggacgccagaaccctgctggccagattcaacgagcagatcgagcccatctacgccctgctgagagagaccgaggacgtgaacctggcctacgagatcctggagcccgagcccaccgagatccccgccctgaagcagagcaaggaccacgccgccaccaccgccggcgccgccagcctggccggcggccaccacagagaggcctgggccaccaagggccccagctacgaggacctgtacacccagaacgtggtgatcaacatggacgaccaggaggacctgcacagagccagcctggagggcaagagcgccaaggagagacccatctggctgagagagagcaccgtgcagggcgcctacggcagcgaggacatgaaggagggcggcatcgacatggacgccttccaggagagagaggagggccacgccggccccgacgacaacgaggaggtgatgagagccctgctgatccacgagaagaagaccagcagcgccatggccggcagcgtgggcgccgccgcccccgtgaccgccgccaacggcagcgacagcgagagcgagaccagcgagagcgacgacgacagcccccccagacccgccgccgtggccgtgcacaagagagaggaggacgaggaggaggacgacgagttcgaggaggtggccgacgaccccatcgtgatggtggccggcagacccttcagctacagcgaggtgagccagagacccgagctggtggcccagatgacccccgaggagaaggaggcctacatcgccatgggccagagaatgttcgaggacctgttcgagtag

SEQ ID NO: 156893 - DNA, 150 bp, Artificial Sequence
  derived and/or modified sequence
atggccgaccccgacgtgctgaccgaggtgcccgccgccctgaagagactggccaagtacgtgatcagaggcttctacggcatcgagcacgccctggccctggacatcctgatcagaaacagctgcgtgaaggaggaggacatgctgtag

SEQ ID NO: 156894 - DNA, 369 bp, Artificial Sequence
  derived and/or modified sequence
atggccgaccccgacgtgctgaccgaggtgcccgccgccctgaagagactggccaagtacgtgatcagaggcttctacggcatcgagcacgccctggccctggacatcctgatcagaaacagctgcgtgaaggaggaggacatgctggagctgctgaagttcgacagaaagcagctgagaagcgtgctgaacaacctgaagggcgacaagttcatcaagtgcagaatgagagtggagaccgccgccgacggcaagaccaccagacacaactactacttcatcaactacagaaccctggtgaacgtggtgaagtacaagctggaccacatgagaagaagaatcgagaccgacgagagagacagcacctag

SEQ ID NO: 156895 - protein, 362 aa, Artificial Sequence
  derived and/or modified sequence
MLVMAPRTVLLLLSAALALTETWAGSHSMRYFYTSVSRPGRGEPRFISVGYVDDTQFVRFDSDAASPREEPRAPWIEQEGPEYWDRNTQIYKAQAQTDRESLRNLRGYYNQSEAGSHTLQSMYGCDVGPDGRLLRGHDQYAYDGKDYIALNEDLRSWTAADTAAQITQRKWEAAREAEQRRAYLEGECVEWLRRYLENGKDKLERADPPKTHVTHHPISDHEATLRCWALGFYPAEITLTWQRDGEDQTQDTELVETRPAGDRTFQKWAAVVVPSGEEQRYTCHVQHEGLPKPLTLRWEPSSQSTVPIVGIVAGLAVLAVVVIGAVVAAVMCRRKSSGGKGGSYSQAACSDSAQGSDVSLTA

SEQ ID NO: 156896 - protein, 225 aa, Artificial Sequence
  derived and/or modified sequence
  misc_feature (1)..(1): Xaa can be any naturally occurring amino acid
XMLVMAPRTVLLLLSAALALTETWAGSHSMRYFYTSVSRPGRGEPRFISVGYVDDTQFVRFDSDAASPREEPRAPWIEQEGPEYWDRNTQIYKAQAQTDRESLRNLRGYYNQSEAGSHTLQSMYGCDVGPDGRLLRGHDQYAYDGKDYIALNEDLRSWTAADTAAQITQRKWEAAREAEQRRAYLEGECVEWLRRYLENGKDKLERADQEQKSLFPAQRLELSNE

SEQ ID NO: 156897 - protein, 241 aa, Artificial Sequence
  derived and/or modified sequence
MYGCDVGPDGRLLRGHDQYAYDGKDYIALNEDLRSWTAADTAAQITQRKWEAAREAEQRRAYLEGECVEWLRRYLENGKDKLERADPPKTHVTHHPISDHEATLRCWALGFYPAEITLTWQRDGEDQTQDTELVETRPAGDRTFQKWAAVVVPSGEEQRYTCHVQHEGLPKPLTLRWEPSSQSTVPIVGIVAGLAVLAVVVIGAVVAAVMCRRKSSGGKGGSYSQAACSDSAQGSDVSLTA

SEQ ID NO: 156898 - DNA, 1089 bp, Artificial Sequence
  derived and/or modified sequence
atgctggtgatggcccccagaaccgtgctgctgctgctgagcgccgccctggccctgaccgagacctgggccggcagccacagcatgagatacttctacaccagcgtgagcagacccggcagaggcgagcccagattcatcagcgtgggctacgtggacgacacccagttcgtgagattcgacagcgacgccgccagccccagagaggagcccagagccccctggatcgagcaggagggccccgagtactgggacagaaacacccagatctacaaggcccaggcccagaccgacagagagagcctgagaaacctgagaggctactacaaccagagcgaggccggcagccacaccctgcagagcatgtacggctgcgacgtgggccccgacggcagactgctgagaggccacgaccagtacgcctacgacggcaaggactacatcgccctgaacgaggacctgagaagctggaccgccgccgacaccgccgcccagatcacccagagaaagtgggaggccgccagagaggccgagcagagaagagcctacctggagggcgagtgcgtggagtggctgagaagatacctggagaacggcaaggacaagctggagagagccgacccccccaagacccacgtgacccaccaccccatcagcgaccacgaggccaccctgagatgctgggccctgggcttctaccccgccgagatcaccctgacctggcagagagacggcgaggaccagacccaggacaccgagctggtggagaccagacccgccggcgacagaaccttccagaagtgggccgccgtggtggtgcccagcggcgaggagcagagatacacctgccacgtgcagcacgagggcctgcccaagcccctgaccctgagatgggagcccagcagccagagcaccgtgcccatcgtgggcatcgtggccggcctggccgtgctggccgtggtggtgatcggcgccgtggtggccgccgtgatgtgcagaagaaagagcagcggcggcaagggcggcagctacagccaggccgcctgcagcgacagcgcccagggcagcgacgtgagcctgaccgcctag

SEQ ID NO: 156899 - DNA, 726 bp, Artificial Sequence
  derived and/or modified sequence
atgtacggctgcgacgtgggccccgacggcagactgctgagaggccacgaccagtacgcctacgacggcaaggactacatcgccctgaacgaggacctgagaagctggaccgccgccgacaccgccgcccagatcacccagagaaagtgggaggccgccagagaggccgagcagagaagagcctacctggagggcgagtgcgtggagtggctgagaagatacctggagaacggcaaggacaagctggagagagccgacccccccaagacccacgtgacccaccaccccatcagcgaccacgaggccaccctgagatgctgggccctgggcttctaccccgccgagatcaccctgacctggcagagagacggcgaggaccagacccaggacaccgagctggtggagaccagacccgccggcgacagaaccttccagaagtgggccgccgtggtggtgcccagcggcgaggagcagagatacacctgccacgtgcagcacgagggcctgcccaagcccctgaccctgagatgggagcccagcagccagagcaccgtgcccatcgtgggcatcgtggccggcctggccgtgctggccgtggtggtgatcggcgccgtggtggccgccgtgatgtgcagaagaaagagcagcggcggcaagggcggcagctacagccaggccgcctgcagcgacagcgcccagggcagcgacgtgagcctgaccgcctag

SEQ ID NO: 156900 - DNA, 1089 bp, Artificial Sequence
  derived and/or modified sequence
atgctggtcatggctccacgtactgtgttactactgctctccgccgcgcttgctctgaccgagacctgggccgggagccacagtatgcggtacttttatacgtcggtcagcaggcccggtagaggtgaaccccgcttcattagcgtcgggtacgtggacgatacacagttcgtccggttcgactcagatgccgcctccccccgcgaagagccacgggcaccctggatagagcaagaaggacccgagtattgggacaggaatactcaaatttacaaggcccaggcgcagactgacagagaaagccttcgcaacttgagaggttactacaatcaatccgaggcaggttcccataccttgcagagcatgtatggctgcgacgtcggacccgacggtaggttgcttcgcggacacgatcaatacgcctatgatggaaaggattatattgccttgaatgaggatctgcggtcatggacagcggctgacacggcagcacagatcacacagcgcaagtgggaggcagcaagagaagctgaacaaagaagagcttatctcgaaggggaatgcgtggagtggctgcggaggtaccttgagaacgggaaagacaagcttgagagggccgatccacctaaaactcacgtgactcatcacccaatttcagaccacgaggcaacactgagatgctgggctctggggttttaccccgccgaaattaccctcacatggcagagggatggcgaggaccagacccaggatacagagctggtggaaactcgtccggcaggtgacagaaccttccagaaatgggcggccgtggtggtgcctagcggagaggaacagcggtacacttgccacgtccagcatgaaggtctgcctaagcctttaacactgcggtgggagcccagcagccagagtaccgtcccaattgtgggtatcgtggctggcttagctgtgctggccgttgttgtgattggtgctgtggtggcagcagttatgtgtagaaggaaatctagcggaggaaagggggggtcttactcacaggctgcttgcagcgactcagcccagggaagtgatgtatccttaacggcctag

SEQ ID NO: 156901 - DNA, 726 bp, Artificial Sequence
  derived and/or modified sequence
atgtacggatgcgacgtcggccctgatggaagactcctcagagggcatgaccaatatgcctatgacggcaaagactatattgctctgaatgaggacttgcgcagctggaccgctgcggacacggccgctcagataacccagcggaagtgggaggccgccagagaggccgagcaaagacgggcatacctggagggcgagtgcgtcgagtggttgagacgttacctggaaaatggcaaagataaacttgaacgggccgacccccccaaaacacacgtgacccaccatccaatctcagaccacgaagcgacgctgagatgttgggccctgggcttctatcctgcagagatcacccttacgtggcagcgtgatggcgaagaccagactcaggacactgagctggtggaaaccaggccggctggcgaccggacttttcagaaatgggccgccgtggtcgtgccctcgggagaagagcagaggtacacctgtcatgtgcaacatgagggacttcccaaaccacttacattacgttgggaacctagctctcagtctacagtcccaattgttggtatcgtggctggcctggccgtcctggcagtggtcgtgataggggctgtcgttgcagccgttatgtgtcgtcgaaagagctctggaggaaagggtggctcctactcccaagctgcatgcagcgactcagcccagggctctgacgtcagcttaaccgcttag

SEQ ID NO: 156902 - DNA, 1547 bp, Artificial Sequence
  derived and/or modified sequence
ccggactcagagtctcctcagacgccgagatgctggtcatggcgccccgaaccgtcctcctgctgctctcggcggccctggccctgaccgagacctgggccggctcccactccatgaggtatttctacacctccgtgtcccggcccggccgcggggagccccgcttcatctcagtgggctacgtggacgacacccagttcgtgaggttcgacagcgacgccgcgagtccgagagaggagccgcgggcgccgtggatagagcaggaggggccggagtattgggaccggaacacacagatctacaaggcccaggcacagactgaccgagagagcctgcggaacctgcgcggctactacaaccagagcgaggccgggtctcacaccctccagagcatgtacggctgcgacgtggggccggacgggcgcctcctccgcgggcatgaccagtacgcctacgacggcaaggattacatcgccctgaacgaggacctgcgctcctggaccgccgcggacacggcggctcagatcacccagcgcaagtgggaggcggcccgtgaggcggagcagcggagagcctacctggagggcgagtgcgtggagtggctccgcagatacctggagaacgggaaggacaagctggagcgcgctgaccccccaaagacacacgtgacccaccaccccatctctgaccatgaggccaccctgaggtgctgggccctgggtttctaccctgcggagatcacactgacctggcagcgggatggcgaggaccaaactcaggacactgagcttgtggagaccagaccagcaggagatagaaccttccagaagtgggcagctgtggtggtgccttctggagaagagcagagatacacatgccatgtacagcatgaggggctgccgaagcccctcaccctgagatgggagccgtcttcccagtccaccgtccccatcgtgggcattgttgctggcctggctgtcctagcagttgtggtcatcggagctgtggtcgctgctgtgatgtgtaggaggaagagttcaggtggaaaaggagggagctactctcaggctgcgtgcagcgacagtgcccagggctctgatgtgtctctcacagcttgaaaagcctgagacagctgtcttgtgagggactgagatgcaggatttcttcacgcctcccctttgtgacttcaagagcctctggcatctctttctgcaaaggcacctgaatgtgtctgcgtccctgttagcataatgtgaggaggtggagagacagcccacccttgtgtccactgtgacccctgttcccatgctgacctgtgtttcctccccagtcatctttcttgttccagagaggtggggctggatgtctccatctctgtctcaactttacgtgcactgagctgcaacttcttacttccctactgaaaataagaatctgaatataaatttgttttctcaaatatttgctatgagaggttgatggattaattaaataagtcaattcctggaatttgagagagcaaataaagacctgagaaccttccagaa

SEQ ID NO: 156903 - DNA, 1008 bp, Artificial Sequence
  derived and/or modified sequence
agatgctggtcatggcgccccgaaccgtcctcctgctgctctcggcggccctggccctgaccgagacctgggccggctcccactccatgaggtatttctacacctccgtgtcccggcccggccgcggggagccccgcttcatctcagtgggctacgtggacgacacccagttcgtgaggttcgacagcgacgccgcgagtccgagagaggagccgcgggcgccgtggatagagcaggaggggccggagtattgggaccggaacacacagatctacaaggcccaggcacagactgaccgagagagcctgcggaacctgcgcggctactacaaccagagcgaggccgggtctcacaccctccagagcatgtacggctgcgacgtggggccggacgggcgcctcctccgcgggcatgaccagtacgcctacgacggcaaggattacatcgccctgaacgaggacctgcgctcctggaccgccgcggacacggcggctcagatcacccagcgcaagtgggaggcggcccgtgaggcggagcagcggagagcctacctggagggcgagtgcgtggagtggctccgcagatacctggagaacgggaaggacaagctggagcgcgctgatcaggagcagaagtccctgttccccgctcagagactcgaactttccaatgaataggagattatcccagaccccccaaagacacacgtgacccaccaccccatctctgaccatgaggccaccctgaggtgctgggccctgggtttctaccctgcggagatcacactgacctggcagcgggatggcgaggaccaaactcaggacactgagcttgtggagaccagaccagcaggagatagaaccttccagaagtgggcagctgtggtggtgccttctggagaagagcagagatacacatgccatgtacagcatgaggggctgccgaagcccctcaccctgagatgggagccgtcttcccagtccaccgtccccatcgtgggcattgttg

SEQ ID NO: 156904 - DNA, 1406 bp, Artificial Sequence
  derived and/or modified sequence
agagtctcctcagacgccgagatgctggtcatggcgccccgaaccgtcctcctgctgctctcggcggccctggccctgaccgagacctgggccggctcccactccatgaggtatttctacacctccgtgtcccggcccggccgcgggcgccgtggatagagcaggaggggccggagtattgggaccggaacacacagatctacaaggcccaggcacagactgaccgagagagcctgcggaacctgcgcggctactacaaccagagcgaggccgggtctcacaccctccagagcatgtacggctgcgacgtggggccggacgggcgcctcctccgcgggcatgaccagtacgcctacgacggcaaggattacatcgccctgaacgaggacctgcgctcctggaccgccgcggacacggcggctcagatcacccagcgcaagtgggaggcggcccgtgaggcggagcagcggagagcctacctggagggcgagtgcgtggagtggctccgcagatacctggagaacgggaaggacaagctggagcgcgctgaccccccaaagacacacgtgacccaccaccccatctctgaccatgaggccaccctgaggtgctgggccctgggtttctaccctgcggagatcacactgacctggcagcgggatggcgaggaccaaactcaggacactgagcttgtggagaccagaccagcaggagatagaaccttccagaagtgggcagctgtggtggtgccttctggagaagagcagagatacacatgccatgtacagcatgaggggctgccgaagcccctcaccctgagatgggagccgtcttcccagtccaccgtccccatcgtgggcattgttgctggcctggctgtcctagcagttgtggtcatcggagctgtggtcgctgctgtgatgtgtaggaggaagagttcaggtggaaaaggagggagctactctcaggctgcgtgcagcgacagtgcccagggctctgatgtgtctctcacagcttgaaaagcctgagacagctgtcttgtgagggactgagatgcaggatttcttcacgcctcccctttgtgacttcaagagcctctggcatctctttctgcaaaggcacctgaatgtgtctgcgtccctgttagcataatgtgaggaggtggagagacagcccacccttgtgtccactgtgacccctgttcccatgctgacctgtgtttcctccccagtcatctttcttgttccagagaggtggggctggatgtctccatctctgtctcaactttacgtgcactgagctgcaacttcttacttccctactgaaaataagaatctgaatataaatttgttttctcaaatatttgctatgagaggttgatggattaattaaataagtcaattcct

SEQ ID NO: 156905 - DNA, 1089 bp, Artificial Sequence
  derived and/or modified sequence
atgctggtgatggcccccaggacagtgctgctgctgctgtctgctgccctggccctgacagagacctgggccggcagccacagcatgagatacttctacacctctgtgtccaggcctggccgcggggagccccgcttcatctctgtgggctacgtggatgacacccagtttgtgcgctttgacagtgatgctgccagcccccgggaggagccccgggccccctggattgagcaggagggccctgagtactgggacaggaacacccagatctacaaggcccaggcccagacagaccgggagagcctgaggaacctgcggggctactacaaccagagcgaggccggcagccacaccctgcagagcatgtatggctgtgatgtgggcccagatggccgcctgctgcggggccatgaccagtatgcctatgatggcaaggactacatcgccctgaatgaagacctgcgctcctggacagctgctgacacagctgcccagatcacccagaggaagtgggaggccgcccgggaggccgagcagaggcgggcctacctggagggagaatgtgtggagtggctgcggcgctacctggagaatggcaaggacaagctggagagagctgacccccccaagacccacgtgacccaccaccccatcagtgaccacgaggccaccctgcgctgctgggccctgggcttctacccagctgagatcaccctgacctggcagagagatggagaggaccagacccaggacacagagctggtggagaccaggcctgctggggacaggaccttccagaagtgggccgctgtggtggtgcccagcggggaggagcagcgctacacctgccacgtgcagcacgagggcctgcccaagcccctgaccctgcgctgggagcccagcagccagagcacagtgcccatcgtgggcatcgtggccggcctggccgtgctggccgtggtggtgattggagctgtggtggccgctgtgatgtgcaggaggaagagcagcggcggcaagggcggcagctacagccaggccgcctgcagcgacagcgcccagggcagtgatgtgtccctgacagcctag

SEQ ID NO: 156906 - DNA, 726 bp, Artificial Sequence
  derived and/or modified sequence
atgtatggctgtgatgtgggcccagatggccgcctgctgcggggccatgaccagtatgcctatgatggcaaggactacatcgccctgaatgaagacctgcgctcctggacagctgctgacacagctgcccagatcacccagaggaagtgggaggccgcccgggaggccgagcagaggcgggcctacctggagggggagtgtgtggagtggctgcggcgctacctggagaatggcaaggacaagctggagagagctgacccccccaagacccacgtgacccaccaccccatcagtgaccacgaggccaccctgcgctgctgggccctgggcttctacccagctgagatcaccctgacctggcagagagatggagaggaccagacccaggacacagagctggtggagaccaggcctgctggggacaggaccttccagaagtgggccgctgtggtggtgcccagcggggaggagcagcgctacacctgccacgtgcagcacgagggcctgcccaagcccctgaccctgcgctgggagcccagcagccagagcacagtgcccatcgtgggcatcgtggccggcctggccgtgctggccgtggtggtgattggagctgtggtggccgctgtgatgtgcaggaggaagagcagcggcggcaaaggaggcagctacagccaggccgcctgcagcgacagcgcccagggcagtgatgtgtccctgacagcctag

SEQ ID NO: 156907 - DNA, 1089 bp, Artificial Sequence
  derived and/or modified sequence
atgctggtgatggccccccggaccgtgctgctgctgctgagcgccgccctcgccttgacagaaacttgggccgggagtcactccatgcgctacttttatacttccgtgagtagacccggcagaggcgaaccccggttcattagcgtcgggtatgtggacgatactcaatttgtgaggttcgattctgacgcagcgagcccgcgcgaggaaccacgggccccttggattgaacaggaaggaccagaatactgggatagaaatacccagatctacaaagcccaggcccagacggacagggaaagcctccggaatctcagaggctactacaaccagtcggaggccgggagtcatacactgcagagcatgtacggttgcgacgtgggtcccgatggcagactgctcagagggcatgaccagtacgcgtacgatggaaaggattatatcgctctcaacgaggatctgagatcctggacagccgcggatacagccgcccagattacccagcgaaagtgggaggcggcgcgggaagctgaacagcgacgggcctacttagagggcgagtgtgttgagtggttgcggaggtatcttgagaacgggaaagacaagctggagcgagccgatcccccaaagacccacgtgactcaccatcccatcagcgaccacgaggccactctaagatgttgggccctcggtttttaccctgccgaaatcacacttacctggcagcgggatggagaggatcagactcaagataccgaattggtggaaactcgtccagccggggaccgaacatttcagaaatgggctgcggtagtggttccttcgggtgaagagcagcgatatacatgccacgtgcagcatgaaggtctgcctaagccactgacactgcggtgggagcctagctctcagtccaccgtccctattgtgggcatcgtcgccggactagccgtgctagcagtcgtggtgataggggcagtggtcgccgccgtgatgtgccggcgcaagagcagtggcggaaaaggcggctcatactcgcaggctgcttgttccgatagcgcccaaggcagcgatgtgtctctaactgcctag

SEQ ID NO: 156908 - DNA, 726 bp, Artificial Sequence
  derived and/or modified sequence
atgtacggctgcgacgtgggccccgacggccggctgctgcggggccatgatcagtacgcctatgacggcaaagactatatagccctgaacgaggatctccgaagctggactgctgccgacactgcggcccagataactcaaaggaaatgggaggctgctagagaagctgagcagcgaagagcatacctcgagggagagtgtgtagaatggttgcgcagatatctcgagaacggcaaagataagctcgagcgtgccgatccaccaaaaacccatgtgacccaccaccctattagcgaccatgaagctactctgcgttgttgggcgctaggcttttaccccgctgagattactctgacctggcagcgagatggtgaggaccaaacccaggatacggaacttgttgaaacccggcctgccggtgatcgcacctttcagaagtgggccgccgtggttgtgccatccggtgaggagcagcggtacacctgtcacgttcaacatgagggactgccaaagcccctaaccctgcgctgggaaccctcctcccaatccactgtaccaattgtcggcattgtcgccggcctggccgtgctagcagtagtggtgatcggagccgtcgtggccgccgtgatgtgccgccggaaatcttccggcggaaagggcgggtcttactctcaagccgcttgtagtgacagcgcacaagggagtgatgtttcactgaccgcctag

SEQ ID NO: 156909 - DNA, 1089 bp, Artificial Sequence
  derived and/or modified sequence
atgctggttatggctccccgtaccgtgctcctgctgctgtcagccgctcttgccctgaccgaaacttgggcgggttcacactccatgagatatttttacacatccgtttcacgcccaggccgtggcgaacctagatttatcagcgtgggatatgtagatgacactcaatttgtgcggttcgacagcgacgctgcctctccacgcgaggagcctagagctccttggatcgagcaagagggacctgaatattgggaccgaaatactcagatttacaaagcccaggctcagactgatcgggaaagcctgagaaatctgaggggatattacaatcaatccgaggcaggctctcacactctgcagagcatgtacggatgtgacgtcggacctgatggccgactgcttcgagggcatgaccaatatgcctatgacggcaaggattatatcgctctgaatgaagacctgcgtagttggacagcagccgacactgccgctcagattacgcagcggaagtgggaggctgcgcgtgaggccgagcagaggcgcgcatacctggaaggagagtgcgttgaatggctccggagatacttggaaaatggcaaagataagctcgagcgggcagatcccccaaagacgcacgtgactcaccaccccatcagcgaccacgaggctacactgcgctgctgggctctgggattctaccccgcagagattacactgacctggcaaagggacggagaggatcagacacaggataccgagctcgtcgaaacccgtccagccggagacaggacatttcagaagtgggcagccgtggtcgtcccctctggagaagagcaaagatatacttgccacgtgcaacacgaaggattgccaaagccgctgactctgaggtgggaaccttcatcgcagtccactgttccaatagttgggattgtggccggtttagccgtgctagctgtggtcgtaatcggggcagtagtcgccgcagttatgtgtaggaggaagagttctggcggtaagggcggatcttattcccaagccgcttgttccgacagtgcgcaggggtccgatgtgtcgttgactgcgtag

SEQ ID NO: 156910 - DNA, 726 bp, Artificial Sequence
  derived and/or modified sequence
atgtacggctgtgacgtgggtcccgatgggagactcttacgtggtcacgatcagtatgcctatgacggaaaagattacattgcgctcaacgaagacctccgctcgtggaccgctgcagacaccgcagctcagatcacacagcgaaaatgggaggccgcacgggaggccgagcagcgtcgcgcatatcttgaaggagagtgcgtggaatggttgaggcggtatctcgagaatgggaaagacaagctggaacgtgctgatccgcctaaaactcacgttacccatcatcccattagtgaccacgaagcaaccttgagatgttgggccctcgggttttatcccgcagaaatcactctaacttggcagcgagatggtgaagaccagacgcaggatacagagctggtggaaacgagaccggcaggggatagaaccttccagaagtgggcggctgtcgtggtcccctctggtgaagaacagagatatacttgccacgtccaacatgaaggcttaccaaagcccctgactttgcgttgggagccatcctctcaatctaccgttcctattgtgggcattgtagctggccttgccgtgttggccgtggtcgtgataggagctgttgtggcagcagttatgtgtcgacgcaagtcttctgggggtaaaggcggatcctattcacaggctgcttgctcagactctgcacagggctctgacgtttcactgactgcctag

SEQ ID NO: 156911 - DNA, 1578 bp, Artificial Sequence
  derived and/or modified sequence
agttctaaagtccccacgcacccacccggactcagagtctcctcagacgccgagatgctggtcatggcgccccgaaccgtcctcctgctgctctcggcggccctggccctgaccgagacctgggccggctcccactccatgaggtatttctacacctccgtgtcccggcccggccgcggggagccccgcttcatctcagtgggctacgtggacgacacccagttcgtgaggttcgacagcgacgccgcgagtccgagagaggagccgcgggcgccgtggatagagcaggaggggccggagtattgggaccggaacacacagatctacaaggcccaggcacagactgaccgagagagcctgcggaacctgcgcggctactacaaccagagcgaggccgggtctcacaccctccagagcatgtacggctgcgacgtggggccggacgggcgcctcctccgcgggcatgaccagtacgcctacgacggcaaggattacatcgccctgaacgaggacctgcgctcctggaccgccgcggacacggcggctcagatcacccagcgcaagtgggaggcggcccgtgaggcggagcagcggagagcctacctggagggcgagtgcgtggagtggctccgcagatacctggagaacgggaaggacaagctggagcgcgctgaccccccaaagacacacgtgacccaccaccccatctctgaccatgaggccaccctgaggtgctgggccctgggtttctaccctgcggagatcacactgacctggcagcgggatggcgaggaccaaactcaggacactgagcttgtggagaccagaccagcaggagatagaaccttccagaagtgggcagctgtggtggtgccttctggagaagagcagagatacacatgccatgtacagcatgaggggctgccgaagcccctcaccctgagatgggagccgtcttcccagtccaccgtccccatcgtgggcattgttgctggcctggctgtcctagcagttgtggtcatcggagctgtggtcgctgctgtgatgtgtaggaggaagagttcaggtggaaaaggagggagctactctcaggctgcgtgcagcgacagtgcccagggctctgatgtgtctctcacagcttgaaaagcctgagacagctgtcttgtgagggactgagatgcaggatttcttcacgcctcccctttgtgacttcaagagcctctggcatctctttctgcaaaggcacctgaatgtgtctgcgtccctgttagcataatgtgaggaggtggagagacagcccacccttgtgtccactgtgacccctgttcccatgctgacctgtgtttcctccccagtcatctttcttgttccagagaggtggggctggatgtctccatctctgtctcaactttacgtgcactgagctgcaacttcttacttccctactgaaaataagaatctgaatataaatttgttttctcaaatatttgctatgagaggttgatggattaattaaataagtcaattcctggaatttgagagagcaaataaagacctgagaaccttccagaaaaaaaa

SEQ ID NO: 156912 - protein, 401 aa, Artificial Sequence
  derived and/or modified sequence
MEKSKNFRIDALLAVDPPRAASAQSAPLALVTSLAAAASGTGGGGGGGGASGGTSGSCSPASSEPPAAPADRLRAESPSPPRLLAAHCALLPKPGFLGAGGGGGGTGGGHGGPHHHAHPGAAAAAAAAAAAAAAGGLALGLHPGGAQGGAGLPAQAALYGHPVYGYSAAAAAAALAGQHPALSYSYPQVQGAHPAHPADPIKLGAGTFQLDQWLRASTAGMILPKMPDFNSQAQSNLLGKCRRPRTAFTSQQLLELEHQFKLNKYLSRPKRFEVATSLMLTETQVKIWFQNRRMKWKRSKKAKEQAAQEAEKQKGGGGGAGKGGAEEPGAEELLGPPAPGDKGSGRRLRDLRDSDPEEDEDEDDEDHFPYSNGASVHAASSDCSSEDDSPPPRPSHQPAPQ

SEQ ID NO: 156913 - protein, 231 aa, Artificial Sequence
  derived and/or modified sequence
AAAALAGQHPALSYSYPQVQGAHPAHPADPIKLGAGTFQLDQWLRASTAGMILPKMPDFNSQAQSNLLGKCRRPRTAFTSQQLLELEHQFKLNKYLSRPKRFEVATSLMLTETQVKIWFQNRRMKWKRSKKAKEQAAQEAEKQKGGGGGAGKGGAEEPGAEELLGPPAPGDKGSGRRLRDLRDSDPEEDEDEDDEDHFPYSNGASVHAASSDCSSEDDSPPPRPSHQPAPQ

SEQ ID NO: 156914 - DNA, 2176 bp, Artificial Sequence
  derived and/or modified sequence
cagcggcctccgcgcggtcgcctgagggctgcagcgcaaagaaccgggctcccgggcccggacgcggggaagcactcgcgtgggagtttgtgcgagcgcggcccggggcggggcccgcacggaggaggcgccgggaccatggtcaccctcggctgagtttccggcggcgactttgattattggcaaataaccaccataacaataccgagcccccgggcttgcaccgcacgcactgactccgcgagcccgcacacggccgcgtcgcccgccaccgggccctgagcgccagccccaaacgagccgatggaaaaatccaaaaatttccgcatcgacgccctgctggcggtggaccccccacgagccgcctctgcgcagagcgcgccgctggccttggtcacgtcgctcgccgccgccgcatctggcaccggaggtggcggcggcggcggcggggcgagcggcgggactagcggcagctgcagccccgcgtcctcggagccgccggctgcgcccgccgaccgcctgcgcgccgagagcccgtcgccgccgcgcctgctggccgcgcactgcgcgctgctgcccaagccgggcttcctgggcgcgggcggcggcggcggcggcacgggcggcgggcacggggggccccaccaccacgcgcatccgggcgcagcggccgctgccgccgccgccgccgccgccgccgccgctgggggcctggcgctggggctgcaccctgggggcgcgcagggcggcgcgggcctcccggcgcaggcggcgctctacggccacccggtctacggctactccgcggcggcggcggcggctgcgctggcgggccagcacccggcgctctcctactcgtacccgcaggtgcaaggcgcgcaccccgcgcaccccgccgaccccatcaagctgggcgccggcaccttccagctggaccagtggctgcgcgcgtccaccgcgggcatgatcctgcctaagatgcccgacttcaactcccaggcgcagtcgaacctcctggggaagtgccgccggccgcgcaccgccttcaccagccagcagctgctggagctggagcaccagttcaagctcaacaagtacctgtcgcggcccaagcgcttcgaggtggccacctcgctcatgctcaccgagacccaggtgaagatttggttccagaaccggcggatgaaatggaaacgcagcaaaaaggccaaagagcaggcggcgcaggaagcggagaaacagaagggcggcggcgggggcgcggggaagggcggcgcggaggagccgggagccgaggagctgctggggccgccagcgcccggagacaagggcagcggacgccgcctgcgggacttgagggacagtgaccccgaggaggacgaggacgaggacgacgaggaccatttcccctacagcaacggcgccagcgtccacgccgcctcctccgactgctcctcggaggacgactcgccgcccccgcggcccagccaccagcccgcgccccagtaggagccccgcggcccagcaggtgcggcgcgcacggagcgccccggccggcggcttctcccggaggccccggcgcccgcacccacccggcccggccccgagagcaggctcgaccgccgccccatggacccctcgcccaggccggggctggagggattcggccgcggctccggtcctgggcgcttcccttttaagcaagggcgcctcacctgctcttcaagaaacagcgagagggagacccagggggctgaaacttgaactctggttcttttaaaattaattttggttggtgttgggggaggcgcgagtgcgtgtgagaagaaccgacccaccccgcgcaaggggaagcctcctgtctcccctttccccgcgtccgagaaggcggaaacccacagtgttacctgacttatgaaacttgaaaccgcctctggagccgccattctgcagagtatttggaaaaagaaaaaagggtttatgcttacgtctctggggtcggggggattatgtcacgagcgttcaaactgctggaaatctcaaaactgtactgtctttatttttgtatattgtatttatatataaaaagaaacgtctacgtatgcatgctaaattattatttagcttctcccatcgcccacgatggaatgtaaaataaattggttttgtactggat

SEQ ID NO: 156915 - DNA, 1206 bp, Artificial Sequence
  derived and/or modified sequence
atggaaaaaagcaaaaattttaggatcgatgcattgctggcagtggacccacctcgagcagcatcggcccagagtgctcccctcgcattggtaacatccctggctgcggcagccagcggcacaggggggggaggaggtggcggaggtgccagcggagggacctccggcagttgcagtcccgcgtctagcgagcctccagcagcaccagccgatcgtctgagggctgaaagtccatcccccccgaggctgctggccgctcactgcgctttactaccaaagcccggctttctaggggccggggggggtggggggggcaccgggggggggcatggtggaccacatcaccatgcacaccccggcgctgctgctgctgcagctgccgcggccgctgccgctgccgctgggggactcgccctgggtttgcaccccggtggtgcccagggaggcgctggcctcccagcccaggcggcattgtacggacaccctgtgtacggttacagtgcggccgctgcagccgcagcattggccggtcaacaccctgctctgagttattcataccctcaagtgcagggggcacacccagcccaccccgcggaccctattaagctgggggctggcacctttcaattggaccaatggctgagagctagtacagctgggatgatactgcctaagatgcctgatttcaacagtcaggctcagtccaatttattaggcaagtgtcggcgccccagaacagcgtttaccagtcaacagctattggaacttgaacatcagtttaagctaaacaagtacctcagccgccccaaaaggtttgaggttgccacctcgctgatgctgaccgagacacaagtgaaaatttggtttcagaaccgacgcatgaagtggaagcggtccaaaaaagctaaggagcaggcagctcaggaggcagagaagcagaagggcgggggcggaggggccggaaagggtggggcagaagaaccaggtgcagaggaactgctgggtcctccagccccgggggacaaggggtcaggaagacgcctccgagatctcagggacagtgatccggaagaggacgaagacgaagacgacgaagaccattttccctatagcaacggggcgagtgtgcatgcagcaagtagcgactgctcatcagaggacgactctcctcctcctcgcccgagtcatcagccggccccgcaatag

SEQ ID NO: 156916 - DNA, 696 bp, Artificial Sequence
  derived and/or modified sequence
gccgcagctgcgctggctgggcagcacccagcgctgagttactcctatccgcaggttcagggcgcgcatcctgcacaccccgccgatcccatcaaactgggcgctggcacgtttcagttagaccagtggcttagagcaagcaccgcagggatgatcctgcctaagatgccagactttaattctcaagcccagtcgaaccttctgggaaaatgtcggcggccccgcacagcgttcacctcacagcaattgcttgagctggagcatcagtttaagctcaacaaatacctgtcaaggcctaaaagattcgaggtcgctaccagcttgatgctcacagaaacgcaggtgaagatctggttccagaatagacgtatgaaatggaaaaggtccaagaaggcgaaggagcaagcagcccaggaggccgagaaacagaaggggggcggcgggggggccggtaaggggggtgcggaggagcctggcgccgaagaactgctcggaccccccgcccccggggacaaagggtctgggagaaggctgcgtgacctgcgagactcagaccctgaggaggatgaagatgaagatgatgaagatcatttcccatactccaatggggctagcgtacacgccgcctcctcagattgttcaagtgaggatgactctccaccaccaaggccttcacatcagccagccccgcaatag

SEQ ID NO: 156917 - DNA, 1206 bp, Artificial Sequence
  derived and/or modified sequence
atggagaagagcaagaacttcagaattgatgccctgctggccgtggaccccccccgggccgccagcgcccagagcgcccccctggccctggtgaccagcctggccgctgctgccagcggcactggaggcggcggcggcggcggcggggccagcggcggcaccagcggcagctgcagccctgccagcagcgagcccccagctgccccagctgaccggctgcgggcagagagccccagccccccccggctgctggccgcccactgtgccctgctgcccaagccaggcttcctgggcgccggcggcggcggcggcggcaccggcggcggccacggcggcccccaccaccacgcccaccctggagctgctgctgctgctgctgctgctgctgctgctgctgctgctgggggcctggccctgggcctgcaccctggaggagcccagggcggggccggcctgcctgcccaggccgccctgtatggccaccctgtgtatggctacagcgctgctgctgctgctgctgccctggccggccagcacccagccctgagctacagctacccccaggtgcagggcgcccacccagcccaccctgctgaccccatcaagctgggcgccggcaccttccagctggaccagtggctgcgggccagcacagctggcatgatcctgcccaagatgccagacttcaacagccaggcccagagcaacctgctgggcaagtgccggcggcccaggacagccttcaccagccagcagctgctggagctggagcaccagttcaagctgaacaagtacctgagccggcccaagagatttgaggtggccaccagcctgatgctgacagagacccaggtgaagatctggttccagaacagaaggatgaagtggaagaggagcaagaaggccaaggagcaggccgcccaggaggccgagaagcagaagggcggcggcggcggggccggcaagggcggcgctgaggagcccggggctgaggagctgctgggccccccagcccctggggacaagggcagcggccggcggctgcgggacctgcgggacagcgaccctgaggaggatgaagatgaagatgatgaggaccacttcccctacagcaatggagcctctgtgcacgccgccagcagtgactgcagcagtgaagatgacagccccccaccccggcccagccaccagcctgccccccagtag

SEQ ID NO: 156918 - DNA, 696 bp, Artificial Sequence
  derived and/or modified sequence
gctgctgctgccctggccggccagcacccagccctgagctacagctacccccaggtgcagggcgcccacccagcccaccctgctgaccccatcaagctgggcgccggcaccttccagctggaccagtggctgcgggccagcacagctggcatgatcctgcccaagatgccagacttcaacagccaggcccagagcaacctgctgggcaagtgccggcggcccaggacagccttcaccagccagcagctgctggagctggagcaccagttcaagctgaacaagtacctgagccggcccaagagatttgaggtggccaccagcctgatgctgacagagacccaggtgaagatctggttccagaacagaaggatgaagtggaagaggagcaagaaggccaaggagcaggccgcccaggaggccgagaagcagaagggcggcggcggcggggccggcaagggcggcgctgaggagcccggggctgaggagctgctgggccccccagcccctggggacaagggcagcggccggcggctgcgggacctgcgggacagcgaccctgaggaggatgaagatgaagatgatgaggaccacttcccctacagcaatggagcctctgtgcacgccgccagcagtgactgcagcagtgaagatgacagccccccaccccggcccagccaccagcctgccccccagtag

SEQ ID NO: 156919 - DNA, 2068 bp, Artificial Sequence
  derived and/or modified sequence
cggggcccgcacggaggaggcgccgggaccatggtcaccctcggctgagtttccggcggcgactttgattattggcaaataaccaccataacaataccgagcccccgggcttgcaccgcacgcactgactccgcgagcccgcacacggccgcgtcgcccgccaccgggccctgagcgccagccccaaacgagccgatggaaaaatccaaaaatttccgcatcgacgccctgctggcggtggaccccccacgagccgcctctgcgcagagcgcgccgctggccttggtcacgtcgctcgccgccgccgcatctggcaccggaggtggcggcggcggcggcggggcgagcggcgggactagcggcagctgcagccccgcgtcctcggagccgccggctgcgcccgccgaccgcctgcgcgccgagagcccgtcgccgccgcgcctgctggccgcgcactgcgcgctgctgcccaagccgggcttcctgggcgcgggcggcggcggcggcggcacgggcggcgggcacggggggccccaccaccacgcgcatccgggcgcagcggccgctgccgccgccgccgccgccgccgccgccgctgggggcctggcgctggggctgcaccctgggggcgcgcagggcggcgcgggcctcccggcgcaggcggcgctctacggccacccggtctacggctactccgcggcggcggcggcggctgcgctggcgggccagcacccggcgctctcctactcgtacccgcaggtgcaaggcgcgcaccccgcgcaccccgccgaccccatcaagctgggcgccggcaccttccagctggaccagtggctgcgcgcgtccaccgcgggcatgatcctgcctaagatgcccgacttcaactcccaggcgcagtcgaacctcctggggaagtgccgccggccgcgcaccgccttcaccagccagcagctgctggagctggagcaccagttcaagctcaacaagtacctgtcgcggcccaagcgcttcgaggtggccacctcgctcatgctcaccgagacccaggtgaagatttggttccagaaccggcggatgaaatggaaacgcagcaaaaaggccaaagagcaggcggcgcaggaagcggagaaacagaagggcggcggcgggggcgcggggaagggcggcgcggaggagccgggagccgaggagctgctggggccgccagcgcccggagacaagggcagcggacgccgcctgcgggacttgagggacagtgaccccgaggaggacgaggacgaggacgacgaggaccatttcccctacagcaacggcgccagcgtccacgccgcctcctccgactgctcctcggaggacgactcgccgcccccgcggcccagccaccagcccgcgccccagtaggagccccgcggcccagcaggtgcggcgcgcacggagcgccccggccggcggcttctcccggaggccccggcgcccgcacccacccggcccggccccgagagcaggctcgaccgccgccccatggacccctcgcccaggccggggctggagggattcggccgcggctccggtcctgggcgcttcccttttaagcaagggcgcctcacctgctcttcaagaaacagcgagagggagacccagggggctgaaacttgaactctggttcttttaaaattaattttggttggtgttgggggaggcgcgagtgcgtgtgagaagaaccgacccaccccgcgcaaggggaagcctcctgtctcccctttccccgcgtccgagaaggcggaaacccacagtgttacctgacttatgaaacttgaaaccgcctctggagccgccattctgcagagtatttggaaaaagaaaaaagggtttatgcttacgtctctggggtcggggggattatgtcacgagcgttcaaactgctggaaatctcaaaactgtactgtctttatttttgtatattgtatttatatataaaaagaaacgtctacgtatgcatgctaaattattatttagcttctcccatcgcccacgatggaatgtaaaataaattggttttgtactggat

SEQ ID NO: 156920 - DNA, 2029 bp, Artificial Sequence
  derived and/or modified sequence
ggcgcgggtccccaccacggcggcagcggcctccgcgcggtcgcctgagggctgcagcgcaaagaaccgggctcccgggcccggacgcggggaagcactcgcgtgggagtttgtgcgagcgcggcccggggcggggcccgcacggaggaggcgccgggaccatggtcaccctcggctgagtttccggcggcgactttgattattggcaaataaccaccataacaataccgagcccccgggcttgcaccgcacgcactgactccgcgagcccgcacacggccgcgtcgcccgccaccgggccctgagcgccagccccaaacgagccgatggaaaaatccaaaaatttccgcatcgacgccctgctggcggtggaccccccacgagccgcctctgcgcagagcgcgccgctggccttggtcacgtcgctcgccgccgccgcatctggcaccggaggtggcggcggcggcggcggggcgagcggcgggactagcggcagctgcagccccgcgtcctcggagccgccggctgcgcccgccgaccgcctgcgcgccgagagcccgtcgccgccgcgcctgctggccgcgcactgcgcgctgctgcccaagccgggcttcctgggcgcgggcggcggcggcggcggcacgggcggcgggcacggggggccccaccaccacgcgcatcccggcggcggctgcgctggcgggccagcacccggcgctctcctactcgtacccgcaggtgcaaggcgcgcaccccgcgcaccccgccgaccccatcaagctgggcgccggcaccttccagctggaccagtggctgcgcgcgtccaccgcgggcatgatcctgcctaagatgcccgacttcaactcccaggcgcagtcgaacctcctggggaagtgccgccggccgcgcaccgccttcaccagccagcagctgctggagctggagcaccagttcaagctcaacaagtacctgtcgcggcccaagcgcttcgaggtggccacctcgctcatgctcaccgagacccaggtgaagatttggttccagaaccggcggatgaaatggaaacgcagcaaaaaggccaaagagcaggcggcgcaggaagcggagaaacagaagggcggcggcgggggcgcggggaagggcggcgcggaggagccgggagccgaggagctgctggggccgccagcgcccggagacaagggcagcggacgccgcctgcgggacttgagggacagtgaccccgaggaggacgaggacgaggacgacgaggaccatttcccctacagcaacggcgccagcgtccacgccgcctcctccgactgctcctcggaggacgactcgccgcccccgcggcccagccaccagcccgcgccccagtaggagccccgcggcccagcaggtgcggcgcgcacggagcgccccggccggcggcttctcccggaggccccggcgcccgcacccacccggcccggccccgagagcaggctcgaccgccgccccatggacccctcgcccaggccggggctggagggattcggccgcggctccggtcctgggcgcttcccttttaagcaagggcgcctcacctgctcttcaagaaacagcgagagggagacccagggggctgaaacttgaactctggttcttttaaaattaattttggttggtgttgggggaggcgcgagtgcgtgtgagaagaaccgacccaccccgcgcaaggggaagcctcctgtctcccctttccccgcgtccgagaaggcggaaacccacagtgttacctgacttatgaaacttgaaaccgcctctggagccgccattctgcagagtatttggaaaaagaaaaaagggtttatgcttacgtctctggggtcggggggattatgtcacgagcgttcaaactgctggaaatctcaaaactgtactgtctttatttttgtatattgtatttatatataaaaagaaacgtctacgtatgcatgctaaattattatttagcttctcccatcgcccacgatggaatgtaaaataa

SEQ ID NO: 156921 - DNA, 1206 bp, Artificial Sequence
  derived and/or modified sequence
atggagaagagcaagaacttccggatcgacgccctgctggccgtggatccccctcgggcagcaagtgcccagtcagcgcctcttgctctcgtgacaagcttggccgccgctgctagtggaaccggcgggggcggcggaggcggtggagccagcggtggtacttctggatcgtgctctcccgccagtagcgaacccccagccgcgccagcggaccggctgagggctgagtctcccagtcctcctcgccttttagctgctcattgcgctttgctgcccaagccaggatttctaggcgcaggaggcggcggcggcggtaccggaggagggcacggagggccccatcaccatgcccatccaggagccgcagcagctgcggcagccgctgctgctgccgctgcggctggcggactcgctcttggcctgcacccaggaggggcacagggcggcgcagggctccccgcccaggccgcactgtacgggcacccagtgtatggttattcagccgcggcggctgccgctgcgctggcgggccagcaccctgcgctctcctatagctatccacaggtgcaaggagcccatcccgcgcaccccgcagatcctatcaagttaggcgccgggacgttccaattagaccagtggctgcgagcatccacagcggggatgattctgcctaagatgcccgacttcaactcacaggcgcagagcaacctgctggggaagtgcaggaggccaagaaccgctttcacatctcaacagcttcttgaactggagcatcagttcaagctcaacaaatacctgtctcggcctaagaggttcgaggttgccacatcgcttatgcttactgaaacgcaggtcaagatctggtttcaaaaccgccggatgaaatggaaaagatccaagaaagcaaaggagcaagcggcacaggaggcagaaaaacagaagggaggcggcggaggagctggtaagggtggggccgaggagcccggcgcggaggaattgctggggcctcctgccccaggcgataaagggtccggacgaaggttacgcgaccttagggacagcgaccctgaggaagacgaggacgaggatgatgaagaccacttcccctatagcaacggcgcttccgttcacgcagcgtccagcgattgctcctcagaggacgacagcccaccaccgcgcccgagccatcagccagcgccccagtag

SEQ ID NO: 156922 - DNA, 696 bp, Artificial Sequence
  derived and/or modified sequence
gccgccgccgccctggccggccagcaccccgccctgagctacagctatcctcaggtacagggggctcaccctgctcaccccgcagaccctataaaacttggagcaggaactttccagttggatcagtggctcagagcatccacggctggaatgattctccctaagatgcccgatttcaatagccaggcacaatcaaatttactgggaaagtgtaggaggccccgtaccgctttcacctcccagcagctcctggagttagaacatcaattcaagctaaacaaatacctgagtcggcccaagagattcgaggttgctacctcactgatgttgacagagactcaggtcaaaatctggttccagaaccgcagaatgaaatggaagcgctctaagaaggcgaaagaacaggcggcgcaagaggccgagaagcagaaggggggcggcggcggagcaggtaaggggggagccgaggagccaggcgccgaagagttactggggcctccagctcccggcgacaagggaagtggacgcaggttgcgagacctacgcgactctgaccccgaggaggacgaggacgaagacgacgaggaccactttccttattcaaacggcgcctccgtccacgctgcctctagcgattgcagcagcgaagacgatagtccacctcctcgcccttcacatcagcctgcccctcaatag

SEQ ID NO: 156923 - DNA, 1206 bp, Artificial Sequence
  derived and/or modified sequence
atggagaagtccaagaatttcagaattgacgccctcctggccgtcgacccacctcgggcagcatctgcacagtcagcccctttggctctggttacctctctggcagccgcagccagtggaacaggcggagggggtggcggaggtggtgcatcaggaggtaccagcggaagctgttctcccgctagcagtgaacctcctgctgcccctgccgaccgactgcgtgccgaatcacccagcccacccaggctgctggcggctcattgtgctcttctgccaaagcccggttttcttggagcgggaggcggaggcggtggaacaggcggaggacacgggggaccacatcatcacgcacatcccggtgccgcagccgctgcagctgccgcagcggcagccgcagccgctggtgggctggctctggggctgcaccctggcggagctcagggaggcgcaggtcttcctgcccaggcagcactctacggacatccagtctatggctattctgccgcagcagctgctgcagccctcgccggtcagcaccccgctctgagttactcttaccctcaggttcagggcgcacatccggcacacccagcggatcccatcaagctgggggcaggtacctttcagctggatcagtggttacgcgcttcaaccgcgggaatgatcctgcccaagatgccagatttcaactcccaggcacaatctaacctactgggtaaatgcagacgcccacgaacagcattcacctctcagcagcttctggaactcgagcaccagttcaaattaaataagtacctgagcaggcccaagagatttgaggtggctacctccctcatgctaacagaaacccaggtcaaaatctggttccagaacaggaggatgaagtggaaacgctccaaaaaggcaaaagagcaggcagctcaggaggccgaaaaacagaaaggcggtggcggtggagccggaaagggaggcgcagaggagccaggtgccgaagagctgctgggcccaccagctcccggagataagggttccgggcgaaggctacgagacctgagggattcagaccccgaggaagacgaggacgaggacgatgaagatcactttccatattccaacggtgccagcgtccacgccgcaagctcagactgttcatccgaagacgactcccctccaccaagacccagccaccagcccgcaccccaatag

SEQ ID NO: 156924 - DNA, 696 bp, Artificial Sequence
  derived and/or modified sequence
gcagcagccgctttggcgggtcaacacccggctctgtcatattcatacccacaggtgcagggtgctcaccctgctcatcccgcagaccccatcaaacttggtgctggaacctttcaactggatcagtggctgagagcctctactgcaggaatgatacttccaaagatgccagattttaattctcaggcacagtcaaatttgttgggaaaatgtaggcgtcccagaaccgcttttacatcccaacaactgcttgaactcgagcatcagtttaagctgaataagtacctgtcaaggccgaaacgctttgaggtcgcgaccagtctgatgctcacagaaacgcaagtaaaaatatggtttcaaaaccgtcggatgaaatggaagcggagtaagaaggccaaggagcaggccgctcaggaggcggaaaagcagaagggcggaggtggcggtgctggcaagggcggtgcggaggagcccggagcagaagagttgcttggcccaccagcccctggcgataagggcagtgggagaagactcagagatctgagggacagcgatcctgaagaggacgaagatgaggacgacgaagatcactttccgtattctaacggggcatctgtgcatgcggcaagctccgactgcagttcagaagacgatagtcccccacctcgtccaagccaccagcctgctccccagtag

SEQ ID NO: 156925 - DNA, 1206 bp, Artificial Sequence
  derived and/or modified sequence
atggagaagagcaagaacttcagaatcgacgccctgctggccgtggacccccccagagccgccagcgcccagagcgcccccctggccctggtgaccagcctggccgccgccgccagcggcaccggcggcggcggcggcggcggcggcgccagcggcggcaccagcggcagctgcagccccgccagcagcgagccccccgccgcccccgccgacagactgagagccgagagccccagcccccccagactgctggccgcccactgcgccctgctgcccaagcccggcttcctgggcgccggcggcggcggcggcggcaccggcggcggccacggcggcccccaccaccacgcccaccccggcgccgccgccgccgccgccgccgccgccgccgccgccgccgccggcggcctggccctgggcctgcaccccggcggcgcccagggcggcgccggcctgcccgcccaggccgccctgtacggccaccccgtgtacggctacagcgccgccgccgccgccgccgccctggccggccagcaccccgccctgagctacagctacccccaggtgcagggcgcccaccccgcccaccccgccgaccccatcaagctgggcgccggcaccttccagctggaccagtggctgagagccagcaccgccggcatgatcctgcccaagatgcccgacttcaacagccaggcccagagcaacctgctgggcaagtgcagaagacccagaaccgccttcaccagccagcagctgctggagctggagcaccagttcaagctgaacaagtacctgagcagacccaagagattcgaggtggccaccagcctgatgctgaccgagacccaggtgaagatctggttccagaacagaagaatgaagtggaagagaagcaagaaggccaaggagcaggccgcccaggaggccgagaagcagaagggcggcggcggcggcgccggcaagggcggcgccgaggagcccggcgccgaggagctgctgggcccccccgcccccggcgacaagggcagcggcagaagactgagagacctgagagacagcgaccccgaggaggacgaggacgaggacgacgaggaccacttcccctacagcaacggcgccagcgtgcacgccgccagcagcgactgcagcagcgaggacgacagccccccccccagacccagccaccagcccgccccccagtag

SEQ ID NO: 156926 - DNA, 696 bp, Artificial Sequence
  derived and/or modified sequence
gccgccgccgccctggccggccagcaccccgccctgagctacagctacccccaggtgcagggcgcccaccccgcccaccccgccgaccccatcaagctgggcgccggcaccttccagctggaccagtggctgagagccagcaccgccggcatgatcctgcccaagatgcccgacttcaacagccaggcccagagcaacctgctgggcaagtgcagaagacccagaaccgccttcaccagccagcagctgctggagctggagcaccagttcaagctgaacaagtacctgagcagacccaagagattcgaggtggccaccagcctgatgctgaccgagacccaggtgaagatctggttccagaacagaagaatgaagtggaagagaagcaagaaggccaaggagcaggccgcccaggaggccgagaagcagaagggcggcggcggcggcgccggcaagggcggcgccgaggagcccggcgccgaggagctgctgggcccccccgcccccggcgacaagggcagcggcagaagactgagagacctgagagacagcgaccccgaggaggacgaggacgaggacgacgaggaccacttcccctacagcaacggcgccagcgtgcacgccgccagcagcgactgcagcagcgaggacgacagccccccccccagacccagccaccagcccgccccccagtag

SEQ ID NO: 156927 - protein, 358 aa, Artificial Sequence
  derived and/or modified sequence
MVDGTLLLLLSEALALTQTWAGSHSLKYFHTSVSRPGRGEPRFISVGYVDDTQFVRFDNDAASPRMVPRAPWMEQEGSEYWDRETRSARDTAQIFRVNLRTLRGYYNQSEAGSHTLQWMHGCELGPDGRFLRGYEQFAYDGKDYLTLNEDLRSWTAVDTAAQISEQKSNDASEAEHQRAYLEDTCVEWLHKYLEKGKETLLHLEPPKTHVTHHPISDHEATLRCWALGFYPAEITLTWQQDGEGHTQDTELVETRPAGDGTFQKWAAVVVPSGEEQRYTCHVQHEGLPEPVTLRWKPASQPTIPIVGIIAGLVLLGSVVSGAVVAAVIWRKKSSGGKGGSYSKAEWSDSAQGSESHSL

SEQ ID NO: 156928 - protein, 358 aa, Artificial Sequence [sequence omitted]

SEQ ID NO: 156929 - protein, 399 aa, Artificial Sequence
  derived and/or modified sequence
MEPSFYSSRRPWPLPRPGRVSAGSGWKRPLPGVERGRPGGGEGLGEPRREEGRADLSPSSPPGSHSLKYFHTSVSRPGRGEPRFISVGYVDDTQFVRFDNDAASPRMVPRAPWMEQEGSEYWDRETRSARDTAQIFRVNLRTLRGYYNQSEAGSHTLQWMHGCELGPDRRFLRGYEQFAYDGKDYLTLNEDLRSWTAVDTAAQISEQKSNDASEAEHQRAYLEDTCVEWLHKYLEKGKETLLHLEPPKTHVTHHPISDHEATLRCWALGFYPAEITLTWQQDGEGHTQDTELVETRPAGDGTFQKWAAVVVPSGEEQRYTCHVQHEGLPEPVTLRWKPASQPTIPIVGIIAGLVLLGSVVSGAVVAAVIWRKKSSGGKGGSYSKAEWSDSAQGSESHSL

SEQ ID NO: 156930 - DNA, 1077 bp, Artificial Sequence
  derived and/or modified sequence
atggtggacggcaccctgctgctgctgctgagcgaggccctggccctgacccagacctgggccggcagccacagcctgaagtacttccacaccagcgtgagcagacccggcagaggcgagcccagattcatcagcgtgggctacgtggacgacacccagttcgtgagattcgacaacgacgccgccagccccagaatggtgcccagagccccctggatggagcaggagggcagcgagtactgggacagagagaccagaagcgccagagacaccgcccagatcttcagagtgaacctgagaaccctgagaggctactacaaccagagcgaggccggcagccacaccctgcagtggatgcacggctgcgagctgggccccgacggcagattcctgagaggctacgagcagttcgcctacgacggcaaggactacctgaccctgaacgaggacctgagaagctggaccgccgtggacaccgccgcccagatcagcgagcagaagagcaacgacgccagcgaggccgagcaccagagagcctacctggaggacacctgcgtggagtggctgcacaagtacctggagaagggcaaggagaccctgctgcacctggagccccccaagacccacgtgacccaccaccccatcagcgaccacgaggccaccctgagatgctgggccctgggcttctaccccgccgagatcaccctgacctggcagcaggacggcgagggccacacccaggacaccgagctggtggagaccagacccgccggcgacggcaccttccagaagtgggccgccgtggtggtgcccagcggcgaggagcagagatacacctgccacgtgcagcacgagggcctgcccgagcccgtgaccctgagatggaagcccgccagccagcccaccatccccatcgtgggcatcatcgccggcctggtgctgctgggcagcgtggtgagcggcgccgtggtggccgccgtgatctggagaaagaagagcagcggcggcaagggcggcagctacagcaaggccgagtggagcgacagcgcccagggcagcgagagccacagcctgtag

SEQ ID NO: 156931 - DNA, 1077 bp, Artificial Sequence
  derived and/or modified sequence
atggtggacggcaccctgctgctgctgctgagcgaggccctggccctgacccagacctgggccggcagccacagcctgaagtacttccacaccagcgtgagcagacccggcagaggcgagcccagattcatcagcgtgggctacgtggacgacacccagttcgtgagattcgacaacgacgccgccagccccagaatggtgcccagagccccctggatggagcaggagggcagcgagtactgggacagagagaccagaagcgccagagacaccgcccagatcttcagagtgaacctgagaaccctgagaggctactacaaccagagcgaggccggcagccacaccctgcagtggatgcacggctgcgagctgggccccgacagaagattcctgagaggctacgagcagttcgcctacgacggcaaggactacctgaccctgaacgaggacctgagaagctggaccgccgtggacaccgccgcccagatcagcgagcagaagagcaacgacgccagcgaggccgagcaccagagagcctacctggaggacacctgcgtggagtggctgcacaagtacctggagaagggcaaggagaccctgctgcacctggagccccccaagacccacgtgacccaccaccccatcagcgaccacgaggccaccctgagatgctgggccctgggcttctaccccgccgagatcaccctgacctggcagcaggacggcgagggccacacccaggacaccgagctggtggagaccagacccgccggcgacggcaccttccagaagtgggccgccgtggtggtgcccagcggcgaggagcagagatacacctgccacgtgcagcacgagggcctgcccgagcccgtgaccctgagatggaagcccgccagccagcccaccatccccatcgtgggcatcatcgccggcctggtgctgctgggcagcgtggtgagcggcgccgtggtggccgccgtgatctggagaaagaagagcagcggcggcaagggcggcagctacagcaaggccgagtggagcgacagcgcccagggcagcgagagccacagcctgtag

SEQ ID NO: 156932 - DNA, 1200 bp, Artificial Sequence
  derived and/or modified sequence
atggagcccagcttctacagcagcagaagaccctggcccctgcccagacccggcagagtgagcgccggcagcggctggaagagacccctgcccggcgtggagagaggcagacccggcggcggcgagggcctgggcgagcccagaagagaggagggcagagccgacctgagccccagcagcccccccggcagccacagcctgaagtacttccacaccagcgtgagcagacccggcagaggcgagcccagattcatcagcgtgggctacgtggacgacacccagttcgtgagattcgacaacgacgccgccagccccagaatggtgcccagagccccctggatggagcaggagggcagcgagtactgggacagagagaccagaagcgccagagacaccgcccagatcttcagagtgaacctgagaaccctgagaggctactacaaccagagcgaggccggcagccacaccctgcagtggatgcacggctgcgagctgggccccgacagaagattcctgagaggctacgagcagttcgcctacgacggcaaggactacctgaccctgaacgaggacctgagaagctggaccgccgtggacaccgccgcccagatcagcgagcagaagagcaacgacgccagcgaggccgagcaccagagagcctacctggaggacacctgcgtggagtggctgcacaagtacctggagaagggcaaggagaccctgctgcacctggagccccccaagacccacgtgacccaccaccccatcagcgaccacgaggccaccctgagatgctgggccctgggcttctaccccgccgagatcaccctgacctggcagcaggacggcgagggccacacccaggacaccgagctggtggagaccagacccgccggcgacggcaccttccagaagtgggccgccgtggtggtgcccagcggcgaggagcagagatacacctgccacgtgcagcacgagggcctgcccgagcccgtgaccctgagatggaagcccgccagccagcccaccatccccatcgtgggcatcatcgccggcctggtgctgctgggcagcgtggtgagcggcgccgtggtggccgccgtgatctggagaaagaagagcagcggcggcaagggcggcagctacagcaaggccgagtggagcgacagcgcccagggcagcgagagccacagcctgtag

SEQ ID NO: 156933 - DNA, 1077 bp, Artificial Sequence
  derived and/or modified sequence
atggtcgatggcaccttgctcctgcttctcagcgaggctctggctctgacccagacttgggctggaagtcatagtctgaaatattttcacacttctgtcagtcggccaggacgtggagaacccaggttcattagcgttggatacgtcgatgacacacaatttgttcgatttgataacgatgccgcgtccccacggatggttccaagggctccttggatggagcaggagggttccgaatactgggacagagaaacccgaagcgctcgcgatactgcacagatattccgggtgaatctgcgcacactcagaggatattacaatcaaagcgaggctggttctcacacacttcaatggatgcatggctgcgaactgggccctgacgggaggtttctcagaggctacgagcaattcgcctacgatggaaaagactatctcactctgaatgaagacctgaggtcatggacagcggttgacacagctgctcagattagcgagcagaaaagcaacgatgctagtgaagcagagcatcagagggcgtatctggaagatacctgcgtggagtggctgcacaagtatctggagaaaggtaaggaaacactgctgcatcttgaacctccaaagactcacgtgacccaccacccgattagcgaccacgaggcaacacttagatgttgggcgcttgggttctatcctgctgagatcaccctcacatggcagcaggacggagaagggcatacacaagacaccgagcttgtagaaaccaggcccgccggtgacggtacattccagaaatgggctgcggtggtagttccctcaggagaagagcagagatatacgtgccatgttcagcacgagggactgcctgagcccgttacgctgcggtggaaaccagcatctcaacctacaatcccaatcgtgggcatcatagcaggactcgtcctgctcggatccgttgtgtcaggagccgttgtggcagccgttatctggagaaagaagagcagcggtggaaaaggtggatcatacagcaaagctgagtggagtgattctgcccagggtagcgaatcacatagtctgtag

SEQ ID NO: 156934 - DNA, 1077 bp, Artificial Sequence
  derived and/or modified sequence
atggtggacggcaccctgttactgctgctgtcggaagcactcgctttgactcagacctgggcaggctctcatagcctcaaatacttccataccagtgtgtccagaccaggtagaggagagcctagatttataagcgtcgggtatgtggatgacacacagttcgttcggttcgacaacgatgctgccagccctaggatggtgcccagagccccctggatggaacaggaaggttcagagtattgggacagagagacccgcagcgccagagacacagcgcagattttccgggtcaacctgaggactctgaggggttattacaatcagagtgaagccggaagccacacccttcaatggatgcacgggtgtgagctgggccccgaccggcggtttctgcgcgggtacgagcaatttgcgtacgatgggaaagattacctgacactcaatgaagatctgaggtcctggaccgccgtcgacacggcagcccaaatatctgagcagaaatccaacgacgcttccgaggcagagcatcagcgggcatacttagaggacacatgcgtggaatggttgcataaataccttgaaaaagggaaggaaacattgctgcacctggagccacctaaaacacacgtcacccaccaccctatctcggatcacgaggccacgctacggtgttgggccctcggattctatccagctgagattacacttacttggcagcaggatggcgaagggcacacacaggacacggagctggtggagaccaggcctgcaggagatgggacattccagaaatgggctgccgtcgtcgtcccctccggggaggagcagagatacacctgtcatgtccagcacgaaggccttccagaaccggttacgcttagatggaaacccgcttcccagcctaccattcccatcgtggggataatcgctggacttgtgctgttggggtcggtggtgtccggcgccgttgtcgccgccgtgatttggcggaagaagtcttccggcggtaagggaggcagttactctaaagcagagtggtccgacagcgcccaggggagcgagtctcatagtctgtag

SEQ ID NO: 156935 - DNA, 1077 bp, Artificial Sequence
  derived and/or modified sequence
atggtggacgggacattgctcctgttgctctccgaggccctggcccttacccagacatgggctggctcgcacagcctcaaatatttccacacatctgtgtcccgacctggccgaggagagcccaggtttatctccgtggggtatgtggatgacacacagtttgttcgattcgacaacgacgccgctagccctcgcatggtgcccagggccccttggatggagcaggaggggagcgaatactgggatagggagacacgcagcgcccgggacacagcccagattttcagagtgaatcttcgaaccctgcggggctattacaatcaatcagaagctggttctcatactttgcagtggatgcacggatgtgagctggggccagatcggcgattcttacggggctatgaacagttcgcatatgatggtaaagactacctgacactcaacgaggatctgagaagctggacggcagttgacaccgctgcacagatttcagaacagaagagcaacgatgcttctgaggccgagcatcagcgggcctatttggaagatacttgtgttgagtggttgcacaagtatctggagaaggggaaggaaaccctgctccacctggagccaccaaagacacacgtgacccaccaccccatctctgatcacgaggccactttaagatgttgggccttgggattttaccctgccgagataacgttgacttggcagcaggatggagagggtcacactcaggataccgaattggtggagactcgcccggccggcgatggcactttccaaaagtgggctgccgttgtggtgcccagtggtgaggaacaacgttatacctgccatgtgcaacacgaggggcttccagagcctgtgactttacgatggaaacccgcatcacagccgacaatccctattgttgggatcatcgcgggacttgtgcttcttggctccgtggtctctggggccgtggtcgctgcagtgatttggcgtaagaagtcatccggaggcaaaggaggttcctatagtaaagcagagtggtccgattccgcacaggggtctgagagtcattccctttag

SEQ ID NO: 156936 - DNA, 1077 bp, Artificial Sequence
  derived and/or modified sequence
atggtggacggcactctgttactcctgctttccgaggcattagctctcactcagacttgggctggctctcacagcctgaagtactttcacacttctgtgagtcgtcccgggcgcggtgagcccaggtttatttcggttggctatgtggatgatacgcaattcgtgcggttcgacaatgacgcagcatctccccggatggtgccaagggcaccatggatggagcaggagggtagcgaatactgggatcgggaaacccgctctgcgagagacaccgctcagattttcagagtcaacctgcggactctgcgtggttattacaatcagtcagaggccggctctcatactctccagtggatgcacggatgcgaattgggcccggatcgccggttcctgcggggatacgaacaattcgcttacgatggcaaggattatctgacccttaatgaggaccttcggtcatggactgccgtagatactgcagctcaaatctctgagcagaaaagcaatgatgcctcagaagctgaacaccagagagcctatctcgaggatacatgtgtggagtggctccacaagtacctcgaaaaagggaaagagaccctgctgcatctcgaaccccccaagacccatgttactcaccaccccatttcagaccatgaggccactctgagatgttgggcgttgggattttatccagctgaaatcactctaacttggcaacaggacggagagggccatacccaagacacagagctagtggagaccaggcctgccggggacggcacttttcagaaatgggcagctgtggtcgtgcctagtggagaggagcagaggtacacctgccacgtgcaacacgaaggccttcccgaacctgtgactttgagatggaaacctgcgagtcaaccaaccattcctatcgtcgggattattgccggtctggtcctcttggggagtgtggtgtccggtgctgtggtggccgctgtaatttggaggaaaaaatcctctggaggcaaggggggcagctactcaaaagctgagtggtctgattctgcccaagggtcagagtcccatagcctgtag

SEQ ID NO: 156937 - DNA, 1077 bp, Artificial Sequence
  derived and/or modified sequence
atggtagacggcactctcctcctcctgcttagcgaggcattagcccttactcaaacctgggccggaagtcactccttgaagtatttccacacctcggtgtcacgtcctggcagaggcgagcccagattcataagtgtgggttacgtggacgacacccagtttgtgaggttcgacaatgacgctgcatcacctaggatggtgcctcgagctccatggatggagcaagaaggaagcgaatactgggatagggagacaagaagcgcacgggacactgcacagattttccgagttaacttgcggactctgaggggctattataatcaatccgaagctggatcgcacaccttgcagtggatgcacggatgtgagctagggcctgatggtcgatttttgcgtggatatgagcagtttgcctatgacggaaaggattacctaacactgaacgaggatctgcggagctggaccgccgtcgacaccgccgcccagatttcagaacagaagagtaatgatgcctccgaggcggaacatcagcgggcctatttagaggatacgtgtgtagagtggcttcacaaatatctggagaaaggcaaggagaccttactgcacctggaacctcccaagacacatgtgacccaccacccaataagcgatcatgaggccaccctcagatgttgggccctgggtttctatcccgccgaaattacactgacgtggcagcaggacggtgagggccacacccaggatactgaattggttgagacacggcccgccggagacggtaccttccaaaaatgggcagccgtagttgtgccttcaggtgaagagcagcgatacacctgtcacgtgcagcacgaaggattgccagaacccgtgacgctgcggtggaaacctgcctcacagcctaccattccaattgtcggaattatcgccggtctcgtcctgttaggatctgtggtatccggggccgtcgtagcagcggtgatttggcggaagaagtccagtggtggcaagggcggctcctattctaaggctgagtggagcgattctgcgcagggctctgaaagtcattccctctag

SEQ ID NO: 156938 - DNA, 1077 bp, Artificial Sequence
  derived and/or modified sequence
atggttgatggtaccctgttattgttgctatccgaagcacttgcgctgacacaaacgtgggcgggtagccattccctgaagtactttcacaccagcgtaagcagacccggccgtggggagcccagattcataagcgttggttatgttgacgatacacagttcgtccgcttcgataatgatgctgcgtcgcctcggatggttccacgagccccctggatggaacaggagggttctgagtactgggatcgcgagaccagatccgcccgggatacagcgcagatctttagagtaaatctgagaaccctgcgcggatactacaaccagtccgaggccggttcccacacgttacagtggatgcatgggtgtgagctggggcctgaccggaggtttttgagaggctatgaacaattcgcatatgatggcaaggactacctcacactgaacgaagacttaaggtcgtggacagcagttgacaccgctgctcagatctcggagcagaagagcaacgatgcctcagaagccgagcaccagcgcgcttaccttgaagatacatgcgtggagtggctacacaagtacctcgagaaagggaaagagacgctgctgcatctagaaccccccaaaacacacgtgacacaccatcctatctccgaccacgaggctaccctccgctgttgggcactgggcttttaccccgcggaaatcacactcacttggcagcaggacggggaagggcatacacaggatactgagctcgtcgaaactaggcccgctggggatggcaccttccaaaaatgggccgccgtggtggtgccttccggggaagaacaaaggtatacctgtcatgtccagcacgagggcctgccagagcctgtgacattgcgttggaagcctgcctcacagccaaccattcccatcgtcggaataatcgccggcctcgttcttctggggtccgtggtctctggcgccgtagtggccgccgttatctggcgcaagaaatcctcaggtgggaagggtgggtcatattccaaggctgagtggagtgatagtgcacagggaagtgaaagccactctctttag

SEQ ID NO: 156939 - DNA, 1077 bp, Artificial Sequence
  derived and/or modified sequence
atggtcgatggcacgttacttctgctattatccgaggctttggccctgacccagacctgggccggctcccactcgttaaagtacttccacactagcgtgtcccggccgggaaggggcgagcccagatttatctccgtcgggtacgttgacgatacccagttcgtaaggtttgataacgatgcagccagtccccggatggtgccacgggccccatggatggagcaagagggatctgaatactgggatcgtgaaacccggagcgctagagacacagcccagatctttagagtaaacctgcgcacccttcgaggttattacaatcaaagcgaagcgggctctcacactctccagtggatgcatggctgcgagttaggacccgatggaaggttcctcaggggctacgagcaatttgcttacgatggaaaggactatttaactctcaacgaggacctccgctcatggactgccgtcgatactgcggctcagatttcagaacagaagtctaacgatgcctcggaggctgagcaccagagagcttatctggaggacacatgcgtggagtggctgcacaaatatttggagaaaggtaaggaaacactcctgcaccttgagccaccaaagacacatgtgactcatcaccctatctccgatcatgaggcgactcttcgctgttgggccttggggttctacccagccgagattactctgacatggcagcaggacggcgaaggacatacccaagacaccgagttggtggagacacgtcctgccggagacggcactttccagaagtgggccgcagtagtggtcccatcgggcgaagagcaaagatatacctgccacgttcaacacgaggggttgcctgagcccgtcactcttcggtggaaacctgccagccagcctaccatcccaattgtgggcatcatcgctgggctggtgttactggggagtgtcgtgtctggcgctgtggtggctgcagtgatctggaggaaaaagagttctgggggcaaaggtgggagttattcaaaggcagaatggagcgattctgctcagggcagtgagtcacacagcctctag

SEQ ID NO: 156940 - DNA, 1200 bp, Artificial Sequence
  derived and/or modified sequence
atggagcccagtttttacagctctcgcagaccctggccgttgcctcgacccggcagagtgagcgctggttccggttggaaacgcccactccctggcgtagaacggggccgcccaggcggtggggaaggtctgggcgagccacgcagagaggaaggtcgagcagacctgtctcccagctctcccccgggcagccatagccttaaatatttccacactagtgtttctcggcctggaagaggagaaccccgatttatatccgttggctacgtggacgacacccagttcgtgaggttcgataatgacgccgcaagcccaaggatggtgccaagagcaccttggatggaacaggaaggatccgagtactgggacagagagacccgttccgcccgggacactgcccagatctttagggtgaatcttcgaactcttaggggctattacaaccaaagtgaagctggatctcacacactgcaatggatgcacggctgcgagctcggtccagaccggcggtttcttcgcggctatgagcagtttgcctatgatggcaaagactatttgactttgaatgaggacctgcgcagctggactgccgtggacactgctgcccagatctcagagcagaagagcaatgatgcatctgaggcagagcatcagagggcgtacctagaagatacctgtgtggaatggctccataaatacctggaaaaaggaaaggagacgctcttacatctagagccacccaagacacatgttacacaccacccaatttccgatcacgaagcaacactgagatgttgggctctcgggttctatcccgcagagatcactctgacttggcaacaagatggggaaggccatacccaggacactgaactggtggagacccgtcccgctggtgatggcactttccagaagtgggcagccgtggtcgtgccatctggcgaagagcagcgatacacatgccatgtacagcacgagggcttacccgaacccgtgaccctgcgatggaagccagcgtctcagcccactattccgattgtggggattatagccggtctggtacttctagggagcgtggtcagcggtgcagtggttgcagcggtcatttggcggaagaagtcctccgggggcaagggaggctcttattctaaggctgagtggtcggacagcgcccaaggctccgaatcgcactctctttag

SEQ ID NO: 156941 - DNA, 2601 bp, Artificial Sequence
  derived and/or modified sequence
acgactcccgactataaagtccccatccggactcaagaagttctcaggactcagaggctgggatcatggtagatggaaccctccttttactcctctcggaggccctggcccttacccagacctgggcgggctcccactccttgaagtatttccacacttccgtgtcccggcccggccgcggggagccccgcttcatctctgtgggctacgtggacgacacccagttcgtgcgcttcgacaacgacgccgcgagtccgaggatggtgccgcgggcgccgtggatggagcaggaggggtcagagtattgggaccgggagacacggagcgccagggacaccgcacagattttccgagtgaatctgcggacgctgcgcggctactacaatcagagcgaggccgggtctcacaccctgcagtggatgcatggctgcgagctggggcccgacgggcgcttcctccgcgggtatgaacagttcgcctacgacggcaaggattatctcaccctgaatgaggacctgcgctcctggaccgcggtggacacggcggctcagatctccgagcaaaagtcaaatgatgcctctgaggcggagcaccagagagcctacctggaagacacatgcgtggagtggctccacaaatacctggagaaggggaaggagacgctgcttcacctggagcccccaaagacacacgtgactcaccaccccatctctgaccatgaggccaccctgaggtgctgggccctgggcttctaccctgcggagatcacactgacctggcagcaggatggggagggccatacccaggacacggagctcgtggagaccaggcctgcaggggatggaaccttccagaagtgggcagctgtggtggtgccttctggagaggagcagagatacacgtgccatgtgcagcatgaggggctacccgagcccgtcaccctgagatggaagccggcttcccagcccaccatccccatcgtgggcatcattgctggcctggttctccttggatctgtggtctctggagctgtggttgctgctgtgatatggaggaagaagagctcaggtggaaaaggagggagctactctaaggctgagtggagcgacagtgcccaggggtctgagtctcacagcttgtaaagcctgagacagctgccttgtgtgcgactgagatgcacagctgccttgtgtgcgactgagatgcaggatttcctcacgcctcccctatgtgtcttaggggactctggcttctctttttgcaagggcctctgaatctgtctgtgtccctgttagcacaatgtgaggaggtagagaaacagtccacctctgtgtctaccatgacccccttcctcacactgacctgtgttccttccctgttctcttttctattaaaaataagaacctgggcagagtgcggcagctcatgcctgtaatcccagcacttagggaggccgaggagggcagatcacgaggtcaggagatcgaaaccatcctggctaacacggtgaaaccccgtctctactaaaaaatacaaaaaattagctgggcgcagaggcacgggcctgtagtcccagctactcaggaggcggaggcaggagaatggcgtcaacccgggaggcggaggttgcagtgagccaggattgtgcgactgcactccagcctgggtgacagggtgaaacgccatctcaaaaaataaaaattgaaaaataaaaaaagaacctggatctcaatttaatttttcatattcttgcaatgaaatggacttgaggaagctaagatcatagctagaaatacagataattccacagcacatctctagcaaatttagcctattcctattctctagcctattccttaccacctgtaatcttgaccatataccttggagttgaatattgttttcatactgctgtggtttgaatgttccctccaacactcatgttgagacttaatccctaatgtggcaatactgaaaggtggggcctttgagatgtgattggatcgtaaggctgtgccttcattcatgggttaatggattaatgggttatcacaggaatgggactggtggctttataagaagaggaaaagagaactgagctagcatgcccagcccacagagagcctccactagagtgatgctaagtggaaatgtgaggtgcagctgccacagagggcccccaccagggaaatgtctagtgtctagtggatccaggccacaggagagagtgccttgtggagcgctgggagcaggacctgaccaccaccaggaccccagaactgtggagtcagtggcagcatgcagcgcccccttgggaaagctttaggcaccagcctgcaacccattcgagcagccacgtaggctgcacccagcaaagccacaggcacggggctacctgaggccttgggggcccaatccctgctccagtgtgtccgtgaggcagcacacgaagtcaaaagagattattctcttcccacagataccttttctctcccatgaccctttaacagcatctgcttcattcccctcaccttcccaggctgatctgaggtaaactttgaagtaaaataaaagctgtgtttgagcatcatttgtatttca

SEQ ID NO: 156942 - DNA, 2601 bp, Artificial Sequence
  derived and/or modified sequence
acgactcccgactataaagtccccatccggactcaagaagttctcaggactcagaggctgggatcatggtagatggaaccctccttttactcctctcggaggccctggcccttacccagacctgggcgggctcccactccttgaagtatttccacacttccgtgtcccggcccggccgcggggagccccgcttcatctctgtgggctacgtggacgacacccagttcgtgcgcttcgacaacgacgccgcgagtccgaggatggtgccgcgggcgccgtggatggagcaggaggggtcagagtattgggaccgggagacacggagcgccagggacaccgcacagattttccgagtgaacctgcggacgctgcgcggctactacaatcagagcgaggccgggtctcacaccctgcagtggatgcatggctgcgagctggggcccgacaggcgcttcctccgcgggtatgaacagttcgcctacgacggcaaggattatctcaccctgaatgaggacctgcgctcctggaccgcggtggacacggcggctcagatctccgagcaaaagtcaaatgatgcctctgaggcggagcaccagagagcctacctggaagacacatgcgtggagtggctccacaaatacctggagaaggggaaggagacgctgcttcacctggagcccccaaagacacacgtgactcaccaccccatctctgaccatgaggccaccctgaggtgctgggccctgggcttctaccctgcggagatcacactgacctggcagcaggatggggagggccatacccaggacacggagctcgtggagaccaggcctgcaggggatggaaccttccagaagtgggcagctgtggtggtgccttctggagaggagcagagatacacgtgccatgtgcagcatgaggggctacccgagcccgtcaccctgagatggaagccggcttcccagcccaccatccccatcgtgggcatcattgctggcctggttctccttggatctgtggtctctggagctgtggttgctgctgtgatatggaggaagaagagctcaggtggaaaaggagggagctactctaaggctgagtggagcgacagtgcccaggggtctgagtctcacagcttgtaaagcctgagacagctgccttgtgtgcgactgagatgcacagctgccttgtgtgcgactgagatgcaggatttcctcacgcctcccctatgtgtcttaggggactctggcttctctttttgcaagggcctctgaatctgtctgtgtccctgttagcacaatgtgaggaggtagagaaacagtccacctctgtgtctaccatgacccccttcctcacactgacctgtgttccttccctgttctcttttctattaaaaataagaacctgggcagagtgcggcagctcatgcctgtaatcccagcacttagggaggccgaggagggcagatcacgaggtcaggagatcgaaaccatcctggctaacacggtgaaaccccgtctctactaaaaaatacaaaaaattagctgggcgcagaggcacgggcctgtagtcccagctactcaggaggcggaggcaggagaatggcgtcaacccgggaggcggaggttgcagtgagccaggattgtgcgactgcactccagcctgggtgacagggtgaaacgccatctcaaaaaataaaaattaaaaaataaaaaaagaacctggatctcaatttaatttttcatattcttgcaatgaaatggacttgaggaagctaagatcatagctagaaatacagataattccacagcacatctctagcaaatttagcctattcctattctctagcctattccttaccacctgtaatcttgaccatataccttggagttgaatattgttttcatactgctgtggtttgaatgttccctccaacactcatgttgagacttaatccctaatgtggcaatactgaaaggtggggcctttgagatgtgattggatcgtaaggctgtgccttcattcatgggttaatggattaatgggttatcacaggaatgggactggtggctttataagaagaggaaaagagaactgagctagcatgcccagcccacagagagcctccactagagtgatgctaagtggaaatgtgaggtgcagctgccacagagggcccccaccagggaaatgtctagtgtctagtggatccaggccacaggagagagtgccttgtggagcgctgggagcaggacctgaccaccaccaggaccccagaactgtggagtcagtggcagcatgcagcgcccccttgggaaagctttaggcaccagcctgcaacccattcgagcagccacgtaggctgcacccagcaaagccacaggcacggggctacctgaggccttgggggcccaatccctgctccagtgtgtccgtgaggcagcacacgaagtcaaaagagattattctcttcccacagataccttttctctcccatgaccctttaacagcatctgcttcattcccctcaccttcccaggctgatctgaggtaaactttgaagtaaaataaaagctgtgtttgagcatcatttgtatttca

SEQ ID NO: 156943 - DNA, 1477 bp, Artificial Sequence
  derived and/or modified sequence
aggactcagaggctgggatcatggtagatggaaccctccttttactcctctcggaggccctggcccttacccagacctgggcgggtgagtgcggggtcgggatggaaacggcctctaccgggagtagagaggggccggcccggcgggggcgaaggactcggggagccgcgccgggaggagggtcgggccgatctcagcccctcctcgcccccaggctcccactccttgaagtatttccacacttccgtgtcccggcccggccgcggggagccccgcttcatctctgtgggctacgtggacgacacccagttcgtgcgcttcgacaacgacgccgcgagtccgaggatggtgccgcgggcgccgtggatggagcaggaggggtcagagtattgggaccgggagacacggagcgccagggacaccgcacagattttccgagtgaacctgcggacgctgcgcggctactacaatcagagcgaggccgggtctcacaccctgcagtggatgcatggctgcgagctggggcccgacaggcgcttcctccgcgggtatgaacagttcgcctacgacggcaaggattatctcaccctgaatgaggacctgcgctcctggaccgcggtggacacggcggctcagatctccgagcaaaagtcaaatgatgcctctgaggcggagcaccagagagcctacctggaagacacatgcgtggagtggctccacaaatacctggagaaggggaaggagacgctgcttcacctggagcccccaaagacacacgtgactcaccaccccatctctgaccatgaggccaccctgaggtgctgggccctgggcttctaccctgcggagatcacactgacctggcagcaggatggggagggccatacccaggacacggagctcgtggagaccaggcctgcaggggatggaaccttccagaagtgggcagctgtggtggtgccttctggagaggagcagagatacacgtgccatgtgcagcatgaggggctacccgagcccgtcaccctgagatggaagccggcttcccagcccaccatccccatcgtgggcatcattgctggcctggttctccttggatctgtggtctctggagctgtggttgctgctgtgatatggaggaagaagagctcaggtggaaaaggagggagctactctaaggctgagtggagcgacagtgcccaggggtctgagtctcacagcttgtaaagcctgagacagctgccttgtgtgcgactgagatgcacagctgccttgtgtgcgactgagatgcaggatttcctcacgcctcccctatgtgtcttaggggactctggcttctctttttgcaagggcctctgaatctgtctgtgtccctgttagcacaatgtgaggaggtagagaaacagtccacctctgtgtctaccatgacccccttcctcacactgacctgtgttccttccctgttctcttttctatt

SEQ ID NO: 156944 - DNA, 1077 bp, Artificial Sequence
  derived and/or modified sequence
atggtggatggcaccctgctgctgctgctgtctgaggccctggccctgacccagacctgggccggcagccacagcctgaagtacttccacacctctgtgtcccggcccggccgcggggagccccgcttcatctctgtgggctacgtggatgacacccagtttgtgcgctttgacaatgatgctgccagccccaggatggtgccccgggccccctggatggagcaggagggcagcgagtactgggaccgggagaccaggtctgcccgggacacagcccagatcttccgggtgaacctgcggaccctgcggggctactacaaccagagcgaggccggcagccacaccctgcagtggatgcacggctgtgagctgggcccagatggccgcttcctgcggggctatgagcagtttgcctatgatggcaaggactacctgaccctgaatgaagacctgcgctcctggacagctgtggacacagctgcccagatcagcgagcagaagagcaatgatgccagcgaggccgagcaccagagggcctacctggaggacacctgtgtggagtggctgcacaagtacctggagaagggcaaggagaccctgctgcacctggagccccccaagacccacgtgacccaccaccccatcagtgaccacgaggccaccctgcgctgctgggccctgggcttctacccagctgagatcaccctgacctggcagcaggatggagagggccacacccaggacacagagctggtggagaccaggcctgctggagatggcaccttccagaagtgggccgctgtggtggtgcccagcggggaggagcagcgctacacctgccacgtgcagcacgagggcctgcctgagcctgtgaccctgcgctggaagccagccagccagcccaccatccccatcgtgggcatcatcgccggcctggtgctgctgggctctgtggtgtctggagctgtggtggccgccgtcatctggaggaagaagagcagcggcggcaaaggaggcagctacagcaaggccgagtggagcgacagcgcccagggcagcgagagccacagcctgtag

SEQ ID NO: 156945 - DNA, 1077 bp, Artificial Sequence
  derived and/or modified sequence
atggtggatggcaccctgctgctgctgctgtctgaggccctggccctgacccagacctgggccggcagccacagcctgaagtacttccacacctctgtgtcccggcccggccgcggggagccccgcttcatctctgtgggctacgtggatgacacccagtttgtgcgctttgacaatgatgctgccagccccaggatggtgccccgggccccctggatggagcaggagggcagcgagtactgggaccgggagaccaggtctgcccgggacacagcccagatcttccgggtgaacctgcggaccctgcggggctactacaaccagagcgaggccggcagccacaccctgcagtggatgcacggctgtgagctgggccctgaccggcgcttcctgcggggctatgagcagtttgcctatgatggcaaggactacctgaccctgaatgaagacctgcgctcctggacagctgtggacacagctgcccagatcagcgagcagaagagcaatgatgccagcgaggccgagcaccagagggcctacctggaggacacctgtgtggagtggctgcacaagtacctggagaagggcaaggagaccctgctgcacctggagccccccaagacccacgtgacccaccaccccatcagtgaccacgaggccaccctgcgctgctgggccctgggcttctacccagctgagatcaccctgacctggcagcaggatggagagggccacacccaggacacagagctggtggagaccaggcctgctggagatggcaccttccagaagtgggccgctgtggtggtgcccagcggggaggagcagcgctacacctgccacgtgcagcacgagggcctgcctgagcctgtgaccctgcgctggaagccagccagccagcccaccatccccatcgtgggcatcatcgccggcctggtgctgctgggctctgtggtgtctggagctgtggtggccgccgtcatctggaggaagaagagcagcggcggcaaaggaggcagctacagcaaggccgagtggagcgacagcgcccagggcagcgagagccacagcctgtag

SEQ ID NO: 156946 - DNA, 1200 bp, Artificial Sequence
  derived and/or modified sequence
atggagcccagcttctacagcagcagaagaccctggcccctgcccaggcctggccgggtgtctgctggcagcggctggaagaggcccctgcccggggtggagcggggccggcctgggggcggggagggcctgggggagccccggcgggaggagggccgggctgacctgagccccagcagccccccaggcagccacagcctgaagtacttccacacctctgtgtccaggcctggccgcggggagccccgcttcatctctgtgggctacgtggatgacacccagtttgtgcgctttgacaatgatgctgccagccccaggatggtgccccgggccccctggatggagcaggagggcagcgagtactgggaccgggagaccaggtctgcccgggacacagcccagatcttccgggtgaacctgcggaccctgcggggctactacaaccagagcgaggccggcagccacaccctgcagtggatgcacggctgtgagctgggccctgaccggcgcttcctgcggggctatgagcagtttgcctatgatggcaaggactacctgaccctgaatgaagacctgcgctcctggacagctgtggacacagctgcccagatcagcgagcagaagagcaatgatgccagcgaggccgagcaccagagggcctacctggaggacacctgtgtggagtggctgcacaagtacctggagaagggcaaggagaccctgctgcacctggagccccccaagacccacgtgacccaccaccccatcagtgaccacgaggccaccctgcgctgctgggccctgggcttctacccagctgagatcaccctgacctggcagcaggatggagagggccacacccaggacacagagctggtggagaccaggcctgctggagatggcaccttccagaagtgggccgctgtggtggtgcccagcggggaggagcagcgctacacctgccacgtgcagcacgagggcctgcctgagcctgtgaccctgcgctggaagccagccagccagcccaccatccccatcgtgggcatcatcgccggcctggtgctgctgggctctgtggtgtctggagctgtggtggccgctgtgatctggaggaagaagagcagcggcggcaagggcggcagctacagcaaggccgagtggagcgacagcgcccagggcagcgagagccacagcctgtag

SEQ ID NO: 156947 - DNA, 1077 bp, Artificial Sequence
  derived and/or modified sequence
atggtggacggcaccctgctgctgctgctgagcgaggccctggccctgacccaaacatgggcaggcagccatagcctgaagtatttccatacatcagtgtcgcggccgggacgtggtgagcctcgttttatctcggtgggctatgtcgacgacacccaattcgtgagattcgataacgacgcggcgtctcccagaatggtccccagggcaccatggatggaacaggagggaagtgagtattgggaccgtgagaccaggtcagcaagagatactgcacagatctttcgtgtcaacctgcgcacattgagaggctattataatcaaagcgaagccggttcccacacgcttcaatggatgcacggatgcgaattggggcccgatggtaggtttctgagagggtatgaacaattcgcttatgacgggaaggattacctgactctcaacgaggaccttcggtcatggaccgccgtggataccgccgctcaaatctcagagcagaaatccaatgacgcatctgaggccgaacaccaacgagcttacttggaggacacttgtgtggagtggctgcataaatatctggagaagggcaaggaaactctcctgcacctggaaccacccaaaactcacgtgacccatcacccaataagtgaccacgaggccactctacgttgctgggcccttggcttttaccctgccgagatcacactcacttggcagcaggacggagaaggccatactcaagatacagaactcgtggagactagacctgctggcgatggaacttttcaaaagtgggctgctgtagtggttccatctggcgaggagcagagatacacatgccatgtacagcacgaaggcttgcctgagcccgttaccctaagatggaagcctgcgagtcaacccaccattcccattgtggggatcatcgccggtttggtcctgcttgggagcgtcgtatccggcgctgtcgtggcagccgttatctggcggaagaaatcatccgggggaaaggggggatcttatagcaaggctgagtggtctgattctgcccagggtagtgagagccatagcctctag

SEQ ID NO: 156948 - DNA, 1077 bp, Artificial Sequence
  derived and/or modified sequence
atggtggacggcaccctgctgctgctgctgagcgaggccctggccctgacccagacttgggccggaagtcactccctcaagtacttccacacctccgtgtctcggcctggtcgcggagagccacgatttatatctgtgggatacgtcgatgatacccagttcgtccgattcgacaacgatgcagcctcaccaagaatggtgccacgagccccctggatggagcaggagggatctgaatattgggacagggagactcgatccgcccgcgacaccgctcagatttttcgtgtgaacctccggactctaaggggctactacaatcagtcagaagccggatcgcacacactgcagtggatgcacggttgcgagctgggtcccgatcggagattcctgcggggctacgaacaatttgcttacgatggaaaagactacctaactttgaatgaagatctccggagttggaccgctgttgacaccgctgcacagatcagcgagcagaagagtaatgatgcctctgaagcggagcaccagcgggcttatctggaagacacctgcgtggaatggctccacaagtacctcgagaagggcaaagaaacactgttgcacttggagcctcccaaaacccacgtcacccaccacccaatttcggaccatgaagcaacactgcgctgctgggctctaggattttacccagcagaaatcacactgacgtggcagcaggacggcgaaggacacactcaggacaccgaactagttgaaacacgccccgcgggcgatggaacttttcagaagtgggctgctgtcgtggtgccctctggcgaggagcagcgttatacctgtcatgtgcagcacgaaggcttacccgaaccagtgaccctgcgttggaaacccgcttcgcagccaactattcctatcgtgggaattatcgccgggctcgttctgctcgggagtgtggtctctggcgcagttgtcgcggccgttatttggcgcaagaagtctagtggggggaaaggaggatcctatagtaaggcggagtggtctgattctgctcaggggtcagagagccattccctctag

SEQ ID NO: 156949 - DNA, 1077 bp, Artificial Sequence
  derived and/or modified sequence
atggtggacggcaccctgctgctgctgctgagcgaggccctggccctgactcagacctgggcaggctctcactctcttaagtatttccatacctctgtatctcggccgggccggggcgaaccccggtttatctcagttggctacgtcgacgacacacagtttgtgcgtttcgataacgacgctgcatcccccagaatggtgccccgtgcaccatggatggaacaagaggggagcgaatattgggaccgcgagacaaggtccgccagggatactgcgcagatcttcagagtaaacctacggacactgcgggggtattacaaccaatctgaagccgggagtcatactctccagtggatgcatggttgtgaactgggccccgaccggaggtttctgaggggatacgaacagttcgcctacgatggcaaggactatctcactcttaacgaggacctgcgcagttggacagcagtcgataccgcggcccaaatctccgaacaaaaatccaatgacgccagcgaggccgagcaccagcgagcatatttagaggacacgtgcgttgagtggctgcacaaatatctcgagaagggcaaagagacactactgcaccttgaacctcccaagacacacgtcacacaccaccctatcagcgatcacgaagctaccctcaggtgctgggccctcggcttttatcctgccgagatcaccttgacctggcaacaggatggtgaaggtcatacacaggacaccgagctggtcgaaacccgaccagcaggtgacggcaccttccagaagtgggctgccgttgtggttcctagcggagaagaacaacgttatacctgccacgtccagcatgagggcttgccggaacctgtgacactgaggtggaaacccgcaagtcagcccaccattccaatagtgggaattattgctggactggtgctgctcggcagcgtcgtcagtggcgccgtcgtagccgccgtgatctggcggaagaagagttccggcgggaagggcggaagttatagtaaggcagaatggtcagactctgctcaagggtcagaaagccactcactatag

SEQ ID NO: 156950 - DNA, 1077 bp, Artificial Sequence
  derived and/or modified sequence
atggtggacggcaccctgctgctgctgctgagcgaggccctggccttaacccagacttgggctggatcacactccctgaagtatttccatacgtcagttagcaggccaggacgcggtgaacctaggttcatttccgtgggctatgtggatgacactcagttcgtgcgctttgacaatgacgcagccagcccgcggatggtgccacgcgcgccctggatggaacaggagggctccgaatactgggatagagaaactagatctgcccgagacaccgcacagattttccgcgtaaacctaaggaccctgagagggtattataatcagtctgaggcaggttcccacaccttgcagtggatgcacgggtgtgaactgggacctgatcggcgatttctgcgagggtacgagcagtttgcatatgatggcaaggactacttaacactgaatgaggacctgagatcttggactgcagttgatactgctgcccagatatccgagcagaaaagcaacgacgcctccgaggcggagcaccagagggcctaccttgaggacacttgcgtggaatggctccataagtatttggagaaaggaaaggagacactcctgcacctggagccaccaaagacccacgtgacacaccaccccatctctgatcatgaggctaccctccggtgttgggccctcggcttttatcctgccgaaattactctcacttggcaacaagacggtgaggggcacacccaggacactgaactggtggagacccgacctgcgggtgatggaactttccaaaaatgggctgcagttgtagtcccttctggcgaggagcagagatacacttgccacgtgcagcatgaggggctaccagagccagtcactctccgctggaagcccgcgtcccagccgacaatccccatcgttggaataatcgccggcttggttcttttaggctccgttgtgtctggtgcagttgtagccgccgtgatctggagaaagaaatcaagcgggggcaaaggtgggtcctattctaaggccgaatggagcgatagcgctcagggcagcgagagtcactccttatag

SEQ ID NO: 156951 - DNA, 1077 bp, Artificial Sequence
  derived and/or modified sequence
atggtggacggcaccctgctgctgctgctgagcgaggccctggccctgacccagacatgggctggatcccattctctgaaatactttcataccagcgtcagcaggcccgggcgaggcgagccaagattcatttctgtgggttacgtagacgatacccaattcgtccgcttcgataacgacgcggcctctcctcgtatggtcccccgcgctccttggatggaacaggagggatccgaatattgggatcgcgagacacggtctgccagggacacagcccagatcttcagagtgaacctgcgtaccctccggggatactataaccagtcagaggccggctcccacactctgcaatggatgcacggctgcgagctgggccctgatggtcgcttccttcgaggctatgaacagttcgcatatgatggtaaagattacctgacacttaacgaggatttaagatcttggaccgcagtcgacactgcagcccaaatcagcgaacaaaagagcaacgatgcctcggaggcggagcaccagagggcatacctagaggacacttgtgtcgaatggctgcacaaatacctggagaagggtaaggaaactctccttcacctcgagccaccgaaaacccacgttactcaccatcctattagcgaccatgaggcaacactgcgctgttgggccttgggattctaccccgcagagataactttgacgtggcagcaggatggcgagggccacacgcaggatacggagttggtggagactaggcctgccggggacggaacgtttcaaaaatgggcagccgtagtcgtgccgtccggagaagaacaaaggtacacctgtcatgtgcagcacgaggggttgcctgagcccgtaacactgcgatggaagccggcttctcagcctactataccaattgtgggcatcatagctggcctcgtcctgctaggtagcgtcgtatctggtgccgtggtcgcagctgtgatttggagaaagaagtcatccggcgggaagggcggctcatactctaaagccgagtggagcgactccgcccagggcagtgagagccacagtctctag

SEQ ID NO: 156952 - DNA, 1077 bp, Artificial Sequence
  derived and/or modified sequence
atggtggacggcaccctgctgctgctgctgagcgaggccctggccctgacacagacttgggccggaagtcactcactgaaatacttccacacttctgtgtcgcgtcctggcaggggggaaccccgattcatcagtgtgggttacgtcgatgatacccagttcgtgcgttttgacaacgatgctgcttccccgagaatggtgcctcgtgcaccctggatggaacaggaaggtagcgagtactgggacagagaaacccgttccgcccgcgatactgcacaaatctttagagtgaatctgcggactctccgcggctactataaccagtctgaggccggcagccataccctccagtggatgcacggctgcgagctggggcccgaccgacggttcctgagggggtatgagcagtttgcatacgatggcaaagattacttaacattgaatgaagacctgcggagctggaccgcagtggataccgccgcccagatatcagaacaaaaatctaacgacgctagcgaagcagagcaccagcgagcttacctggaagacacatgcgtcgagtggctgcacaaatacctcgaaaaggggaaagagacactgcttcatttggaaccgcccaaaacgcacgtaacgcaccatccaatttctgaccacgaggctacgctccgatgctgggctctgggtttttatccagccgaaatcacactgacttggcagcaggatggagaggggcatacccaggataccgagctagtggaaacccggccagcgggggacggcacttttcagaaatgggcagcagtggtggtccctagtggagaagagcagagatatacatgccacgtccagcatgagggactcccagaacccgttacactgcgctggaagcctgcctcccaacctactatcccgatcgtaggcatcatagcgggcctggttctactcggcagtgtagtttccggcgccgtggtggccgctgtgatctggcggaagaagtcctcgggcggaaagggcggatcctactcgaaggccgaatggagtgattctgcacagggctccgaaagccacagcctgtag

SEQ ID NO: 156953 - DNA, 1077 bp, Artificial Sequence
  derived and/or modified sequence
atggtggacggcaccctgctgctgctgctgagcgaggccctggccctcacacagacatgggcagggagccatagtcttaaatatttccatacttcagtgtctcgcccgggccgcggcgaaccccgtttcataagcgtcggatacgtagacgatactcagtttgtcaggtttgacaacgacgcggccagcccccgcatggttcctagggctccgtggatggagcaggaaggctccgagtactgggaccgagagacccgctcagcccgcgacactgcccaaatatttagagtcaatctgagaacattgcgcggctattacaatcagagcgaggctggctcacacacattacagtggatgcatggctgcgaactcggcccagatggccggtttcttcgggggtacgagcagttcgcctatgatgggaaggattacctgacactcaacgaagatttgcgttcatggacagcagttgacactgccgcacagatctccgagcagaagagcaacgatgcaagcgaagctgagcaccaacgcgcctacttggaagatacatgcgtagagtggctccacaagtatctggaaaagggcaaagagaccctgttgcacctggaaccccctaaaacccacgtcacacaccaccccatcagtgatcacgaggccacccttcggtgctgggctctcggattttatccagccgagatcaccttgacatggcagcaggatggagagggccacacacaagacactgagttagtggagacccgcccagccggcgatggcactttccagaagtgggccgccgtggtggtcccatcaggcgaagagcagcgatatacttgccacgttcagcatgagggattgcccgaaccagtcaccctgcgatggaagcccgcctcccaacctactattccaattgtaggcatcatcgccggcctggtgcttttgggcagtgtggtgtcaggggctgtggtggctgctgtgatctggcgaaagaaatcatcaggcggaaagggcggcagttatagcaaggccgaatggtctgatagcgcccagggctcggagagccactccctgtag

SEQ ID NO: 156954 - DNA, 1200 bp, Artificial Sequence
  derived and/or modified sequence
atggagcccagcttctacagcagccggcggccctggcccctgccccgccccggccgagttagcgcaggttcaggctggaaacgtcctttgccaggagtcgagaggggacggccaggcggaggcgaggggctgggcgagccccgacgggaggaaggaagagctgacctgtcaccttcctccccacccggcagtcattccctaaagtactttcatacctctgtctccaggccaggcagaggggagccccggtttatctccgtgggatacgtggatgatactcagtttgtgaggtttgacaacgatgctgcatctccccggatggtcccccgcgctccgtggatggaacaggaggggagcgagtattgggaccgcgagacgcgcagcgcgagagacaccgcccaaatctttcgggtgaacttacggacacttagaggctattacaatcagtccgaggcagggtcacacacactccagtggatgcacggatgcgagttgggaccagaccggcgatttctacgcggatatgaacaattcgcatatgacgggaaagattacctcacactgaatgaagatctgagatcatggaccgccgtggatactgccgcccagatctctgaacagaagagcaatgacgcatccgaagctgagcatcagcgcgcatacctggaagatacctgtgtggagtggttgcacaaatacctcgagaaaggtaaggaaaccctgttgcacctggagcctccaaagacacatgttacgcatcatccgatttctgaccatgaggcgacccttcggtgttgggctctagggttctatcccgccgagatcactttgacatggcagcaggacggagaaggacatactcaagacaccgagctggtggagactcggccagctggcgacggcacttttcagaagtgggccgctgtcgttgtgcccagcggggaggagcagagatacacctgtcacgtgcagcatgaaggtcttcctgaacccgttaccctgcggtggaaacccgcgtcccagccgactattcccatagtggggattattgcagggttagtgttgcttggttcggttgtaagcggggccgtggttgccgctgtgatctggcggaaaaaatcatccgggggaaagggcggcagttatagcaaagccgagtggagcgattctgcacagggttccgaatcccattccttatag

SEQ ID NO: 156955 - DNA, 1077 bp, Artificial Sequence
  derived and/or modified sequence
atggtcgacgggacactgctcctactcctgtcagaggcccttgccctgacacagacatgggccggatcccactcgctgaagtatttccacacatctgtatcaaggcccggacgcggagagcccagattcatttctgtgggatacgttgatgacacacaattcgtgcgttttgataatgacgctgcctcccccaggatggtccctcgggctccgtggatggagcaggagggatcagagtactgggatcgggagacaaggtcagcgagggatactgctcaaatattccgtgtgaacctcagaacccttaggggttactacaaccagagcgaggcaggctcacatacgctccagtggatgcacggatgtgaacttggacccgatggtcgcttcctcaggggttacgaacagtttgcttatgatggtaaggactacctgaccctgaatgaggacctgagatcatggacggccgtggacaccgctgcccagatttccgaacaaaagtccaacgacgcgagcgaggccgaacatcagcgcgcttacctggaagacacctgtgtggagtggctacataagtatctggagaagggcaaagagaccctgttgcacctagaacctcctaaaacccacgtgacacaccaccccatcagtgatcatgaggccaccctgcgatgttgggccttgggattttaccccgctgagatcacactgacctggcagcaagacggcgaaggtcacactcaggacaccgagctggtagaaacgagacctgcaggggatggtacattccagaaatgggcagccgtggttgtcccttccggggaagaacagcgttatacctgtcacgtacagcatgagggcctgccagagcctgtcactctaaggtggaagccagcatcacagcccacaataccaatcgttgggataatcgctgggctcgtcctactgggtagtgtggtttccggtgccgtggtggcagccgttatttggagaaagaaatccagcgggggaaagggtgggtcctattctaaggcagagtggagcgattctgctcaaggctcagaaagccattcgctgtag

SEQ ID NO: 156956 - DNA, 1077 bp, Artificial Sequence
  derived and/or modified sequence
atggtggatggtacattgctgcttctgctgtccgaagcattggcactgactcaaacttgggctggatcccattccctgaagtacttccatacaagcgtctctcggcctggcagaggagaacctcgtttcatctctgtgggatatgtggatgatacccagttcgtccggtttgataacgatgcagccagccccagaatggtcccacgcgctccatggatggagcaggaaggttctgaatattgggatagggagacccggagcgcaagggataccgctcagatattccgggttaacctgcgtaccctccgcggatattacaaccagtcagaggcgggttctcataccctgcagtggatgcacggttgtgaattaggtccagatagaagattcctccggggatatgaacagtttgcctatgacgggaaggattacttgacactgaacgaggatctgcgaagttggacggccgtggatacagctgcacagatctctgagcagaaatccaacgacgctagtgaggctgaacaccaaagagcctacctagaagacacatgtgtcgagtggctacacaagtacctggaaaagggtaaggaaactctgctccacctcgagcctcctaagacgcatgtgacacaccaccctatctcagaccacgaggccactctccgctgctgggctctcggtttttacccggcagagatcaccctcacctggcagcaagacggcgaaggccatacccaggatacagagctagtggaaacacggccagccggtgacggcactttccaaaagtgggccgctgtggtcgttccctccggagaggagcagcgctatacatgtcacgtccaacacgaaggcttaccagaacccgtgactctcagatggaaacctgccagccagcctaccattcccattgtgggtatcattgctggactggtgctgctgggctcagtcgtctcaggggctgtggtagctgctgtcatatggcgtaagaagtcctcaggcggtaaaggcggaagctacagcaaggcagaatggagcgacagtgcccagggcagcgaatcccattcactgtag

SEQ ID NO: 156957 - DNA, 1077 bp, Artificial Sequence
  derived and/or modified sequence
atggtagacgggacactccttctgctcctgtctgaggccctggctctgactcagacatgggccggatcccattctttgaagtactttcacactagtgtctcccgaccgggacgaggagagccacggttcatttccgtaggttatgtcgatgatactcagttcgtacgtttcgataacgatgctgccagtcctaggatggtacctcgcgcaccctggatggaacaggaaggctcggagtactgggaccgcgagaccagaagcgccagagatactgcgcagatcttcagagtgaacctccgcacgctacgaggctattacaaccagtccgaagcgggatcccatacactgcagtggatgcacggatgtgagttgggacctgaccgacgattcctgcgcggatatgagcagtttgcatacgacggcaaagactatctgactctgaacgaggaccttcgttcctggaccgcagtcgacacagcggctcaaatctcggaacagaagtcgaacgatgcttctgaggccgaacatcagagagcatacctagaggacacttgcgtggagtggctgcataaatatctcgaaaagggaaaggagacgctcctgcacctagagcctcccaaaacccacgtgacccatcatccaatctctgaccacgaagcaaccctgcgctgctgggctctgggcttttatccagccgagatcacattaacatggcagcaggacggtgagggccatacccaggacacagagttggtagaaactcgccctgcaggtgatggaaccttccaaaagtgggcagcggtggtcgtgccaagtggcgaggagcagcgatacacgtgccatgtgcaacacgaagggttgcctgagcctgtcactctgagatggaagccagcctcccagcccaccattccaatagtgggaattatagcgggactggttcttctgggatctgtggtatctggagctgtcgtagcagcagtcatctggagaaagaaatcatcaggcggaaaaggcggatcctactctaaggccgagtggtcagacagtgcccaaggaagcgagagccattccttgtag

SEQ ID NO: 156958 - DNA, 1077 bp, Artificial Sequence
  derived and/or modified sequence
atggtggatggcacattactgctacttctgtccgaggccctggccttgacccaaacatgggctggcagtcactctttgaaatatttccacactagcgtgagcagacccggaaggggcgaacctcgcttcattagcgtgggctacgttgacgacacccagttcgtgaggtttgacaatgatgctgccagccccaggatggtgccaagggccccatggatggaacaagagggaagcgaatactgggatagagagacaaggtctgcacgcgataccgctcaaatttttcgggtaaatttgagaaccctccgaggatattacaatcagtccgaggccggaagccatactttgcagtggatgcatggctgtgaactgggcccagaccgcaggttccttcggggttatgaacagttcgcttacgatggaaaagattatcttactctgaacgaggacctacgctcctggaccgccgtagatacagccgcacagattagtgagcaaaagtccaacgacgcttctgaagccgagcaccagagggcatatctggaggacacctgtgtcgagtggctgcacaaatatctagaaaagggaaaggagactctgctacacctcgaaccccctaaaacccatgtcactcatcatccaattagcgaccacgaagctactctccgctgttgggccctaggcttttaccctgccgagatcaccttgacctggcagcaggatggcgagggccacacccaggatacggagctggtcgaaacccgccctgccggtgatggtacattccaaaaatgggccgctgtagtagtgccctctggcgaagagcagcgctatacctgtcacgtgcagcatgagggcttgcccgaaccggtgaccttgcgatggaagcctgcttcacagcctactattcccatcgttggaataattgcaggactggttctgctcggcagtgttgtgtctggcgctgtggttgcagctgtgatctggcgcaaaaagtcttccggcggtaagggcggaagttactccaaggcagaatggtctgactcggcccaagggagcgagagccacagcctgtag

SEQ ID NO: 156959 - DNA, 1077 bp, Artificial Sequence
  derived and/or modified sequence
atggtagacggtacactgctgctcctactgtccgaggccttggcattgacccagacgtgggccggaagccattccctgaaatatttccatacttcagtgagcagaccaggcaggggagaacctagatttattagtgtgggatatgtggatgatacccagttcgtacggttcgataatgacgccgcttcccccaggatggttcccagagccccatggatggaacaggagggttccgaatattgggaccgggagacacgaagcgcacgggatacagcccagatctttagagtgaatctgagaacactgagagggtactacaaccaaagcgaggcaggttcccataccttgcaatggatgcacggatgcgagctcggacccgacgggaggttcctgcggggatacgagcaattcgcctacgacgggaaagattacctgaccctgaatgaggacctgcgatcttggaccgcggtggacactgcagcacagatcagcgaacagaagtccaatgacgcgtctgaggctgaacatcaacgggcatatctggaagacacttgtgtcgagtggctacacaaatacctggaaaaggggaaggagacacttttgcacctcgagccaccgaagacccacgttacccaccatcccatttcagaccacgaagccacgttgaggtgttgggcattgggcttttatcccgctgaaataaccttgacttggcagcaagatggcgagggacatacacaggacacagagctcgtggagactcgtccagccggagacggtaccttccagaaatgggctgcggttgtcgttccgtcaggcgaagaacagcgttacacttgtcacgttcagcatgaggggctgcctgaaccagttactttgagatggaaaccggcttcccaacccaccataccgattgtggggatcatcgccggtctcgtcctgctgggctctgtggtgtcaggcgctgtcgttgccgctgttatctggagaaagaagagctctgggggtaagggtggatcctacagtaaagccgagtggtccgactccgctcagggcagcgagtcccactctctctag

SEQ ID NO: 156960 - DNA, 1077 bp, Artificial Sequence
  derived and/or modified sequence
atggttgatggcacactcttgctgttgctgagcgaagctttggcattaactcagacatgggccggtagccacagccttaaatactttcatacctccgtttcccgaccagggagaggcgaacctaggtttatttcagtgggctacgtggacgatacccaattcgttaggttcgataatgacgcagcgagccctagaatggtcccgagggccccatggatggaacaggagggaagtgagtactgggatcgagagacgaggagcgccagagatacagcccagatcttcagggtcaacttgaggactttgcggggttattacaaccagagtgaggccggttcgcacaccctgcagtggatgcacgggtgtgagctcggacccgaccgtaggttcctgcgcggttatgaacagttcgcctatgacgggaaggactatctgacccttaacgaagaccttcgttcttggacagcagtcgacactgcagcccagatttctgaacaaaaatcaaacgacgcttctgaggccgaacaccagcgcgcttatctggaagatacttgcgtggagtggctgcacaagtatctggaaaaagggaaagaaaccctcttacacttggagccgccaaagacacacgtgactcatcacccaatctcagatcacgaagctactctaaggtgctgggctctcggattttacccagcagagattactttgacctggcagcaggacggagaagggcatacgcaggataccgagctggttgaaacgagaccagccggtgacggcacattccaaaagtgggccgctgtcgtggttccatccggggaggagcagcgctatacctgccatgtccagcatgagggcctccccgaaccggtgactttgaggtggaagccggcaagccagcccaccattccaatcgtgggcatcatcgcaggcctggtcttgctgggatccgtggtgagtggcgctgtggtggctgcagtgatctggaggaaaaagagctcggggggaaaaggaggatcctactccaaggctgaatggtctgactcggcccagggcagtgaaagccatagtctttag

SEQ ID NO: 156961 - DNA, 1077 bp, Artificial Sequence
  derived and/or modified sequence
atggtcgacgggacccttctcctactcttgtctgaggccctcgcacttacacagacttgggccggttcacattcattaaagtacttccacacctctgtgagtaggcctggacgaggcgagccgaggtttatttcagtgggctacgtcgacgacactcagttcgtcaggtttgacaatgacgctgccagtccaaggatggtgcctagagccccttggatggagcaagaaggctcagaatactgggacagagaaacccgttcagcacgggacacggcccagatcttccgcgtcaatctgcggacactgaggggctattacaatcagagtgaggcaggcagccacaccctgcagtggatgcacggttgtgagttaggacccgacggacggttcctcagaggatatgagcagttcgcttacgatggcaaggattacctcactcttaatgaggatctacggagttggacggcagtggatacggccgcacaaatcagtgagcagaagtccaatgatgcttccgaagcagagcatcaaagggcatacctggaagacacttgtgtggaatggctacacaaatacttagagaaggggaaagaaacactcttgcatctagagccacccaaaactcacgtgacacaccacccaattagcgaccatgaagctacactcaggtgctgggcccttgggttttatcccgcagaaataaccttaacttggcagcaagacggcgaaggtcacacacaagacacagagctcgtcgagacaagaccagctggggatggcacctttcagaagtgggccgcagtagtggtcccttcaggggaagagcaaagatatacctgccatgtgcagcatgagggcttgcccgagccagtgaccttgcgttggaaaccagcttcgcagcccactattccaatcgtgggcattatcgctggtctggttcttctgggtagtgtagtgtctggggcagtggtggcggctgtaatttggaggaagaagagtagtggtggtaaagggggatcttacagtaaagctgagtggtctgattccgcccagggttctgaaagtcattccttatag

SEQ ID NO: 156962 - DNA, 1200 bp, Artificial Sequence
  derived and/or modified sequence
atggagccttctttttattcctctagaaggccgtggcccttgcccagacccggacgtgtgtctgctggctcgggttggaagcgcccactgcctggggtggaaagggggagacctggcggaggagaagggttaggggagccccgacgggaggagggtcgtgctgatctctccccctcgtcccccccaggttcgcactcattaaagtactttcatacgtccgtatcaagacctgggcgtggtgagcccaggttcattagcgtcggctacgtggatgacacgcaatttgtgcgcttcgacaacgatgctgcttcaccgaggatggtccctcgggcaccctggatggagcaagaaggatcagaatactgggatcgagagacccggtcagctagagataccgcccagatttttagggtcaatttgcggacgctgcgcggttattacaaccagtctgaagccggttcccacacgctccagtggatgcatggatgcgaattgggccctgatagacgattccttcgcggatacgagcaatttgcctacgacggtaaggactatctcacgctgaatgaggacctgcgctcctggactgctgtcgacacggcagcacagatttctgaacaaaaatctaacgacgcctccgaggcagaacatcaacgggcttacttggaggatacatgcgtggaatggctacataagtaccttgagaagggcaaggagactctgcttcacttggaacccccaaaaacgcatgtcacacatcacccaatatcggaccacgaggcaaccctccgctgctgggcgctgggtttctaccctgcagagatcacgttgacttggcagcaagatggagaaggtcatacgcaggacacggaactcgtcgaaacaagacctgccggagatggcacatttcagaaatgggccgctgtggttgtccctagcggtgaagaacagcggtacacctgtcacgtgcaacacgagggccttcccgaacccgtcactctgcggtggaagcctgccagccagcctaccatccctattgttgggattattgcgggattggtcctcctaggttccgttgttagtggtgcggtggtagctgccgtgatctggagaaagaaaagttctgggggtaaagggggaagctactcgaaagcggagtggtctgatagtgcccagggctcagagtcccatagcctttag

SEQ ID NO: 156963 - DNA, 2679 bp, Artificial Sequence
  derived and/or modified sequence
gcagactcagttctcattcccaatgggtgtcgggtttctagagaagccaatcagcgtcgccacgactcccgactataaagtccccatccggactcaagaagttctcaggactcagaggctgggatcatggtagatggaaccctccttttactcctctcggaggccctggcccttacccagacctgggcgggctcccactccttgaagtatttccacacttccgtgtcccggcccggccgcggggagccccgcttcatctctgtgggctacgtggacgacacccagttcgtgcgcttcgacaacgacgccgcgagtccgaggatggtgccgcgggcgccgtggatggagcaggaggggtcagagtattgggaccgggagacacggagcgccagggacaccgcacagattttccgagtgaatctgcggacgctgcgcggctactacaatcagagcgaggccgggtctcacaccctgcagtggatgcatggctgcgagctggggcccgacgggcgcttcctccgcgggtatgaacagttcgcctacgacggcaaggattatctcaccctgaatgaggacctgcgctcctggaccgcggtggacacggcggctcagatctccgagcaaaagtcaaatgatgcctctgaggcggagcaccagagagcctacctggaagacacatgcgtggagtggctccacaaatacctggagaaggggaaggagacgctgcttcacctggagcccccaaagacacacgtgactcaccaccccatctctgaccatgaggccaccctgaggtgctgggccctgggcttctaccctgcggagatcacactgacctggcagcaggatggggagggccatacccaggacacggagctcgtggagaccaggcctgcaggggatggaaccttccagaagtgggcagctgtggtggtgccttctggagaggagcagagatacacgtgccatgtgcagcatgaggggctacccgagcccgtcaccctgagatggaagccggcttcccagcccaccatccccatcgtgggcatcattgctggcctggttctccttggatctgtggtctctggagctgtggttgctgctgtgatatggaggaagaagagctcaggtggaaaaggagggagctactctaaggctgagtggagcgacagtgcccaggggtctgagtctcacagcttgtaaagcctgagacagctgccttgtgtgcgactgagatgcacagctgccttgtgtgcgactgagatgcaggatttcctcacgcctcccctatgtgtcttaggggactctggcttctctttttgcaagggcctctgaatctgtctgtgtccctgttagcacaatgtgaggaggtagagaaacagtccacctctgtgtctaccatgacccccttcctcacactgacctgtgttccttccctgttctcttttctattaaaaataagaacctgggcagagtgcggcagctcatgcctgtaatcccagcacttagggaggccgaggagggcagatcacgaggtcaggagatcgaaaccatcctggctaacacggtgaaaccccgtctctactaaaaaatacaaaaaattagctgggcgcagaggcacgggcctgtagtcccagctactcaggaggcggaggcaggagaatggcgtcaacccgggaggcggaggttgcagtgagccaggattgtgcgactgcactccagcctgggtgacagggtgaaacgccatctcaaaaaataaaaattgaaaaataaaaaaagaacctggatctcaatttaatttttcatattcttgcaatgaaatggacttgaggaagctaagatcatagctagaaatacagataattccacagcacatctctagcaaatttagcctattcctattctctagcctattccttaccacctgtaatcttgaccatataccttggagttgaatattgttttcatactgctgtggtttgaatgttccctccaacactcatgttgagacttaatccctaatgtggcaatactgaaaggtggggcctttgagatgtgattggatcgtaaggctgtgccttcattcatgggttaatggattaatgggttatcacaggaatgggactggtggctttataagaagaggaaaagagaactgagctagcatgcccagcccacagagagcctccactagagtgatgctaagtggaaatgtgaggtgcagctgccacagagggcccccaccagggaaatgtctagtgtctagtggatccaggccacaggagagagtgccttgtggagcgctgggagcaggacctgaccaccaccaggaccccagaactgtggagtcagtggcagcatgcagcgcccccttgggaaagctttaggcaccagcctgcaacccattcgagcagccacgtaggctgcacccagcaaagccacaggcacggggctacctgaggccttgggggcccaatccctgctccagtgtgtccgtgaggcagcacacgaagtcaaaagagattattctcttcccacagataccttttctctcccatgaccctttaacagcatctgcttcattcccctcaccttcccaggctgatctgaggtaaactttgaagtaaaataaaagctgtgtttgagcatcatttgtatttcaaaaaaaaaaaaaaaaaa

SEQ ID NO: 156964 - protein, 449 aa, Artificial Sequence
  derived and/or modified sequence
MMLGTEGGEGFVVKVRGLPWSCSADEVQRFFSDCKIQNGAQGIRFIYTREGRPSGEAFVELESEDEVKLALKKDRETMGHRYVEVFKSNNVEMDWVLKHTGPNSPDTANDGFVRLRGLPFGCSKEEIVQFFSGLEIVPNGITLPVDFQGRSTGEAFVQFASQEIAEKALKKHKERIGHRYIEIFKSSRAEVRTHYDPPRKLMAMQRPGPYDRPGAGRGYNSIGRGAGFERMRRGAYGGGYGGYDDYNGYNDGYGFGSDRFGRDLNYCFSGMSDHRYGDGGSTFQSTTGHCVHMRGLPYRATENDIYNFFSPLNPVRVHIEIGPDGRVTGEADVEFATHEDAVAAMSKDKANMQHRYVELFLNSTAGASGGAYEHRYVELFLNSTAGASGGAYGSQMMGGMGLSNQSSYGGPASQQLSGGYGGGYGGQSSMSGYDQVLQENSSDFQSNIA

SEQ ID NO: 156965 - protein, 28 aa, Artificial Sequence
  derived and/or modified sequence
MMLGTEGGEGFVVKVRGLPWSCSADEVQ

SEQ ID NO: 156966 - DNA, 1350 bp, Artificial Sequence
  derived and/or modified sequence
atgatgctgggcaccgagggcggcgagggcttcgtggtgaaggtgagaggcctgccctggagctgcagcgccgacgaggtgcagagattcttcagcgactgcaagatccagaacggcgcccagggcatcagattcatctacaccagagagggcagacccagcggcgaggccttcgtggagctggagagcgaggacgaggtgaagctggccctgaagaaggacagagagaccatgggccacagatacgtggaggtgttcaagagcaacaacgtggagatggactgggtgctgaagcacaccggccccaacagccccgacaccgccaacgacggcttcgtgagactgagaggcctgcccttcggctgcagcaaggaggagatcgtgcagttcttcagcggcctggagatcgtgcccaacggcatcaccctgcccgtggacttccagggcagaagcaccggcgaggccttcgtgcagttcgccagccaggagatcgccgagaaggccctgaagaagcacaaggagagaatcggccacagatacatcgagatcttcaagagcagcagagccgaggtgagaacccactacgacccccccagaaagctgatggccatgcagagacccggcccctacgacagacccggcgccggcagaggctacaacagcatcggcagaggcgccggcttcgagagaatgagaagaggcgcctacggcggcggctacggcggctacgacgactacaacggctacaacgacggctacggcttcggcagcgacagattcggcagagacctgaactactgcttcagcggcatgagcgaccacagatacggcgacggcggcagcaccttccagagcaccaccggccactgcgtgcacatgagaggcctgccctacagagccaccgagaacgacatctacaacttcttcagccccctgaaccccgtgagagtgcacatcgagatcggccccgacggcagagtgaccggcgaggccgacgtggagttcgccacccacgaggacgccgtggccgccatgagcaaggacaaggccaacatgcagcacagatacgtggagctgttcctgaacagcaccgccggcgccagcggcggcgcctacgagcacagatacgtggagctgttcctgaacagcaccgccggcgccagcggcggcgcctacggcagccagatgatgggcggcatgggcctgagcaaccagagcagctacggcggccccgccagccagcagctgagcggcggctacggcggcggctacggcggccagagcagcatgagcggctacgaccaggtgctgcaggagaacagcagcgacttccagagcaacatcgcctag

SEQ ID NO: 156967 - DNA, 3667 bp, Artificial Sequence
  derived and/or modified sequence
gtgctgctagaaaccacgaacattagtcatctcgcagcatgtgtgcacatggggtgacccgggggcctcctcgaatgcagcgtctacgcctggtgaatggacgcactcttaccaattctgctctgggagatgcagcggtaacctaccgagcgcagaggccggcgcgcacccgtggagcccgcgctcgcgatccctcctcgtgccagggccccagggcagtcaaggcctgccgaccgttaggcgggtcaaggggtacacagggtgcgaattcgttaggcaaaagctgggtacaggcgcgagccacaggcacggaaacctcgcgccgaccggggccctaggcccgacgacggcaggtaaggggaagtggaggcacacagggctgggacgtgccccaggcaccatacgggtggcttcgggcgcgggacgtccgcagccccgcagctcccaggacgttcgacaatctgcagctgaccagcttcggccggtttggggataaagggaagacaggcggcgcggggagtgggaacgcctgaaggccgcgcccctcctttcaggtcggccaggagcgcgccggtaagagcctgggggcaaggggtagaaagacgcccacctcatcacaacccagagctcgggactcctatacagtcccatagggaacaggcggccgccattcccctcccccacgctggcgggtaaggctagagaacggtttcaaggaagacgcatgcgcatgaaataattataaaccgctaggactccgaagttcaatattcgcgggaaggcgcaggcgcaacaaaaagcccggcgggtttatgggtgggggtgctgagcccaaaacccaagcgtgtaataatccgccggcgggaggtgggctggctcttgaaattacgcatgcgccagagctctttgtgacgcaacggggcggtgcgggcagctggctgcgcgtgcgcagaactcgcacaagggaccttatttaggttgcgcaggcgcccgctggccatttcgtcttagccacgcagaagtcgcgtgtctaggtgagtcgcggtgggtcctcgcttgcagttcagcgaccacggtgggtaccgtttttgcgaggattgtttgtccccatatctctgggagggccacggggaccttggcgagctgcaggctgccgtcgagagccgcgagtggttcgctgaatctcggcaccgccgctgaggcctgcaggccgcgccgactctattgtgtgagaagtcggaggaggcggagcggaagcggccgccgccatttcctttcctctacgctggctctcggcccgggcccccacggttcggggcgccgacagctgttgctcaggacagctttgggggtccggtcgccggacgaggaggtgttggagtcgccggggtgggtgcatccgcccggtttttgctccgtgggggggcggtgcgggcccgggcgcgcctcggaggcgaaggacagcttaattggcgctctcagttctggtcctccccgctttgcagtttgtttcgacgccggaccgcgtaagagacgatgatgttgggcacggaaggtggagagggattcgtggtgaaggtccggggcttgccctggtcttgctcggccgatgaagtgcagaggtttttttctgactgcaaaattcaaaatggggctcaaggtattcgtttcatctacaccagagaaggcagaccaagtggcgaggcttttgttgaacttgaatcagaagatgaagtcaaattggccctgaaaaaagacagagaaactatgggacacagatatgttgaagtattcaagtcaaacaacgttgaaatggattgggtgttgaagcatactggtccaaatagtcctgacacggccaatgatggctttgtacggcttagaggacttccctttggatgtagcaaggaagaaattgttcagttcttctcagggttggaaatcgtgccaaatgggataacattgccggtggacttccaggggaggagtacgggggaggccttcgtgcagtttgcttcacaggaaatagctgaaaaggctctaaagaaacacaaggaaagaatagggcacaggtatattgaaatctttaagagcagtagagctgaagttagaactcattatgatccaccacgaaagcttatggccatgcagcggccaggtccttatgacagacctggggctggtagagggtataacagcattggcagaggagctggctttgagaggatgaggcgtggtgcttatggtggaggctatggaggctatgatgattacaatggctataatgatggctatggatttgggtcagatagatttggaagagacctcaattactgtttttcaggaatgtctgatcacagatacggggatggtggctctactttccagagcacaacaggacactgtgtacacatgcggggattaccttacagagctactgagaatgacatttataattttttttcaccgctcaaccctgtgagagtacacattgaaattggtcctgatggcagagtaactggtgaagcagatgtcgagttcgcaactcatgaagatgctgtggcagctatgtcaaaagacaaagcaaatatgcaacacagatatgtagaactcttcttgaattctacagcaggagcaagcggtggtgcttacgaacacagatatgtagaactcttcttgaattctacagcaggagcaagcggtggtgcttatggtagccaaatgatgggaggcatgggcttgtcaaaccagtccagctacgggggcccagccagccagcagctgagtgggggttacggaggcggctacggtggccagagcagcatgagtggatacgaccaagttttacaggaaaactccagtgattttcaatcaaacattgcataggtaaccaaggagcagtgaacagcagctactacagtagtggaagccgtgcatctatgggcgtgaacggaatgggagggttgtctagcatgtccagtatgagtggtggatggggaatgtaattgatcgatcctgatcactgactcttggtcaaccttttttttttttttttttttttctttaagaaaacttcagtttaacagtttctgcaatacaagcttgtgatttatgcttactctaagtggaaatcaggattgttatgaagacttaaggcccagtatttttgaatacaatactcatctaggatgtaacagtgaagctgagtaaactataactgttaaacttaagttccagcttttctcaagttagttataggatgtacttaagcagtaagcgtatttaggtaaaagcagttgaattatgttaaatgttgccctttgccacgttaaattgaacactgttttggatgcatgttgaaagacatgcttttatttttttgtaaaacaatataggagctgtgtctactattaaaagtgaaacattttggcatgtttgttaattctagtttcatttaataacctgtaaggcacgtaagtttaagctttttttttttttaagttaatgggaaaaatttgagacgcaataccaatacttaggattttggtcttggtgtttgtatgaaattctgaggccttgatttaaatctttcattgtattgtgatttccttttaggtatattgcgctaagtgaaacttgtcaaataaatcctccttttaaaaactgc

SEQ ID NO: 156968 - DNA, 1350 bp, Artificial Sequence
  derived and/or modified sequence
atgatgttgggtactgaaggaggggagggcttcgttgtcaaggttaggggcctcccatggtcctgctcagctgacgaagtccagagatttttcagtgactgtaagattcagaacggggcccagggaattagattcatatacacaagagagggtagaccttctggggaggcctttgtcgagctggagtctgaggatgaggtgaaattggcattaaaaaaggaccgcgagacgatggggcaccggtatgtggaggttttcaaaagcaataacgtggaaatggactgggtactgaaacacacaggccccaactctcccgacacagctaacgacgggtttgtgagactccgcggactgccgttcgggtgtagcaaagaggaaatcgtgcagttcttcagtgggctggaaatcgtgcccaacgggatcacattgcccgtggacttccaggggagatccacaggagaggcttttgttcaatttgcctcacaggagattgcagaaaaagccctaaagaagcataaggaacgaattgggcaccggtacattgaaatattcaagtcctccagagcggaagtccggacccactatgatccaccacggaagctcatggctatgcagaggcctgggccttacgataggcctggagctggccgagggtacaacagtatcggaaggggcgccggctttgagcgaatgcggcggggggcttatggtggcggatatgggggttatgacgactataatggctacaacgacggctacggatttggatccgatagatttggcagagacctgaactattgcttctctgggatgtccgatcatcggtatggcgatgggggatcaactttccagtcaacaactggccactgcgtacacatgaggggactaccctaccgggccaccgagaatgacatctataattttttctcccctcttaatcccgtgagagtacatattgaaatcggccctgatgggcgggtcaccggcgaggccgatgtcgagtttgccacccacgaagatgcagtggcagccatgagtaaggacaaggccaatatgcagcacaggtacgtggagctctttttaaacagcacggcaggcgcatctgggggagcatatgagcaccgctatgtggaactttttctgaactccacagccggagcaagcggcggagcttacggatctcagatgatgggcggcatggggctcagcaatcagagcagttacggggggccggcatcccagcagctgagcggcggatacggtggaggttacggagggcagtctagtatgtcaggctacgaccaggtacttcaggagaacagctctgactttcagtcaaatatcgcctag

SEQ ID NO: 156969 - DNA, 1350 bp, Artificial Sequence
  derived and/or modified sequence
atgatgctggggacagaaggcggcgaagggtttgttgtcaaggtccgaggactgccctggtcttgtagtgccgatgaagtgcagaggttctttagtgactgtaagatccagaacggcgcacagggaattaggttcatatacaccagagaaggcaggccgagcggcgaagcctttgtggagctagaaagtgaagatgaggttaagctcgcgctgaagaaggaccgcgagacaatggggcatcgctatgtggaggtctttaagtccaacaatgtcgaaatggactgggtactcaagcatacaggacctaatagcccagataccgccaatgacgggtttgtccgactgagaggtctcccattcggctgcagcaaagaggagatcgtacagtttttttcgggcctggagatcgtgcctaacggcataacactgcctgtggacttccagggccgttcaaccggtgaagccttcgtgcaattcgcatctcaggaaatcgcggagaaggccctcaaaaagcacaaggagaggattggccatcggtacatagagatctttaagagctcacgggccgaggtgaggactcattatgaccccccgcgaaagctcatggccatgcagaggccaggaccttatgatagacccggcgctgggcgcgggtataacagcatcgggagaggggccgggttcgaaagaatgaggcggggcgcgtacggtgggggctatggcggatacgacgattacaacggatacaatgatggatacggatttgggagcgacagatttgggcgcgatctcaactactgtttctccggcatgtcagaccaccggtacggcgatggcggctctacattccagtccacgaccggccactgcgtgcacatgcgcggcttgccataccgtgctacagagaatgacatctataacttttttagtccccttaatcctgtgcgggtgcacatagaaattggcccagacggtcgcgttacaggggaggcagacgttgagtttgctacacacgaagacgccgtcgcggccatgagcaaggataaagctaatatgcagcatagatacgtagagctctttttgaatagcaccgccggcgcttcgggtggtgcttacgaacaccggtacgtcgagcttttcctgaactccactgctggcgcctccggcggtgcttatggctctcagatgatgggcgggatgggactctccaatcaatcaagttacggtggtcccgcaagccaacaactatccggtggttatggcggtggctatggtggccagtcttccatgtctggatacgaccaagtgctgcaagagaattccagtgattttcaaagcaacattgcatag

SEQ ID NO: 156970 - DNA, 1350 bp, Artificial Sequence
  derived and/or modified sequence
atgatgctggggacagaaggaggagagggcttcgttgttaaggtgcgtgggctgccttggagctgctcagccgacgaggtccagcgatttttctccgactgcaagattcagaacggcgctcaggggatcagattcatatacaccagagaagggagacccagcggcgaggcatttgtggaactcgagtccgaggacgaagtgaaactcgcactcaaaaaggacagagaaaccatggggcaccgatacgtagaagttttcaagagtaataacgtggagatggattgggtgttgaagcacacggggcctaactcgcccgatacagcaaatgacggctttgtccggttgaggggcttaccttttggatgtagcaaggaggagatcgtgcagttttttagtggccttgaaatcgtgccaaacgggataactcttccagtggatttccaagggaggagtaccggtgaagcctttgtccagtttgctagtcaggaaattgcggagaaggctctcaagaagcataaggagcgcatcggtcatcggtatatagagatatttaagtcttcacgggccgaggtcagaacccattacgaccccccaagaaagctgatggccatgcaacgccccggaccatatgataggccaggggccggccggggctataactcaataggccgaggagcagggttcgaaaggatgaggaggggagcatatggaggggggtacgggggctacgacgattacaacggatacaatgatggttatggattcggctccgatagatttggcagggaccttaattattgcttcagcggcatgtccgatcatcgctacggtgatggaggtagcacctttcagtccaccactggccactgtgtgcacatgcgcgggctgccatacagagccactgaaaacgacatatacaatttcttctcgccgctgaaccccgtgcgagtgcatatcgagattgggcctgacggacgagtcactggggaagctgatgtggagtttgctacacatgaggatgctgtagcagcgatgtccaaagacaaggccaatatgcagcacagatacgtcgagttgtttctgaactctacagctggggcgtccgggggagcatacgagcaccgctacgtggagttgttcctgaatagtactgcgggtgcatctggcggggcttacggctcccagatgatggggggaatgggactcagcaaccagtccagctatgggggcccggcatcccagcagctgtctggcgggtacgggggagggtacggaggccagtcctctatgtctgggtacgaccaagtcttgcaggagaacagttctgactttcagtccaatattgcttag

SEQ ID NO: 156971 - DNA, 1350 bp, Artificial Sequence
  derived and/or modified sequence
atgatgctgggcacagaaggaggagagggctttgtggtgaaggtgcggggcctgccctggagctgcagcgcagatgaggtgcagcgcttcttcagtgactgcaagatccagaatggagcccagggcatccgcttcatctacacccgggagggccggcccagcggggaggcctttgtggagctggagagtgaagatgaggtgaagctggccctgaagaaggaccgggagaccatgggccaccgctacgtggaggtgttcaagagcaacaacgtggagatggactgggtgctgaagcacacaggccccaacagcccagacacagccaatgatggctttgtgcggctgcggggcctgcccttcggctgcagcaaggaggagatcgtgcagttcttcagcggcctggagatcgtgcccaacggcatcaccctgcctgtggacttccagggccgcagcactggagaggcctttgtgcagtttgccagccaggagattgctgagaaggccctgaagaagcacaaggagcgcatcggccaccgctacatcgagatcttcaagagcagcagagctgaggtgaggacccactatgacccccccaggaagctgatggccatgcagaggcctggcccctatgacaggcctggagctggccggggctacaacagcatcggccgcggggccggctttgagaggatgagaagaggagcctacggcggcggctacggcggctatgatgactacaacggctacaatgatggctacggctttggaagtgaccgcttcggccgggacctgaactactgcttcagcggcatgtctgaccacagatatggagatggcggcagcaccttccagagcaccaccggccactgtgtgcacatgaggggcctgccctaccgggccacagaaaatgacatctacaacttcttcagccccctgaaccctgtgcgggtgcacattgaaattggaccagatggccgggtgactggagaggctgatgtggagtttgccacccatgaagatgctgtggccgccatgagcaaggacaaggccaacatgcagcaccgctacgtggagctgttcctgaacagcacagctggggccagcggcggggcctatgagcaccgctacgtggagctgttcctgaacagcacagctggggccagcggcggggcctacggcagccagatgatgggcggcatgggcctgagcaaccagagcagctatggaggccctgccagccagcagctgagcggcggctacggcggcggctacggcggccagagctccatgagcggctatgaccaggtgctgcaggagaacagcagtgacttccagagcaacatcgcctag

SEQ ID NO: 156972 - DNA, 2279 bp, Artificial Sequence
  derived and/or modified sequence
acaagggaccttatttaggttgcgcaggcgcccgctggccatttcgtcttagccacgcagaagtcgcgtgtctaggtgagtcgcggtgggtcctcgcttgcagttcagcgaccacgtttgtttcgacgccggaccgcgtaagagacgatgatgttgggcacggaaggtggagagggattcgtggtgaaggtccggggcttgccctggtcttgctcggccgatgaagtgcagaggtttttttctgactgcaaaattcaaaatggggctcaaggtattcgtttcatctacaccagagaaggcagaccaagtggcgaggcttttgttgaacttgaatcagaagatgaagtcaaattggccctgaaaaaagacagagaaactatgggacacagatatgttgaagtattcaagtcaaacaacgttgaaatggattgggtgttgaagcatactggtccaaatagtcctgacacggccaatgatggctttgtacggcttagaggacttccctttggatgtagcaaggaagaaattgttcagttcttctcagggttggaaatcgtgccaaatgggataacattgccggtggacttccaggggaggagtacgggggaggccttcgtgcagtttgcttcacaggaaatagctgaaaaggctctaaagaaacacaaggaaagaatagggcacaggtatattgaaatctttaagagcagtagagctgaagttagaactcattatgatccaccacgaaagcttatggccatgcagcggccaggtccttatgacagacctggggctggtagagggtataacagcattggcagaggagctggctttgagaggatgaggcgtggtgcttatggtggaggctatggaggctatgatgattacaatggctataatgatggctatggatttgggtcagatagatttggaagagacctcaattactgtttttcaggaatgtctgatcacagatacggggatggtggctctactttccagagcacaacaggacactgtgtacacatgcggggattaccttacagagctactgagaatgacatttataattttttttcaccgctcaaccctgtgagagtacacattgaaattggtcctgatggcagagtaactggtgaagcagatgtcgagttcgcaactcatgaagatgctgtggcagctatgtcaaaagacaaagcaaatatgcaacacagatatgtagaactcttcttgaattctacagcaggagcaagcggtggtgcttacgaacacagatatgtagaactcttcttgaattctacagcaggagcaagcggtggtgcttatggtagccaaatgatgggaggcatgggcttgtcaaaccagtccagctacgggggcccagccagccagcagctgagtgggggttacggaggcggctacggtggccagagcagcatgagtggatacgaccaagttttacaggaaaactccagtgattttcaatcaaacattgcataggtaaccaaggagcagtgaacagcagctactacagtagtggaagccgtgcatctatgggcgtgaacggaatgggagggttgtctagcatgtccagtatgagtggtggatggggaatgtaattgatcgatcctgatcactgactcttggtcaaccttttttttttttttttttttttctttaagaaaacttcagtttaacagtttctgcaatacaagcttgtgatttatgcttactctaagtggaaatcaggattgttatgaagacttaaggcccagtatttttgaatacaatactcatctaggatgtaacagtgaagctgagtaaactataactgttaaacttaagttccagcttttctcaagttagttataggatgtacttaagcagtaagcgtatttaggtaaaagcagttgaattatgttaaatgttgccctttgccacgttaaattgaacactgttttggatgcatgttgaaagacatgcttttatttttttgtaaaacaatataggagctgtgtctactattaaaagtgaaacattttggcatgtttgttaattctagtttcatttaataacctgtaaggcacgtaagtttaagctttttttttttttaagttaatgggaaaaatttgagacgcaataccaatacttaggattttggtcttggtgtttgtatgaaattctgaggccttgatttaaatctttcattgtattgtgatttccttttaggtatattgcgctaagtgaaacttgtcaaataaatcctccttttaaaaactgca

SEQ ID NO: 156973 - DNA, 1350 bp, Artificial Sequence
  derived and/or modified sequence
atgatgctgggcaccgagggcggcgagggcttcgtggtgaaggtgcggggcctcccctggtcttgtagtgctgacgaagtccagagattcttctccgattgcaagatccagaatggggctcagggcatcaggttcatctatacccgggaaggccggccctccggcgaagccttcgtggagctggagtcagaggacgaggtgaagctggcgttgaagaaggaccgggagaccatgggacaccgctatgtagaggtgttcaagtcgaataatgtcgagatggactgggttctgaaacacacggggcctaactcccccgacacggctaacgatggatttgtgcgccttcggggccttcctttcggatgtagcaaagaagaaattgtccagttcttttcaggcttagaaatcgtacccaacggcattaccctgcccgtggattttcaaggccggtccacaggagaggcgttcgttcagtttgcctcgcaagaaatcgctgaaaaagcccttaagaaacataaggagaggatcggtcatcggtacatcgagatctttaagtctagtagagctgaggtccggacccactacgatccccccagaaagctgatggctatgcaacggcccggcccttatgatcgacctggagccgggcgcgggtataacagcattggtcggggcgcgggattcgagcgcatgcggaggggggcctacggtggggggtatggcggatacgacgactataatggatataatgatgggtacggattcgggagcgaccgattcggtagagacctgaattactgtttcagcggcatgagtgaccacagatatggcgatggcggctcgacttttcaatcaaccaccgggcactgcgtgcacatgcgtggcctcccatacagggcaaccgaaaacgatatctataatttcttcagtccattgaatcccgtgagagtccacatcgagatcggccccgatgggagagtcacaggcgaagccgacgtagagttcgcaacgcatgaggacgccgttgctgctatgagtaaggataaggctaatatgcagcacagatacgtcgagctattcctcaactcgaccgcaggcgcatccggcggtgcctacgagcataggtacgtggaactgttcctgaattccacagcaggggcttcaggaggagcttatggctcacagatgatgggggggatgggacttagcaaccagtcgtcatacggcgggcccgcaagtcagcaacttagtggggggtacgggggaggttatggtggccagagctcaatgagcggctatgatcaggtgttgcaggaaaattccagcgacttccagtcaaacatcgcatag

SEQ ID NO: 156974 - DNA, 1350 bp, Artificial Sequence
  derived and/or modified sequence
atgatgctgggcaccgagggcggcgagggcttcgtggtgaaggtgcggggactcccatggagctgttccgctgacgaggtgcagcgattcttctccgattgcaaaattcagaatggcgcccaaggcatcaggtttatatacaccagagagggacgcccctccggtgaagcctttgtcgaactggaatccgaagacgaagttaaactggcactgaagaaggacagagagaccatgggacaccggtacgtagaagtgtttaaatctaacaacgtggaaatggactgggtgctgaaacatacgggacctaactctcccgacaccgccaatgatggctttgtgcgcctgcgcggcctgcctttcgggtgctccaaggaggagattgtgcagttttttagtggcttggaaatagtccctaacgggatcaccctgccagttgactttcaaggacggtcaacaggtgaagcgttcgtgcagttcgcatctcaagagatagctgaaaaggctctgaaaaagcacaaggaacgaatcgggcatagatatattgaaattttcaagtcaagcagagctgaggtaagaacccattatgatcccccgcgcaaacttatggctatgcaaagacctggcccctacgataggccgggtgccggaagaggctacaatagtattggcagaggtgcaggttttgagaggatgcggaggggcgcgtacggcggcgggtacggcggttacgacgattataacgggtacaatgatggctacgggttcgggtcagatcgctttggccgagacctgaactactgtttttctggaatgtccgatcaccggtacggcgacggcgggtctaccttccagtcaacaaccggccattgtgtgcatatgaggggcctgccctatcgggccaccgaaaacgatatctacaatttcttttcgcccctgaatcctgtgagggtgcacattgaaatcggacccgatggaagagtaactggtgaggctgacgtcgagttcgccacccacgaggatgctgtcgccgcaatgtcaaaagacaaagcgaatatgcaacataggtacgtcgagctcttcttgaattccactgccggagcgtccggcggcgcgtacgaacaccggtacgttgaactctttcttaactcaacagcaggggcgtccgggggggcgtatggatcacagatgatgggaggcatgggactatcaaatcagtcctcttatgggggccctgcatcacagcagctgagtggcggatatgggggagggtatggaggacaatcatctatgtccggctatgatcaggttttgcaggagaactcttccgacttccagtctaacattgcctag

SEQ ID NO: 156975 - DNA, 1350 bp, Artificial Sequence
  derived and/or modified sequence
atgatgctgggcaccgagggcggcgagggcttcgtggtgaaggtgcgaggccttccatggagttgctcagccgatgaggtgcaacgcttcttttcagattgcaagatccagaacggcgcccagggcattcgattcatttataccagagaaggccgtccatcaggagaggcttttgtcgaattggagagtgaagacgaagtgaagctggctctcaaaaaagaccgtgagacgatggggcataggtatgtggaggtttttaaatccaacaacgtagagatggactgggttctgaagcacaccggaccaaacagcccagacacggcaaacgacggttttgtgcgattgagaggactgccctttgggtgcagcaaagaagagatcgtacagtttttttccggtctggaaatagttccaaacggtatcaccctgccagttgatttccagggaagatcaactggggaggctttcgtccagtttgcctcacaggaaatcgctgagaaagccctgaagaagcacaaggagcgtatagggcacagatatattgaaatctttaaatcatcacgggccgaagtaagaacccattacgacccgcctcggaagctcatggctatgcagcggcctggaccctacgaccgccctggcgctggacgaggttacaactcaataggacgaggagccggatttgaaaggatgcggcggggtgcctacgggggcggttacggcggctatgacgattataacggctacaacgacgggtacggcttcggctcggatcgcttcggacgagatttaaattattgcttctctggcatgtcggaccatcggtacggggatggtggaagtacttttcagagcaccaccggccactgtgtccacatgcgagggctgccttacagagccaccgagaacgatatttacaacttcttctccccactcaaccccgtccgggtgcatattgaaattggacccgacggacgggtgaccggagaagcagacgttgaattcgccactcacgaggatgcagtagctgccatgtccaaagataaggcaaacatgcagcatagatacgtggagctatttcttaatagcactgcaggagcctctggaggggcttatgagcacaggtacgtcgaacttttcctgaactccaccgctggtgcaagtgggggagcctacggctcacagatgatgggtggaatggggttgtcaaaccagagctcctacggtggtcccgcttcacaacagttaagtggcggctacggaggcggctatggcggccagagttccatgtccggctacgaccaggtcctgcaggagaactcaagcgacttccagagcaacatcgcctag

SEQ ID NO: 156976 - DNA, 1350 bp, Artificial Sequence
  derived and/or modified sequence
atgatgctgggcaccgaaggcggagaaggattcgtggtgaaggtccggggattgccatggagctgttcagccgacgaggtccaacgttttttttctgactgcaagatccaaaacggagcccagggaatccgcttcatctacacgcgggagggtcggccttccggcgaggctttcgttgaactggaaagtgaggacgaggtgaagctggctctcaaaaaggatagagagaccatggggcacaggtatgttgaggtgttcaaatccaacaacgtcgaaatggattgggtcctgaaacacactgggccaaactcgcctgacaccgcgaatgacgggtttgtgcgcctaaggggcctgccctttggatgctcaaaggaggaaattgttcagtttttctcaggcctggagatcgttcctaacgggattaccttaccagtggatttccagggcagatccacaggcgaggccttcgtccaattcgcctctcaagaaatagcggagaaagccctgaagaaacacaaggagcggatcggtcacaggtatatagagatctttaagagctcaagagccgaagtgcgcacacattatgatccacccaggaaattgatggcaatgcagcgacctggtccctatgatcggccaggggcaggcagaggctacaattcaataggcagaggggctggctttgaaagaatgcgccgtggagcctacggtggcggttatggtggctatgatgactacaacgggtataacgacggatacgggttcggtagcgacaggttcggcagagatttgaattattgtttctccggaatgagtgatcaccgctacggagacggcggatctactttccagagcacgacagggcattgtgtccatatgcgaggcctgccatacagagctaccgagaacgacatttataactttttcagccctctgaaccctgttagggtccatatcgagattggacctgatggaagagtcactggggaagctgatgtggaattcgctacccacgaagatgcagtggcggcaatgagtaaggacaaagcaaacatgcaacataggtacgttgagctgtttctgaattcaaccgctggcgcatcgggtggggcatacgagcaccggtatgtagagttatttctgaactcaaccgccggagcatctgggggtgcttacgggtctcagatgatgggagggatggggctgtcaaatcagtcttcctacggaggcccagcaagccaacaactgagtgggggatacggcggaggctacggtggccaatcttctatgtcagggtacgaccaggttctccaggaaaatagttcggatttccaaagcaatatcgcctag

SEQ ID NO: 156977 - DNA, 1350 bp, Artificial Sequence
  derived and/or modified sequence
atgatgctggggacagagggcggagaaggatttgtcgtgaaagtgagaggcttaccctggagctgtagcgccgatgaggttcagcgctttttcagcgattgcaagatccagaatggcgctcaggggattcggtttatttatacccgcgagggacgacccagtggcgaggcctttgtggaactcgagtcagaagatgaggtgaagctcgccttaaaaaaggatagggaaaccatgggccacagatacgttgaagtatttaagtcgaacaacgtcgagatggattgggttctcaagcatacggggcctaacagccctgatactgccaacgatggcttcgtgcgcctgaggggccttccctttggatgctcaaaagaagagattgttcagtttttcagtggtctggaaattgtgccgaatggcatcactcttcccgtcgatttccaggggcgatccacaggagaagccttcgtgcagtttgcttctcaggaaatagctgaaaaggctctgaagaaacacaaagagcgcattggacatcggtacattgaaattttcaaaagcagcagagccgaagtccggactcattacgacccgccacgcaagctaatggccatgcagcgccctgggccttacgaccggcctggggcagggaggggatataacagcatcggcaggggcgctggcttcgagcggatgcggcgtggtgcttacggcggaggctatggtggatatgacgattacaatggctacaatgatggatacggcttcggttccgaccgcttcggtcgtgacctaaactactgtttctcaggaatgtctgaccaccgctatggcgatggaggaagtacttttcagtctacaactggccactgcgtgcacatgaggggacttccctacagagccaccgagaacgacatctacaactttttctccccgctcaacccagtccgcgtccacatagaaattgggcctgacggaagggtgaccggagaggccgacgtcgaattcgccacacatgaggatgctgtcgcagcaatgtcaaaagacaaagcaaacatgcaacaccggtatgtggaactcttcctcaatagcacagccggagctagtggcggagcttatgagcatcgctacgtcgagctctttctgaattctacagccggagcctcaggaggtgcctacggaagccagatgatgggcggaatggggctctctaaccagtcttcctacggcggtccagctagccagcagctgtccggcggttatgggggtggctacgggggtcaaagctccatgtctggctatgatcaagtgttacaggaaaatagtagtgactttcagtccaacatcgcctag

SEQ ID NO: 156978 - DNA, 1350 bp, Artificial Sequence
  derived and/or modified sequence
atgatgcttggaaccgaagggggtgaagggtttgtggtgaaagtcagaggtctgccctggagctgctccgcggacgaggttcagcgatttttttcggattgcaaaattcagaacggcgctcagggcattaggttcatttatactagggaaggaaggccaagcggcgaagcctttgtcgaactggaatcggaggatgaagtcaaactggcccttaaaaaggacagggaaacaatgggacacaggtatgttgaggtgttcaaaagcaacaatgtggagatggattgggttctgaaacatacaggccctaatagccctgatacggctaacgacgggtttgtgcgactgaggggtttgccgttcgggtgttcaaaagaagaaatagtgcagtttttcagtggcctcgagatcgtcccgaatggcattacgctacccgtggattttcagggcaggtccaccggggaagccttcgttcaattcgcctctcaggaaattgctgaaaaggccctgaagaagcacaaggagagaatcggccatcggtacatcgaaatatttaaaagtagcagggctgaagttcgcactcactatgacccaccaaggaaactcatggctatgcagagacccggtccatacgaccgtccaggggctggccgaggatataatagtatcggtcgcggtgctgggttcgagcgtatgcggagaggcgcttacgggggaggatatgggggatatgacgactacaatgggtataatgatgggtacggttttggatcggatcggtttggtagggacctgaactactgcttttctggcatgtcagaccatagatacggagacggaggatcgacctttcagtcaactaccgggcactgcgtccatatgagaggactgccttatagagccaccgagaacgacatttataacttcttcagccctctgaacccagttcgagtgcacatcgaaattggaccggacggacgggtgactggagaggcagacgttgagtttgcgacacacgaagatgccgtagcggctatgtctaaagataaagctaatatgcagcatcgctacgttgagctgttcctgaactcaaccgccggagccagcggcggagcatatgaacaccgctacgtggaactttttctgaactcaactgctggagccagtggcggagcttatggaagccagatgatggggggtatgggcctgagcaatcagagcagttatggtgggccagccagccagcaactgtcaggcggttatgggggagggtacggcggacagtctagtatgagcggatacgaccaggtactgcaggagaattccagcgatttccagtccaatattgcctag

SEQ ID NO: 156979 - DNA, 2248 bp, Artificial Sequence
  derived and/or modified sequence
gcagaactcgcacaagggaccttatttaggttgcgcaggcgcccgctggccatttcgtcttagccacgcagaagtcgcgtgtctagtttgtttcgacgccggaccgcgtaagagacgatgatgttgggcacggaaggtggagagggattcgtggtgaaggtccggggcttgccctggtcttgctcggccgatgaagtgcagaggtttttttctgactgcaaaattcaaaatggggctcaaggtattcgtttcatctacaccagagaaggcagaccaagtggcgaggcttttgttgaacttgaatcagaagatgaagtcaaattggccctgaaaaaagacagagaaactatgggacacagatatgttgaagtattcaagtcaaacaacgttgaaatggattgggtgttgaagcatactggtccaaatagtcctgacacggccaatgatggctttgtacggcttagaggacttccctttggatgtagcaaggaagaaattgttcagttcttctcagggttggaaatcgtgccaaatgggataacattgccggtggacttccaggggaggagtacgggggaggccttcgtgcagtttgcttcacaggaaatagctgaaaaggctctaaagaaacacaaggaaagaatagggcacaggtatattgaaatctttaagagcagtagagctgaagttagaactcattatgatccaccacgaaagcttatggccatgcagcggccaggtccttatgacagacctggggctggtagagggtataacagcattggcagaggagctggctttgagaggatgaggcgtggtgcttatggtggaggctatggaggctatgatgattacaatggctataatgatggctatggatttgggtcagatagatttggaagagacctcaattactgtttttcaggaatgtctgatcacagatacggggatggtggctctactttccagagcacaacaggacactgtgtacacatgcggggattaccttacagagctactgagaatgacatttataattttttttcaccgctcaaccctgtgagagtacacattgaaattggtcctgatggcagagtaactggtgaagcagatgtcgagttcgcaactcatgaagatgctgtggcagctatgtcaaaagacaaagcaaatatgcaacacagatatgtagaactcttcttgaattctacagcaggagcaagcggtggtgcttacgaacacagatatgtagaactcttcttgaattctacagcaggagcaagcggtggtgcttatggtagccaaatgatgggaggcatgggcttgtcaaaccagtccagctacgggggcccagccagccagcagctgagtgggggttacggaggcggctacggtggccagagcagcatgagtggatacgaccaagttttacaggaaaactccagtgattttcaatcaaacattgcataggtaaccaaggagcagtgaacagcagctactacagtagtggaagccgtgcatctatgggcgtgaacggaatgggagggttgtctagcatgtccagtatgagtggtggatggggaatgtaattgatcgatcctgatcactgactcttggtcaaccttttttttttttttttttttttctttaagaaaacttcagtttaacagtttctgcaatacaagcttgtgatttatgcttactctaagtggaaatcaggattgttatgaagacttaaggcccagtatttttgaatacaatactcatctaggatgtaacagtgaagctgagtaaactataactgttaaacttaagttccagcttttctcaagttagttataggatgtacttaagcagtaagcgtatttaggtaaaagcagttgaattatgttaaatgttgccctttgccacgttaaattgaacactgttttggatgcatgttgaaagacatgcttttatttttttgtaaaacaatataggagctgtgtctactattaaaagtgaaacattttggcatgtttgttaattctagtttcatttaataacctgtaaggcacgtaagtttaagctttttttttttttaagttaatgggaaaaatttgagacgcaataccaatacttaggattttggtcttggtgtttgtatgaaattctgaggccttgatttaaatctttcattgtattgtgatttccttttaggtatattgcgctaagtgaaacttgtcaaataaatcctccttttaaaaactgc

SEQ ID NO: 156980 - protein, 330 aa, Artificial Sequence
  derived and/or modified sequence
MEHLGPHHLHPGHAEPISFGIDQILNSPDQGGCMGPASRLQDGEYGLGCLVGGAYTYGGGGSAAATGAGGAGAYGTGGPGGPGGPAGGGGACSMGPLTGSYNVNMALAGGPGPGGGGGSSGGAGALSAAGVIRVPAHRPLAGAVAHPQPLATGLPTVPSVPAMPGVNNLTGLTFPWMESNRRYTKDRFTGHPYQNRTPPKKKKPRTSFTRLQICELEKRFHRQKYLASAERAALAKALKMTDAQVKTWFQNRRTKWRRQTAEEREAERQQANRILLQLQQEAFQKSLAQPLPADPLCVHNSSLFALQNLQPWSDDSTKITSVTSVASACE

SEQ ID NO: 156981 - protein, 257 aa, Artificial Sequence
  derived and/or modified sequence
MEHLGPHHLHPGHAEPISFGIDQILNSPDQGGCMGPASRLQDGEYGLGCLVGGAYTYGGGGSAAATGAGGAGAYGTGGPGGPGGPAGGGGACSMGPLTGSYNVNMALAGGPGPGGGGGSSGGAGALSAAGVIRVPAHRPLAGAVAHPQPLATGLPTVPSVPAMPGVNNLTGLTFPWMESNRRYTKDRFTGHPYQNRTPPKKKKPRTSFTRLQICELEKRFHRQKYLASAERAALAKALKMTDAQVKTWFQNRRTKWR

SEQ ID NO: 156982 - DNA, 2123 bp, Artificial Sequence
  derived and/or modified sequence
tcccagagtcaacagcgagcgagcagccggagcggggaagcagaagccagagaggggaagaatacggcgccccctctctccctcccctcccccttctactttagcctttctgcgcacttcgcttccaagtctccgcgcagccaggagccgctgttgcctcccagcccctgctagctgccccccgagccgagcgcagcgagcgccgccgcccgggccccccggtggggccagggccagcatggagcacctgggtccgcaccacctccacccgggtcacgcagagcccattagcttcggcatcgaccagatcctcaacagcccggaccagggtggctgcatgggacccgcctcgcgcctccaggacggagaatacggccttggctgcttggtcggaggcgcctacacttacggcggcgggggctccgcggccgcgacgggggctggaggagcgggggcctatggtactggaggtcccggcggccccggaggcccggcaggcggcggcggcgcctgcagcatgggtcctctgaccggctcctacaacgtgaacatggccttggcaggcggccccggtcctggcggcggcggcggcagcagcggcggtgccggggcactcagcgctgcgggggtaatccgggtgccggcacacaggccgctcgccggagccgtggcccacccccagcccctggccaccggcttgcccaccgtgccctctgtgcctgccatgccgggcgtcaacaacctcactggcctcaccttcccctggatggagagtaaccgcagatacacaaaggacaggttcacaggtcacccctatcagaaccggacgccccccaagaagaagaagccgcgcacgtccttcacacgcctgcagatctgcgagctggagaagcgcttccaccgccagaagtacctggcctcggccgagcgcgccgccctggccaaggcgctcaaaatgaccgatgcgcaggtcaaaacctggttccagaaccggcggacaaagtggagacggcagactgcggaggaacgggaggccgagaggcagcaagcgaaccgcatcctcctgcagttgcagcaggaggccttccagaagagcctggcacagccgctgcccgctgaccctctgtgcgtgcacaactcgtcgctcttcgccctgcagaatctgcagccgtggtctgacgactcgaccaaaatcactagcgtcacgtcggtggcgtcggcctgcgagtgagcctgcccattctgccctgtgggaccccaggcccactcaggggtcactgaggcctgagacccaggactcctccccaccctcctggcctcagactgcacccaggaggggaacactgccctcgcacggccccgaagggcccccacatttgtgccgacactgttctcccttcggtggaagagctcaagggacaaggacacgcgcccccctcccagaggcgtcccgcacctgtctgaactgttaagaaatctgtttttgtttatttcattttattttaatttttaacgtgggattcagagaaaggcaagggaggtaagggaggaggagcttctggggtccccagggctgtcatctgaatttgccctgggaaaccccttctctgtgacccacttctcatcacacacatggaaacccataggcccacacacaggtggtgtcactgtccctcctggtgtcaccccagagccacacatgggcatctatgggagagtgtcaaccagacagagggtcacagtgtttacactttggaccttacgatcaggcacaggtcaggggtgacacagactcatcctgaacagcatggcactccctccagcacaaacacaaggtcatggccacactgtgacacactacaccacacacaacagccaacagctacaacagcctcacttggtctgccaggcccccaccacacatcccagcccaatccaggtacgcacagacaggttttcacataaatgcagcccatttctccagaacccatttgaggggtgggggggtgttaatttatgcacttataaggtgttttctgtgtaaccattttataaagtgcttgtgtaatttatgtgaaaaaaataaataaaagcctccggatccggaaaaaaaaaaaaaaaaa

SEQ ID NO: 156983 - DNA, 993 bp, Artificial Sequence
  derived and/or modified sequence
atggagcacctgggcccccaccacctgcaccccggccacgccgagcccatcagcttcggcatcgaccagatcctgaacagccccgaccagggcggctgcatgggccccgccagcagactgcaggacggcgagtacggcctgggctgcctggtgggcggcgcctacacctacggcggcggcggcagcgccgccgccaccggcgccggcggcgccggcgcctacggcaccggcggccccggcggccccggcggccccgccggcggcggcggcgcctgcagcatgggccccctgaccggcagctacaacgtgaacatggccctggccggcggccccggccccggcggcggcggcggcagcagcggcggcgccggcgccctgagcgccgccggcgtgatcagagtgcccgcccacagacccctggccggcgccgtggcccacccccagcccctggccaccggcctgcccaccgtgcccagcgtgcccgccatgcccggcgtgaacaacctgaccggcctgaccttcccctggatggagagcaacagaagatacaccaaggacagattcaccggccacccctaccagaacagaaccccccccaagaagaagaagcccagaaccagcttcaccagactgcagatctgcgagctggagaagagattccacagacagaagtacctggccagcgccgagagagccgccctggccaaggccctgaagatgaccgacgcccaggtgaagacctggttccagaacagaagaaccaagtggagaagacagaccgccgaggagagagaggccgagagacagcaggccaacagaatcctgctgcagctgcagcaggaggccttccagaagagcctggcccagcccctgcccgccgaccccctgtgcgtgcacaacagcagcctgttcgccctgcagaacctgcagccctggagcgacgacagcaccaagatcaccagcgtgaccagcgtggccagcgcctgcgagtag

SEQ ID NO: 156984 - DNA, 993 bp, Artificial Sequence
  derived and/or modified sequence
atggagcacttagggcctcatcacctgcaccccggccatgccgagcccatttcatttgggatcgaccagattcttaactctccagatcagggaggttgcatggggcccgcttcccgcttgcaggatggggaatacggcctcgggtgtctcgtcggaggcgcatatacttacggcgggggcggatcggctgccgcgaccggtgccggcggcgctggagcatatggtactggtgggcctgggggtcctgggggtcccgcaggcggtggcggtgcgtgctccatgggtccccttacggggtcttacaatgtcaatatggcactggctggtggccccggtcccggtgggggcggcggctcaagcggcggcgccggcgcactgagtgccgccggcgtgatccgggtgcctgcccaccggcctctcgccggggccgtggcacacccacagcccctggcaaccggcttgcctactgtccctagtgtgcctgccatgcctggcgtgaataatctcactggcctgactttcccttggatggagagcaatcgtcggtacacgaaggatcggttcacgggtcacccctatcagaacagaacacctccaaagaagaagaaaccacggaccagtttcacaaggttacagatctgtgaactggaaaagcgtttccacaggcagaagtacctggcaagcgccgaaagagctgccctcgccaaggccttaaaaatgaccgatgctcaggtcaaaacctggtttcagaatagacgcactaagtggagacgacaaaccgccgaagaaagggaagccgagaggcaacaagcaaaccgaatattgttacagttgcagcaggaggcgttccagaagtctctggcccagccactcccagccgatccactgtgcgtgcacaattcttctctgtttgccttgcaaaatttgcagccatggagtgatgattccaccaagatcacctctgtgacgagtgtcgcctcggcatgtgagtag

SEQ ID NO: 156985 - DNA, 993 bp, Artificial Sequence
  derived and/or modified sequence
atggagcacctgggcccccaccacctgcaccctggccacgccgagcccatcagctttggaattgaccagatcctgaacagcccagaccagggcggctgcatgggccctgccagccggctgcaggatggagaatatggcctgggctgcctggtgggcggggcctacacctatggaggcggcggcagcgctgctgccaccggggccggcggggccggggcctacggcaccggcggccctgggggccctgggggccctgctgggggcggcggggcctgcagcatgggccccctgaccggcagctacaacgtgaacatggccctggccggcggccctggccctgggggcggcggcggcagcagcggcggggccggggccctgtctgctgctggggtcatccgggtgcctgcccaccggcccctggccggggctgtggcccacccccagcccctggccaccggcctgcccaccgtgcccagcgtgcctgccatgcctggggtgaacaacctgaccggcctgaccttcccctggatggagagcaacagacgctacaccaaggaccgcttcaccggccacccctaccagaacagaacaccacccaagaagaagaagcccaggaccagcttcacccggctgcagatctgtgagctggagaagcgcttccaccggcagaagtacctggccagcgctgagcgggccgccctggccaaggccctgaagatgacagatgcccaggtgaagacctggttccagaacagaaggaccaagtggaggcggcagacagctgaggagcgggaggccgagcggcagcaggccaaccgcatcctgctgcagctgcagcaggaggccttccagaagagcctggcccagcccctgcctgctgaccccctgtgtgtgcacaacagcagcctgtttgccctgcagaacctgcagccctggagcgatgacagcaccaagatcacctctgtgacctctgtggccagcgcctgtgagtag

SEQ ID NO: 156986 - DNA, 993 bp, Artificial Sequence
  derived and/or modified sequence
atggagcacctgggcccccaccacctgcaccccggccacgccgagcccatctcgttcgggatagaccaaatactcaattcccccgaccagggggggtgcatgggccctgccagcagactgcaggacggtgagtacggcttgggttgcttggtcggaggtgcctatacctacggaggcggaggttccgcagccgcaactggggccggtggcgccggggcctatggcactggcggtcccggggggccaggaggaccagccggcggcggcggtgcctgcagcatgggaccgcttaccggttcatataatgtgaacatggcgctcgcgggtgggccaggtcccggtgggggcggaggcagttccggaggtgccggcgctctctccgcagccggtgttattcgggtgccagctcatcgtcctctcgctggagctgtggcacatccacaacccctagccaccggattgcctacagtaccaagcgttccggccatgcccggcgtcaataatctcacaggactgacctttccctggatggaatctaatcgcagatacaccaaagatagattcactggccacccataccagaataggaccccacctaagaagaaaaaaccacgaacctccttcactcgcctccaaatttgcgaattagagaagcggttccatcgacagaaatacctggcttccgctgagcgagcggccctcgcaaaagccttaaagatgactgatgcacaggtcaaaacatggtttcaaaacagacgaaccaagtggagacggcagacagccgaggaacgcgaggccgaaagacagcaggcaaacaggatattattacaactccaacaagaggcatttcaaaaatcactcgcacaaccactgccagctgatccactctgcgtccataatagtagcctatttgccttgcaaaacctgcagccttggtcagacgacagtacaaaaatcaccagcgttacctccgtagcgtccgcttgcgagtag

SEQ ID NO: 156987 - DNA, 993 bp, Artificial Sequence
  derived and/or modified sequence
atggaacacctcggccctcatcacctccaccctggtcatgccgaacctatatcctttggaatcgaccagatcctgaacagtcctgaccaaggcggttgcatgggcccagccagccggctacaggacggcgagtatggactgggatgtctcgtcggaggggcatacacatacgggggtgggggatcagcagctgcaaccggggctgggggagcgggagcttatggcactggaggccctggcggtccaggaggaccggcaggcggaggcggagcctgctcaatgggccctcttaccggatcctacaacgttaacatggccctagccggaggcccagggccagggggtggcggaggaagtagcggcggagcaggagcgttgtcagcggctggtgtgatacgtgtgcctgcccatcgcccactggctggcgctgtggctcacccccagccattggctactggtttaccaaccgtcccgagtgtgccagccatgcctggggtgaacaacctgacaggtctcaccttcccatggatggagtccaacaggagatatacaaaggacaggttcaccgggcacccttaccagaatcgaactccaccaaaaaaaaaaaaacctagaaccagctttacaagactgcagatttgcgaactcgaaaagagatttcaccggcagaagtacctcgctagcgcagaacgcgctgccctggcgaaggcactgaagatgacagatgctcaagtgaagacatggtttcagaatcggagaacaaaatggcgacggcagacggctgaagagagagaggccgaaaggcagcaagcaaaccgcatacttctccagctacaacaggaggcgttccagaagtctctagcccagcctctgccagccgaccctctgtgcgttcataactcctcgctcttcgccctgcagaacctgcagccttggagtgatgactctactaaaatcacctccgttaccagtgtcgcgtcagcttgcgagtag

SEQ ID NO: 156988 - DNA, 3910 bp, Artificial Sequence
  derived and/or modified sequence
ttccccacagatacaaacttccaaccagcacgtaggtttccaggctaacccacaaaagcaagttgagtctagctcctccatattgatccacaccaatcatagctattctgaaatgtactttcctcacatctgtaaaatagggagaatactcatctcgaaggattggtgtagagtttatattgttctccataatactaacatctgtcttgttgtatttgcttctttgcttattgtctgaccccctctatagaatgtaagcttcatgaggtcaggacctttgttttgttcactgctatgtcccccatgcctagaacagtgcctgacacatagtgagtacagtactcaataaatattattgaataaagagatacattctttgttattcacccaagatgaccatattttgttgtttggggctgtattcttcaggagagaacagaaatgaataagccactctctgcctccaagaagatctcttcaagtggaggtgacagacatgcccaaagcaaatagattgcaataagacttgatgggagagaatgtgagtcttcacatcctagcatctttccagatagagacagggcctacccaaaagtctaatctgaaactgaactgaaatagaacagaaatagatcccaagtgatggaacctgtgcctttcccaaagcttggcttctaaaaggtagcaaacattttctactggagaggggaaagacaggaagaagaaaaagggagtttcctccttttctcttgggctctcagccagacagccactggcaaaacgttggaaaggcctaaatttgtcctggatgcacttccctgatcctagtcccaccaatcccagcccccacggccttaagcccctatggctccctcccaagattccaaacgtaagaaaagaacacacaccacagtccaaaggcttcttgtctggaatagccaaccctggggtaattgttaggtggaatgcaatctggttgaattcattcaaacactgtaggaattgcctctttcgaaccctgtaggattttacttcttgacgcatctgtttatttaaaaccaaaggggtatgttgaggcatgggcaccctggcagcagaccccaaaccaaccctcttgacttgtgcctgcctttcaggatatgttcccttcctgaatttgtctaagaaggctgagttggggggtggttgctgatttttataacatatagccagttgttcataggcctgtgttttaaagaagggcaagcctgaactcaccgtcctgcctcagggcctgggctccatacctggggagtagacagtcttctactttctaaaaagctggacttgaaatttggagtaaatctcctggttgagtgacaggtgtttcgcagctgagcccttgaggagattctccagttgggcagagacatcccttcctcagacgccttgtgggctggactcctttggcccagttcaaagtgaggggagggctcccaacaggccgggaagacagttgacttcaccctccttgggtttgtctgtctgtccgtctctgggaatggtcgcttcctgttttcccttttccttttaagcctcgccttgttcccctcttctctctcttcatgaactactccgagtcttggtctccgtccctctatctctggctcctgcatctgtctcggcttctggccttcctctccccctcccctcccctccctcgcgctgtcattcaccccgctcctctccgcgcacagccaatggagagacccagtcgaaaccgcgaagctctcttgcaccgggctttttcgcctggtgattgatgtcccagagtcaacagcgagcgagcagccggagcggggaagcagaagccagagaggggaagaatacggcgccccctctctccctcccctcccccttctactttagcctttctgcgcacttcgcttccaagtctccgcgcagccaggagccgctgttgcctcccagcccctgctagctgccccccgagccgagcgcagcgagcgccgccgcccgggccccccggtggggccagggccagcatggagcacctgggtccgcaccacctccacccgggtcacgcagagcccattagcttcggcatcgaccagatcctcaacagcccggaccagggtggctgcatgggacccgcctcgcgcctccaggacggagaatacggccttggctgcttggtcggaggcgcctacacttacggcggcgggggctccgcggccgcgacgggggctggaggagcgggggcctatggtactggaggtcccggcggccccggaggcccggcaggcggcggcggcgcctgcagcatgggtcctctgaccggctcctacaacgtgaacatggccttggcaggcggccccggtcctggcggcggcggcggcagcagcggcggtgccggggcactcagcgctgcgggggtaatccgggtgccggcacacaggccgctcgccggagccgtggcccacccccagcccctggccaccggcttgcccaccgtgccctctgtgcctgccatgccgggcgtcaacaacctcactggcctcaccttcccctggatggagagtaaccgcagatacacaaaggacaggttcacaggtcacccctatcagaaccggacgccccccaagaagaagaagccgcgcacgtccttcacacgcctgcagatctgcgagctggagaagcgcttccaccgccagaagtacctggcctcggccgagcgcgccgccctggccaaggcgctcaaaatgaccgatgcgcaggtcaaaacctggttccagaaccggcggacaaagtggagacggcagactgcggaggaacgggaggccgagaggcagcaagcgaaccgcatcctcctgcagttgcagcaggaggccttccagaagagcctggcacagccgctgcccgctgaccctctgtgcgtgcacaactcgtcgctcttcgccctgcagaatctgcagccgtggtctgacgactcgaccaaaatcactagcgtcacgtcggtggcgtcggcctgcgagtgagcctgcccattctgccctgtgggaccccaggcccactcaggggtcactgaggcctgagacccaggactcctccccaccctcctggcctcagactgcacccaggaggggaacactgccctcgcacggccccgaagggcccccacatttgtgccgacactgttctcccttcggtggaagagctcaagggacaaggacacgcgcccccctcccagaggcgtcccgcacctgtctgaactgttaagaaatctgtttttgtttatttcattttattttaatttttaacgtgggattcagagaaaggcaagggaggtaagggaggaggagcttctggggtccccagggctgtcatctgaatttgccctgggaaaccccttctctgtgacccacttctcatcacacacatggaaacccataggcccacacacaggtggtgtcactgtccctcctggtgtcaccccagagccacacatgggcatctatgggagagtgtcaaccagacagagggtcacagtgtttacactttggaccttacgatcaggcacaggtcaggggtgacacagactcatcctgaacagcatggcactccctccagcacaaacacaaggtcatggccacactgtgacacactacaccacacacaacagccaacagctacaacagcctcacttggtctgccaggcccccaccacacatcccagcccaatccaggtacgcacagacaggttttcacataaatgcagcccatttctccagaacccatttgaggggtgggggggtgttaatttatgcacttataaggtgttttctgtgtaaccattttataaagtgcttgtgtaatttatgtgaaaaaaataaataaaagcctccggatccgg

SEQ ID NO: 156989 - DNA, 1838 bp, Artificial Sequence
  derived and/or modified sequence
tcccagagtcaacagcgagcgagcagccggagcggggaagcagaagccagagaggggaagaatacggcgccccctctctccctcccctcccccttctactttagcctttctgcgcacttcgcttccaagtctccgcgcagccaggagccgctgttgcctcccagcccctgctagctgccccccgagccgagcgcagcgagcgccgccgcccgggccccccggtggggccagggccagcatggagcacctgggtccgcaccacctccacccgggtcacgcagagcccattagcttcggcatcgaccagatcctcaacagcccggaccagggtggctgcatgggacccgcctcgcgcctccaggacggagaatacggccttggctgcttggtcggaggcgcctacacttacggcggcgggggctccgcggccgcgacgggggctggaggagcgggggcctatggtactggaggtcccggcggccccggaggcccggcaggcggcggcggcgcctgcagcatgggtcctctgaccggctcctacaacgtgaacatggccttggcaggcggccccggtcctggcggcggcggcggcagcagcggcggtgccggggcactcagcgctgcgggggtaatccgggtgccggcacacaggccgctcgccggagccgtggcccacccccagcccctggccaccggcttgcccaccgtgccctctgtgcctgccatgccgggcgtcaacaacctcactggcctcaccttcccctggatggagagtaaccgcagatacacaaaggacaggttcacaggtcacccctatcagaaccggacgccccccaagaagaagaagccgcgcacgtccttcacacgcctgcagatctgcgagctggagaagcgcttccaccgccagaagtacctggcctcggccgagcgcgccgccctggccaaggcgctcaaaatgaccgatgcgcaggtcaaaacctggttccagaaccggcggacaaagtggaggtaacggcttgttcccggtgcagacggcagactgcggaggaacgggaggccgagaggcagcaagcgaaccgcatcctcctgcagttgcagcaggaggccttccagaagagcctggcacagccgctgcccgctgaccctctgtgcgtgcacaactcgtcgctcttcgccctgcagaatctgcagccgtggtctgacgactcgaccaaaatcactagcgtcacgtcggtggcgtcggcctgcgagtgagcctgcccattctgccctgtgggaccccaggcccactcaggggtcactgaggcctgagacccaggactcctccccaccctcctggcctcagactgcacccaggaggggaacactgccctcgcacggccccgaagggcccccacatttgtgccgacactgttctcccttcggtggaagagctcaagggacaaggacacgcgcccccctcccagaggcgtcccgcacctgtctgaactgttaagaaatctgtttttgtttatttcattttattttaatttttaacgtgggattcagagaaaggcaagggaggtaagggaggaggagcttctggggtccccagggctgtcatctgaatttgccctgggaaaccccttctctgtgacccacttctcatcacacacatggaaacccataggcccacacacaggtggtgtcactgtccctcctggtgtcaccccagagccacacatgggcatctatgggagagtgtcaaccagacagagggtcacagtgtttacactttggaccttacgatcaggcacaggtcaggggtgacacagactcatcctgaacagcatggcact

SEQ ID NO: 156990 - protein, 335 aa, Artificial Sequence
  derived and/or modified sequence
MDNARMNSFLEYPILSSGDSGTCSARAYPSDHRITTFQSCAVSANSCGGDDRFLVGRGVQIGSPHHHHHHHHRHPQPATYQTSGNLGVSYSHSSCGPSYGSQNFSAPYSPYALNQEADVSGGYPQCAPAVYSGNLSSPMVQHHHHHQGYAGGAVGSPQYIHHSYGQEHQSLALATYNNSLSPLHASHQEACRSPASETSSPAQTFDWMKVKRNPPKTGKVGEYGYLGQPNAVRTNFTTKQLTELEKEFHFNKYLTRARRVEIAASLQLNETQVKIWFQNRRMKQKKREKEGLLPISPATPPGNDEKAEESSEKSSSSPCVPSPGSSTSDTLTTSH

SEQ ID NO: 156991 - DNA, 2561 bp, Artificial Sequence
  derived and/or modified sequence
attcatatcatttttcttctccggccccatggaggaagtgagaaagttggcacagtcacgccgggcttcgcaggaccaggtcactcagtgacagatggacaatgcaagaatgaactccttcctggaataccccatacttagcagtggcgactcggggacctgctcagcccgagcctacccctcggaccataggattacaactttccagtcgtgcgcggtcagcgccaacagttgcggcggcgacgaccgcttcctagtgggcaggggggtgcagatcggttcgccccaccaccaccaccaccaccaccatcaccacccccagccggctacctaccagacttccgggaacctgggggtgtcctactcccactcaagttgtggtccaagctatggctcacagaacttcagtgcgccttacagcccctacgcgttaaatcaggaagcagacgtaagtggtgggtacccccagtgcgctcccgctgtttactctggaaatctctcatctcccatggtccagcatcaccaccaccaccagggttatgctgggggcgcggtgggctcgcctcaatacattcaccactcatatggacaggagcaccagagcctggccctggctacgtataataactccttgtcccctctccacgccagccaccaagaagcctgtcgctcccccgcatcggagacatcttctccagcgcagacttttgactggatgaaagtcaaaagaaaccctcccaaaacagggaaagttggagagtacggctacctgggtcaacccaacgcggtgcgcaccaacttcactaccaagcagctcacggaactggagaaggagttccacttcaacaagtacctgacgcgcgcccgcagggtggagatcgctgcatccctgcagctcaacgagacccaagtgaagatctggttccagaaccgccgaatgaagcaaaagaaacgtgagaaggagggtctcttgcccatctctccggccaccccgccaggaaacgacgagaaggccgaggaatcctcagagaagtccagctcttcgccctgcgttccttccccggggtcttctacctcagacactctgactacctcccactgaggcggctccagccccagacaacagcccaggcatctccttgggctgggacttcttacccaaagcacatgcttagcttatctttctttccatttacagtctctttcttcctttctaatcctatctggggagctcctggccaggataatatatttgcagataattctggaccagagacttggtgcggggttaacaccttcatccagattgggtgccagcatacattttctggtgggccttaacatccctcctgcttttaggagaattcacagaacctactgttcctttcagatgaccttttggaaaatagttccctttgccaacagaaacatgccagaaggaatcttctcatcttttatctaactatatgtacagctctcccctcccttgtccttgaaagtaggatatagcgaaaggcgagtccaggagctcaggaagaagagatgcactatatgtttacacaattaattcatcccttaatttaagtcattttcatgtgtgtgagtttgctggttgtaaatactttgtcctaagagatttatctttatacagattttctagaaatgtttaggttactaaaacagggtgggcaaactctctaaactggtacaattttataggtgaaagaaaaaattccctcatttaaacccaatcagatgcctcagagggtagccttgatttgttcttacagttaagaagccctgcagagcacaaacttcagaaacccggcttcctgtgctaagtctttcccaatctctacccctttcttctcgggccaccctctgtttaaaatttgtgctgggttattcagaacctaaaagtattattcaaaccaatttcttccttccacagttatcttagctggatataatgtattttcagctcaattgttaatgtgatggatggcacaatgaatgtatattttgtgttattcgtgaatagtcttttgcatgtcgcacaatgtttgatgtccccaaagtaccacactgagttctatcagttatcctttgtgagcctatgatattccccatttcctgtacaatcatgaacagctctgagatcctggagtgatatgatccagagcagagtttacgggtcttaggatgtctgtaataaataaatatactcaagtttcaggtatgcttaagcatccgtgtatttggctgggctacaatttgttaattcctatgaagttggcacatttcatgaggggaaagggagaagggtggtaaatattttcaaagagatgggccttttcttgaataaaagttaataacagctcctttattataatcaaagctcataatggaaaaaaagactgatgaagaaatttatgaagcagatttatttttgaaacaaacatggatacttcctgggtcaagtgctaaccttttcacctccaactggatgttgacgtatatataaacagaactcccttcaaaagccaaaaaaaaaaaaaaaa

SEQ ID NO: 156992 - DNA, 1008 bp, Artificial Sequence
  derived and/or modified sequence
atggataatgcacggatgaactcgtttctggaatatccaatcctctcttctggcgacagcggaacttgctctgcacgggcgtatccatcagatcacaggattactacatttcagtcttgtgccgtaagcgcaaactcttgcggtggggacgatcggtttctcgtgggcagaggcgtccagatcggatccccgcatcaccaccaccatcatcatcacagacatcctcagccggcaacatatcagacttccggcaacctcggtgtgtcctactcccatagcagttgtgggccatcctacgggagccagaatttttctgccccttacagtccatacgctctgaatcaagaagctgatgtgtcaggagggtacccacagtgtgcgcccgctgtgtactctggtaacctctcctctcccatggtccaacaccaccatcatcaccaaggatatgcaggcggggctgttggctctccacagtacatacaccactcttacggacaagagcaccaaagcttggccctagcgacttacaacaactcactgtcgccgctacatgctagtcaccaggaagcctgccggtctccggcctccgagaccagcagccctgcacagacatttgactggatgaaagttaagcgaaatccacccaagaccggcaaagtgggagagtatggttatctgggccagccaaatgctgtccggaccaatttcacaaccaaacagttgaccgagctggaaaaggagttccacttcaataaatatctaacccgggcacgccgggtggagatcgccgcctctctccagcttaacgaaacacaggtcaaaatctggttccagaaccgacgaatgaaacagaagaaacgcgaaaaggaagggctgttgcccatcagccctgcaacaccaccgggaaacgatgaaaaggctgaagaaagctctgaaaagagctcatcctccccctgtgtgccgagcccagggtcatctaccagcgatacgcttactacaagccactag

SEQ ID NO: 156993 - DNA, 2517 bp, Artificial Sequence
  derived and/or modified sequence
aggaagtgagaaagttggcacagtcacgccgggcttcgcaggaccaggtcactcagtgacagatggacaatgcaagaatgaactccttcctggaataccccatacttagcagtggcgactcggggacctgctcagcccgagcctacccctcggaccataggattacaactttccagtcgtgcgcggtcagcgccaacagttgcggcggcgacgaccgcttcctagtgggcaggggggtgcagatcggttcgccccaccaccaccaccaccaccaccatcgccacccccagccggctacctaccagacttccgggaacctgggggtgtcctactcccactcaagttgtggtccaagctatggctcacagaacttcagtgcgccttacagcccctacgcgttaaatcaggaagcagacgtaagtggtgggtacccccagtgcgctcccgctgtttactctggaaatctctcatctcccatggtccagcatcaccaccaccaccagggttatgctgggggcgcggtgggctcgcctcaatacattcaccactcatatggacaggagcaccagagcctggccctggctacgtataataactccttgtcccctctccacgccagccaccaagaagcctgtcgctcccccgcatcggagacatcttctccagcgcagacttttgactggatgaaagtcaaaagaaaccctcccaaaacagggaaagttggagagtacggctacctgggtcaacccaacgcggtgcgcaccaacttcactaccaagcagctcacggaactggagaaggagttccacttcaacaagtacctgacgcgcgcccgcagggtggagatcgctgcatccctgcagctcaacgagacccaagtgaagatctggttccagaaccgccgaatgaagcaaaagaaacgtgagaaggagggtctcttgcccatctctccggccaccccgccaggaaacgacgagaaggccgaggaatcctcagagaagtccagctcttcgccctgcgttccttccccggggtcttctacctcagacactctgactacctcccactgaggcggctccagccccagacaacagcccaggcatctccttgggctgggacttcttacccaaagcacatgcttagcttatctttctttccatttacagtctctttcttcctttctaatcctatctggggagctcctggccaggataatatatttgcagataattctggaccagagacttggtgcggggttaacaccttcatccagattgggtgccagcatacattttctggtgggccttaacatccctcctgcttttaggagaattcacagaacctactgttcctttcagatgaccttttggaaaatagttccctttgccaacagaaacatgccagaaggaatcttctcatcttttatctaactatatgtacagctctcccctcccttgtccttgaaagtaggatatagcgaaaggcgagtccaggagctcaggaagaagagatgcactatatgtttacacaattaattcatcccttaatttaagtcattttcatgtgtgtgagtttgctggttgtaaatactttgtcctaagagatttatctttatacagattttctagaaatgtttaggttactaaaacagggtgggcaaactctctaaactggtacaattttataggtgaaagaaaaaattccctcatttaaacccaatcagatgcctcagagggtagccttgatttgttcttacagttaagaagccctgcagagcacaaacttcagaaacccggcttcctgtgctaagtctttcccaatctctacccctttcttctcgggccaccctctgtttaaaatttgtgctgggttattcagaacctaaaagtattattcaaaccaatttcttccttccacagttatcttagctggatataatgtattttcagctcaattgttaatgtgatggatggcacaatgaatgtatattttgtgttattcgtgaatagtcttttgcatgtcgcacaatgtttgatgtccccaaagtaccacactgagttctatcagttatcctttgtgagcctatgatattccccatttcctgtacaatcatgaacagctctgagatcctggagtgatatgatccagagcagagtttacgggtcttaggatgtctgtaataaataaatatactcaagtttcaggtatgcttaagcatccgtgtatttggctgggctacaatttgttaattcctatgaagttggcacatttcatgaggggaaagggagaagggtggtaaatattttcaaagagatgggccttttcttgaataaaagttaataacagctcctttattataatcaaagctcataatggaaaaaaagactgatgaagaaatttatgaagcagatttatttttgaaacaaacatggatacttcctgggtcaagtgctaaccttttcacctccaactggatgttgacgtatatataaacagaactcccttcaaaagccaaaa

SEQ ID NO: 156994 - DNA, 1008 bp, Artificial Sequence
  derived and/or modified sequence
atggacaatgccaggatgaacagcttcctggagtaccccatcctgagcagcggggacagcggcacctgcagcgcccgggcctaccccagcgaccaccgcatcaccaccttccagagctgtgctgtgtctgccaacagctgtggaggagatgaccgcttcctggtgggccggggcgtgcagatcggcagcccccaccaccaccaccaccaccaccaccgccacccccagcctgccacctaccagaccagcggcaacctgggcgtgtcctacagccacagcagctgtggccccagctatggcagccagaacttcagcgccccctacagcccctatgccctgaaccaggaggctgatgtgtctgggggctacccccagtgtgccccagctgtgtacagcggcaacctgagcagccccatggtgcagcaccaccaccaccaccagggctacgccggcggcgctgtgggcagcccccagtacatccaccacagctatggccaggagcaccagagcctggccctggccacctacaacaacagcctgagccccctgcacgccagccaccaggaggcctgccgcagccctgccagcgagaccagcagccctgcccagacctttgactggatgaaggtgaagaggaacccccccaagacaggcaaggtgggggagtatggctacctgggccagcccaatgctgtgaggaccaacttcaccaccaagcagctgacagagctggagaaggagttccacttcaacaagtacctgacccgggcccggcgggtggagattgctgccagcctgcagctgaatgagacccaggtgaagatctggttccagaacagaaggatgaagcagaagaagcgggagaaggagggcctgctgcccatcagccctgccaccccacctggaaatgatgagaaggccgaggagagcagcgagaagagcagcagcagcccctgtgtgcccagccctggcagcagcaccagtgacaccctgaccaccagccactag

SEQ ID NO: 156995 - DNA, 1008 bp, Artificial Sequence
  derived and/or modified sequence
atggacaacgcccggatgaacagcttcctggagtaccccatcctgtcaagtggagactccggcacttgctcagcacgcgcatacccctccgatcatagaattacgacattccagagctgtgcagtaagtgccaacagctgtggaggagatgaccggttcctggtgggaagaggcgtccagatcggatccccacaccatcaccaccaccatcaccatcggcaccctcagccggccacctatcagacctcggggaacctgggcgtgtcttattcacattcatcatgcggccccagctacgggagtcagaatttctccgcgccctattctccatatgcactgaaccaggaagctgatgttagcggaggttacccgcagtgtgcccccgcggtatacagtggcaacctgtcctcaccaatggtccagcatcatcaccatcaccagggctatgcgggcggagctgttggatcaccacagtacattcaccacagctacggacaagagcatcaatccctggccctggccacatataacaattctctgtccccgctgcacgcgagtcaccaggaagcatgtcgttctcccgctagcgagaccagttcccccgcccagacattcgattggatgaaagtgaagcgaaacccaccaaaaacaggcaaagtgggcgaatatggctatttgggacagcccaacgccgtgcggactaattttacaacgaagcagctgacagagctggaaaaagaatttcacttcaacaagtacctgacccgtgcccgcagagtggagatagcggcctctttgcagctgaatgaaactcaggtcaaaatctggttccaaaacagaaggatgaagcaaaagaagagggagaaggaaggactgttacctatctcccctgcaactccccccgggaacgacgagaaagccgaggaatcttctgagaagtctagttcctctccctgtgtacccagccccggcagctcaacatctgatacacttaccacttcacactag

SEQ ID NO: 156996 - DNA, 1008 bp, Artificial Sequence
  derived and/or modified sequence
atggacaatgccaggatgaactccttcctggagtatcccatcctctccagcggcgatagcgggacctgctccgctcgggcataccctagcgaccatcgcatcaccacattccaaagctgtgcggtgtccgcaaacagctgcggaggtgacgatcgatttctcgtcgggcgtggagtgcaaatcggctctccgcaccaccatcaccaccaccaccaccgacacccccagcctgccacatatcagactagcggcaaccttggagtgtcttattcacactcctcatgtggtccaagctatggtagccagaattttagcgctccgtattctccatacgcgctgaatcaggaggctgatgtctcagggggttaccctcagtgcgctccagctgtctattctggcaatttgtcctctcctatggtccaacatcatcaccaccaccaaggttacgccggaggggctgtaggatctccacagtacatccatcacagctatggccaagagcatcaaagtctcgctttggctacatacaacaactccctgtcacctctccacgctagccatcaggaagcctgtcgttcacccgcttcggagacctcaagccccgcacaaacctttgactggatgaaagtgaagcgcaaccctcctaagacagggaaagtgggggaatacggatatcttgggcagccaaatgccgtccggacaaattttacgaccaagcagctcactgagctggagaaggagtttcactttaacaagtatctcaccagagcacgacgggttgaaatagctgcttcgcttcagttgaatgagacccaagtcaagatctggttccagaataggagaatgaaacagaaaaagcgagagaaggagggcctgttgccgatctcacccgcaactcctcctggaaatgacgaaaaggcggaggagtctagcgaaaaatcctcctctagcccatgcgtgccttcccccggatcctcaacctcggacaccctgacaacctcccactag

SEQ ID NO: 156997 - DNA, 1008 bp, Artificial Sequence
  derived and/or modified sequence
atggacaacgccagaatgaacagcttcctggagtaccccatcctgagcagcggcgacagcggcacctgcagcgccagagcctaccccagcgaccacagaatcaccaccttccagagctgcgccgtgagcgccaacagctgcggcggcgacgacagattcctggtgggcagaggcgtgcagatcggcagcccccaccaccaccaccaccaccaccacagacacccccagcccgccacctaccagaccagcggcaacctgggcgtgagctacagccacagcagctgcggccccagctacggcagccagaacttcagcgccccctacagcccctacgccctgaaccaggaggccgacgtgagcggcggctacccccagtgcgcccccgccgtgtacagcggcaacctgagcagccccatggtgcagcaccaccaccaccaccagggctacgccggcggcgccgtgggcagcccccagtacatccaccacagctacggccaggagcaccagagcctggccctggccacctacaacaacagcctgagccccctgcacgccagccaccaggaggcctgcagaagccccgccagcgagaccagcagccccgcccagaccttcgactggatgaaggtgaagagaaacccccccaagaccggcaaggtgggcgagtacggctacctgggccagcccaacgccgtgagaaccaacttcaccaccaagcagctgaccgagctggagaaggagttccacttcaacaagtacctgaccagagccagaagagtggagatcgccgccagcctgcagctgaacgagacccaggtgaagatctggttccagaacagaagaatgaagcagaagaagagagagaaggagggcctgctgcccatcagccccgccaccccccccggcaacgacgagaaggccgaggagagcagcgagaagagcagcagcagcccctgcgtgcccagccccggcagcagcaccagcgacaccctgaccaccagccactag

SEQ ID NO: 156998 - protein, 313 aa, Artificial Sequence
  derived and/or modified sequence
MDFDERGPCSSNMYLPSCTYYVSGPDFSSLPSFLPQTPSSRPMTYSYSSNLPQVQPVREVTFREYAIEPATKWHPRGNLAHCYSAEELVHRDCLQAPSAAGVPGDVLAKSSANVYHHPTPAVSSNFYSTVGRNGVLPQAFDQFFETAYGTPENLASSDYPGDKSAEKGPPAATATSAAAAAAATGAPATSSSDSGGGGGCRETAAAAEEKERRRRPESSSSPESSSGHTEDKAGGSSGQRTRKKRCPYTKYQIRELEREFFFSVYINKEKRLQLSRMLNLTDRQVKIWFQNRRMKEKKINRDRLQYYSANPLL

SEQ ID NO: 156999 - DNA, 2653 bp, Artificial Sequence
  derived and/or modified sequence
cttcaaagaggcagctgcagtggagaatcatgttaagctcggctactgcggagagcccaaggtagcccaataatggattttgatgagcgtggtccctgctcctctaacatgtatttgccaagttgtacttactacgtctcgggtccagatttctccagcctcccttcttttctgccccagaccccgtcttcgcgcccaatgacatactcctactcctccaacctgccccaggtccaacccgtgcgcgaagtgaccttcagagagtacgccattgagcccgccactaaatggcacccccgcggcaatctggcccactgctactccgcggaggagctcgtgcacagagactgcctgcaggcgcccagcgcggccggcgtgcctggcgacgtgctggccaagagctcggccaacgtctaccaccaccccacccccgcagtctcgtccaatttctatagcaccgtgggcaggaacggcgtcctgccacaggctttcgaccagtttttcgagacagcctacggcaccccggaaaacctcgcctcctccgactaccccggggacaagagcgccgagaaggggcccccggcggccacggcgacctccgcggcggcggcggcggctgcaacgggcgcgccggcaacttcaagttcggacagcggcggcggcggcggctgccgggagacggcggcggcagcagaggagaaagagcggcggcggcgccccgagagcagcagcagccccgagtcgtcttccggccacactgaggacaaggccggcggctccagtggccaacgcacccgcaaaaagcgctgcccctataccaagtaccagatccgagagctggaacgggagttcttcttcagcgtctacattaacaaagagaagcgcctgcaactgtcccgcatgctcaacctcactgatcgtcaagtcaaaatctggtttcagaacaggagaatgaaggaaaaaaaaattaacagagaccgtttacagtactactcagcaaatccactcctctaagactccagcggctggaattgggtggggggcttcatacacatgagataatatgcagattttgcccttgacaaagtcaagccacatggtgacttttgaaaagaggtgtgcaagagagggatgcatggagatagccccacaggaggtggtctgggactctcttgattaagatctcagtggttaagattcctaataatcattggattctgagagctgtgcatcagctagaatgacaggtttgggacccctggtggttcactcttggagcctgcagagctgcgggctgggtgtggtctccactggggattgggcccctgccagaccccctggagactaaccccaccacaccctccctctactgggagcctacccacccccaggacccctgagtaaaaaagctgtgtgctctccaagcccagttcagcttggggacaggggcaggaggaaggggtaggattactaggtgcccagaatgaggctgctttccaaagccaatgtgaacagcggctggacttggaggtagctttgaggtggaagagggctgcaaatccttgtgggaaaagaaatctatgattccaggtggcatcagtgtctttccactcctcctagccacccaccacactgatccagccctgagttcctagccaccgcctcctacagcccacctggcttttctttctaccaaatgagggtcttggttccagcctgccactcaggcccaaagcctcgacacagagtggactgttccctgaggtgggagatgtggaaaagccaagaggctgcagccaggccactggcccctgagatctctgcaggaaatggctgtggagtgtggcagtttggcaaactctccaccacacgtaatgaaacttggatttgctcagtgtctggctgcagagcagtgggcctggccagcaggtccccagctttggctatgagggccttgagtcccccaaaacaccgggttccagcaccacactcagccctcattggctcttgaactgagcttggaagcttctggtgaccttccaagagcctgagagtgaggtggaattattttaaaagataaatattatattatatatatatatatttccctgaaggaaccaaagcgaattttaaaagatgcaatgtagaggggaaaagagatgatgaaaatatttaaaggccctatctgtttacagtgttccgtggttaaactcgctcactgctaagaatatttgaatgtatgcttcatacagggatggtgttcaaaaaacttgtaaataaaggaaccataatcaattttcttttctttctttctctttttcttttttcttttgccattagttgatttcctttagggtgttggagggggtggaaaaggtattgagaatggtctttttaatctcttgcaacatttggaaagagttagggaaatgctcagaggcagtcggcctggccggcctggggatctcatctgggaaagccaggcaccctcccattgaatctcctttgcctccctgtgttaagaaatgtctgttggctccatttgtactgggagtgttggcctgtcctcaattctggttcttacccaccgtgtgtgttgcagcacttatacaggcaactgggcacaaggaaaataaagacggtggaaatttga

SEQ ID NO: 157000 - DNA, 942 bp, Artificial Sequence
  derived and/or modified sequence
atggacttcgacgaacgcggaccttgttcttccaatatgtaccttccatcctgcacctactatgtgtctggacccgatttttccagcctgccatcatttcttccccagaccccaagtagtcgccctatgacctatagctactcaagcaatctcccccaagtgcaaccagtgcgggaggttacttttagggaatatgccatcgagcccgccaccaagtggcatcctcgggggaatttagcgcactgttattccgcggaagagctggtgcatagggattgtcttcaagccccaagcgctgcgggtgttccaggtgatgttttagcaaagagcagcgcaaatgtgtaccaccatccaaccccagcagtgtcttctaacttctacagcacagtcgggagaaacggtgtgctgcctcaggcttttgaccagtttttcgaaacagcctatggtactccagaaaatttggcgtcctcagactatcctggggacaaatcagccgagaagggccctcctgccgccactgctacatcagcagcagccgctgccgctgcaaccggggccccggccacctcatccagcgactcaggaggcggggggggctgtagagaaacagcagctgctgccgaagaaaaggagcggcggcggagacccgagagcagttcatcacctgaatcttcatcaggtcacactgaggacaaggccggaggttcaagcgggcagaggactcggaagaaacgctgcccttacacgaagtatcagattcgagaactggagcgggaattctttttctcagtatatatcaataaggaaaagagactgcagctgagcaggatgcttaaccttacagatagacaagtgaagatttggttccagaatcggaggatgaaggagaaaaagatcaaccgggaccggctacagtattactcagccaatccactgctgtag

SEQ ID NO: 157001 - DNA, 2295 bp, Artificial Sequence
  derived and/or modified sequence
cttcaaagaggcagctgcagtggagaatcatgttaagctcggctactgcggagagcccaaggtagcccaataatggattttgatgagcgtggtccctgctcctctaacatgtatttgccaagttgtacttactacgtctcgggtccagatttctccagcctcccttcttttctgccccagaccccgtcttcgcgcccaatgacatactcctactcctccaacctgccccaggtccaacccgtgcgcgaagtgaccttcagagagtacgccattgagcccgccactaaatggcacccccgcggcaatctggcccactgctactccgcggaggagctcgtgcacagagactgcctgcaggcgcccagcgcggccggcgtgcctggcgacgtgctggccaagagctcggccaacgtctaccaccaccccacccccgcagtctcgtccaatttctatagcaccgtgggcaggaacggcgtcctgccacaggctttcgaccagtttttcgagacagcctacggcaccccggaaaacctcgcctcctccgactaccccggggacaagagcgccgagaaggggcccccggcggccacggcgacctccgcggcggcggcggcggctgcaacgggcgcgccggcaacttcaagttcggacagcggcggcggcggcggctgccgggagacggcggcggcagcagaggagaaagagcggcggcggcgccccgagagcagcagcagccccgagtcgtcttccggccacactgaggacaaggccggcggctccagtggccaacgcacccgcaaaaagcgctgcccctataccaagtaccagatccgagagctggaacgggagttcttcttcagcgtctacattaacaaagagaagcgcctgcaactgtcccgcatgctcaacctcactgatcgtcaagtcaaaatctggtttcagaacaggagaatgaaggaaaaaaaaattaacagagaccgtttacagtactactcagcaaatccactcctctaagactccagcggctggaattgggtggggggcttcatacacatgagataatatgcagattttgcccttgacaaagtcaagccacatggtgacttttgaaaagaggtgtgcaagagagggatgcatggagatagccccacaggaggtggtctgggactctcttgattaagatctcagtggttaagattcctaataatcattggattctgagagctgtgcatcagctagaatgacaggtttgggacccctggtggttcactcttggagcctgcagagctgcgggctgggtgtggtctccactggggattgggcccctgccagaccccctggagactaaccccaccacaccctccctctactgggagcctacccacccccaggacccctgagtaaaaaagctgtgtgctctccaagcccagttcagcttggggacaggggcaggaggaaggggtaggattactaggtgcccagaatgaggctgctttccaaagccaatgtgaacagcggctggacttggaggtagctttgaggtggaagagggctgcaaatccttgtgggaaaagaaatctatgattccaggtggcatcagtgtctttccactcctcctagccacccaccacactgatccagccctgagttcctagccaccgcctcctacagcccacctggcttttctttctaccaaatgagggtcttggttccagcctgccactcaggcccaaagcctcgacacagagtggactgttccctgaggtgggagatgtggaaaagccaagaggctgcagccaggccactggcccctgagatctctgcaggaaatggctgtggagtgtggcagtttggcaaactctccaccacacgtaatgaaacttggatttgctcagtgtctggctgcagagcagtgggcctggccagcaggtccccagctttggctatgagggccttgagtcccccaaaacaccgggttccagcaccacactcagccctcattggctcttgaactgagcttggaagcttctggtgaccttccaagagcctgagagtgaggtggaattattttaaaagataaatattatattatatatatatatatttccctgaaggaaccaaagcgaattttaaaagatgcaatgtagaggggaaaagagatgatgaaaatatttaaaggccctatctgtttacagtgttccgtggttaaactcgctcactgctaagaatatttgaatgtatgcttcatacagggatggtgttcaaaaaacttgtaaataaaggaaccataatcaa

SEQ ID NO: 157002 - DNA, 942 bp, Artificial Sequence
  derived and/or modified sequence
atggactttgatgagcggggcccctgcagcagcaacatgtacctgcccagctgcacctactacgtgtctggccctgacttcagcagcctgcccagcttcctgccccagacccccagcagccggcccatgacctacagctacagcagcaacctgccccaggtgcagcctgtgcgggaggtgaccttccgggagtatgccattgaaccagccaccaagtggcacccccggggcaacctggcccactgctacagcgctgaggagctggtgcaccgggactgcctgcaggcccccagcgctgctggggtgcctggagatgtgctggccaagagcagcgccaacgtgtaccaccaccccaccccagctgtgagcagcaacttctacagcacagtgggcagaaatggagtgctgccccaggcctttgaccagttctttgaaacagcctacggcaccccagagaacctggccagcagtgactacccaggggacaagtctgctgagaagggccccccagctgccacagccaccagcgctgctgctgctgctgctgccaccggggccccagccaccagcagcagtgacagcggcggcggcggcggctgccgggagacagctgctgctgctgaggagaaggagaggagaagaagacctgagagcagcagcagccctgagagcagcagcggccacacagaggacaaggccggcggcagcagcggccagaggaccaggaagaagcgctgcccctacaccaagtaccagatccgggagctggagcgggagttcttcttctctgtgtacatcaacaaggagaagaggctgcagctgagcaggatgctgaacctgacagaccggcaggtgaagatctggttccagaacagaaggatgaaggagaagaagatcaacagagaccggctgcagtactacagcgccaaccccctgctgtag

SEQ ID NO: 157003 - DNA, 942 bp, Artificial Sequence
  derived and/or modified sequence
atggacttcgacgagcggggcccctgcagcagcaacatgtacctgccctcctgtacctactacgtatccggacctgacttttctagcctcccatctttcttaccacagactccgtccagcaggcccatgacgtactcttactcctctaacctgccacaggtgcagcccgtgcgtgaggtgacctttcgggagtatgcaatcgagcccgccactaaatggcatccaagaggcaaccttgctcattgctacagtgctgaggaattggtgcatagggattgccttcaggctccaagtgccgccggcgttccaggtgatgtgctcgccaagtcctctgcaaacgtgtaccaccaccctacccctgcagtctcgagcaatttctattcaacagtagggcgcaatggagtcctgccgcaggcttttgaccagtttttcgaaaccgcttacgggactccggaaaacttggcctcgtcggattatccaggagacaaatctgcggagaaaggtcctcccgctgcgacagccacttcagcggccgcagcagctgcagcaaccggcgcacccgccacctcttctagtgactctggcgggggagggggatgcagggagacagcagctgcagccgaggagaaggaacgcagaaggagacccgagagctcctcatcacccgagagcagttctgggcataccgaagacaaagcggggggctcctcaggccagcggacccggaagaaacgatgcccttataccaagtaccaaatcagggaactcgagcgcgaattcttcttcagcgtatatattaacaaggaaaaacggctacagctatccaggatgctgaacctgaccgatagacaggtgaagatctggttccaaaatcgcagaatgaaggaaaaaaagatcaatagagatagactgcaatactattcagccaatcccctgctctag

SEQ ID NO: 157004 - DNA, 942 bp, Artificial Sequence
  derived and/or modified sequence
atggatttcgatgaaagagggccatgttcgagcaacatgtatctgccgagctgtacttattacgtgagtggccctgatttcagctcactgccttcctttctccctcagacaccttcctctcgaccaatgacctattcctactccagcaacctcccccaggtgcaacccgtgcgagaggtcacgttcagggaatatgcaatcgagccggcaactaaatggcaccccaggggcaacctcgcccattgttattctgcggaggaactggtacatcgtgactgcttgcaggctcccagcgccgctggtgtccctggagacgttctggccaagagctccgctaatgtgtatcatcaccccaccccggcagtatcctccaacttttactctacagtcgggagaaatggggtcttgccccaggcattcgaccaattttttgaaaccgcctacggcacaccagagaacctggcttcctctgactacccaggcgacaagtctgctgagaaggggcctccggctgccaccgcgacaagcgccgctgccgcagccgctgccacaggtgcgcctgccactagttccagtgacagcggtggtggcggtggctgtagagaaacagctgcggcagccgaagagaaagagaggcgccgtagaccagagtctagctcaagtcctgagagctcttccgggcacacggaggataaggccggaggatcctcaggacaacgaactaggaagaaacggtgtccgtataccaaatatcagatcagagaattagagagggagtttttcttctcagtgtatattaataaagagaagaggctgcagctgtctagaatgttaaacctgaccgatcgccaggtgaaaatctggtttcagaatcggagaatgaaggaaaagaaaatcaatcgcgatcgacttcagtattattcagctaaccccctgctctag

SEQ ID NO: 157005 - DNA, 942 bp, Artificial Sequence
  derived and/or modified sequence
atggatttcgatgaacgcggcccatgtagctcgaacatgtaccttcctagctgcacctactatgtgagtggccctgatttctctagcctgccctctttcctgccccagacgcctagctctcggccaatgacctacagctactcatcaaacttacctcaagtgcaacctgtacgagaagttacatttagggaatacgccattgagccagccaccaaatggcaccctaggggcaacctcgcacactgctactcagctgaggaactggttcacagagactgcctccaagccccctccgccgctggtgtccctggcgacgtacttgccaaaagtagtgcaaacgtataccatcatcctactcccgctgtgtcatccaacttttattcaacagtcggccgtaacggcgttttacctcaggccttcgaccagttctttgaaactgcctatggcactcccgagaacctagcaagcagcgattatccaggggacaagagtgccgagaaaggcccccccgcggctaccgcgacttccgccgccgccgctgcagcagctactggagccccagcgacctcctcctctgactcaggtggaggcggcgggtgtagagagaccgcagcagcagctgaagaaaaggaaagaaggcgtaggcccgagagttcctccagccccgagtcgtcatcgggacatacagaggataaggctggaggctccagcggtcagcgaacaagaaaaaagcggtgtccctacactaaatatcagatccgggagctcgagagagagttcttttttagtgtgtacattaacaaagagaaaagactccagctgtcccgaatgctgaatctgacggatcggcaggtgaagatatggttccaaaaccgacggatgaaagaaaagaaaatcaaccgagatcgattacaatattacagtgccaacccattactgtag

SEQ ID NO: 157006 - DNA, 942 bp, Artificial Sequence
  derived and/or modified sequence
atggacttcgatgaacgcggtccatgttccagcaacatgtacctcccaagttgtacttactatgtgtcaggcccggacttttctagtttgccctccttcctgccccagacacccagcagcagacctatgacctatagctactcatcaaacctcccccaagtgcaacccgtacgcgaggtgaccttcagagaatatgccatcgaacctgccactaaatggcaccctcgcggaaatctggcacactgctattcagccgaagaactagttcacagggattgtctgcaagcaccatctgctgccggtgtccctggcgacgtacttgccaaaagtagtgcaaacgtataccatcatcctactcccgctgtgtcatccaacttttattcaacagtcggccgtaacggcgttttacctcaggccttcgaccagttctttgaaactgcctatggcactcccgagaacctagcaagcagcgattatccaggggacaagagtgccgagaaaggcccccccgcggctaccgcgacttccgccgccgccgctgcagcagctactggagccccagcgacctcctcctctgactcaggtggaggcggcgggtgtagagagacagccgccgcagccgaagagaaagagcgtcgaagaaggccagaatcttcatcctcccctgaatccagcagtggccatactgaagacaaagcaggaggctcatctgggcagagaactaggaagaagagatgtccgtataccaaataccagatccgcgagctcgaacgagagtttttcttctctgtctatatcaacaaagagaaacgcctgcaactttcgcgaatgctgaacctgactgatcgccaggtgaagatctggtttcaaaacagacgtatgaaggagaaaaaaattaatagagaccggctgcaatactactccgctaatcccctattatag

SEQ ID NO: 157007 - DNA, 942 bp, Artificial Sequence
  derived and/or modified sequence
atggacttcgacgagagaggcccctgcagcagcaacatgtacctgcccagctgcacctactacgtgagcggccccgacttcagcagcctgcccagcttcctgccccagacccccagcagcagacccatgacctacagctacagcagcaacctgccccaggtgcagcccgtgagagaggtgaccttcagagagtacgccatcgagcccgccaccaagtggcaccccagaggcaacctggcccactgctacagcgccgaggagctggtgcacagagactgcctgcaggcccccagcgccgccggcgtgcccggcgacgtgctggccaagagcagcgccaacgtgtaccaccaccccacccccgccgtgagcagcaacttctacagcaccgtgggcagaaacggcgtgctgccccaggccttcgaccagttcttcgagaccgcctacggcacccccgagaacctggccagcagcgactaccccggcgacaagagcgccgagaagggcccccccgccgccaccgccaccagcgccgccgccgccgccgccgccaccggcgcccccgccaccagcagcagcgacagcggcggcggcggcggctgcagagagaccgccgccgccgccgaggagaaggagagaagaagaagacccgagagcagcagcagccccgagagcagcagcggccacaccgaggacaaggccggcggcagcagcggccagagaaccagaaagaagagatgcccctacaccaagtaccagatcagagagctggagagagagttcttcttcagcgtgtacatcaacaaggagaagagactgcagctgagcagaatgctgaacctgaccgacagacaggtgaagatctggttccagaacagaagaatgaaggagaagaagatcaacagagacagactgcagtactacagcgccaaccccctgctgtag

SEQ ID NO: 157008 - protein, 280 aa, Artificial Sequence
  derived and/or modified sequence
MPADIMEKNSSSPVAATPASVNTTPDKPKTASEHRKSSKPIMEKRRRARINESLSQLKTLILDALKKDSSRHSKLEKADILEMTVKHLRNLQRAQMTAALSTDPSVLGKYRAGFSECMNEVTRFLSTCEGVNTEVRTRLLGHLANCMTQINAMTYPGQPHPALQAPPPPPPGPGGPQHAPFAPPPPLVPIPGGAAPPPGGAPCKLGSQAGEAAKVFGGFQVVPAPDGQFAFLIPNGAFAHSGPVIPVYTSNSGTSVGPNAVSPSSGPSLTADSMWRPWRN

SEQ ID NO: 157009 - DNA, 1471 bp, Artificial Sequence
  derived and/or modified sequence
atcacacaggatccggagctggtgctgataacagcggaatcccccgtctacctctctccttggtcctggaacagcgctactgatcaccaagtagccacaaaatataataaaccctcagcacttgctcagtagttttgtgaaagtctcaagtaaaagagacacaaacaaaaaattctttttcgtgaagaactccaaaaataaaattctctagagataaaaaaaaaaaaaaaaggaaaatgccagctgatataatggagaaaaattcctcgtccccggtggctgctaccccagccagtgtcaacacgacaccggataaaccaaagacagcatctgagcacagaaagtcatcaaagcctattatggagaaaagacgaagagcaagaataaatgaaagtctgagccagctgaaaacactgattttggatgctctgaagaaagatagctcgcggcattccaagctggagaaggcggacattctggaaatgacagtgaagcacctccggaacctgcagcgggcgcagatgacggctgcgctgagcacagacccaagtgtgctggggaagtaccgagccggcttcagcgagtgcatgaacgaggtgacccgcttcctgtccacgtgcgagggcgttaataccgaggtgcgcactcggctgctcggccacctggccaactgcatgacccagatcaatgccatgacctaccccgggcagccgcaccccgccttgcaggcgccgccaccgcccccaccgggacccggcggcccccagcacgcgccgttcgcgccgccgccgccactcgtgcccatccccgggggcgcggcgccccctcccggcggcgccccctgcaagctgggcagccaggctggagaggcggctaaggtgtttggaggcttccaggtggtaccggctcccgatggccagtttgctttcctcattcccaacggggccttcgcgcacagcggccctgtcatccccgtctacaccagcaacagcggcacctccgtgggccccaacgcagtgtcaccttccagcggcccctcgcttacggcggactccatgtggaggccgtggcggaactgagggggctcaggccacccctcctcctaaactccccaacccacctctcttccctccggactctaaacaggaacttgaatactgggagagaagaggacttttttgattaagtggttactttgtgtttttttaatttctaagaagttactttttgtagagagagctgtattaagtgactgaccatgcactatatttgtatatattttatatgttcatattggattgcgcctttgtattataaaagctcagatgacatttcgttttttacacgagatttcttttttatgtgatgccaaagatgtttgaaaatgctcttaaaatatcttcctttggggaagtttatttgagaaaatataataaaagaaaaaagtaaaggcaaaaaaaaaaaaaaaaaa

SEQ ID NO: 157010 - DNA, 843 bp, Artificial Sequence
  derived and/or modified sequence
atgcccgccgacatcatggagaagaacagcagcagccccgtggccgccacccccgccagcgtgaacaccacccccgacaagcccaagaccgccagcgagcacagaaagagcagcaagcccatcatggagaagagaagaagagccagaatcaacgagagcctgagccagctgaagaccctgatcctggacgccctgaagaaggacagcagcagacacagcaagctggagaaggccgacatcctggagatgaccgtgaagcacctgagaaacctgcagagagcccagatgaccgccgccctgagcaccgaccccagcgtgctgggcaagtacagagccggcttcagcgagtgcatgaacgaggtgaccagattcctgagcacctgcgagggcgtgaacaccgaggtgagaaccagactgctgggccacctggccaactgcatgacccagatcaacgccatgacctaccccggccagccccaccccgccctgcaggccccccccccccccccccccggccccggcggcccccagcacgcccccttcgccccccccccccccctggtgcccatccccggcggcgccgcccccccccccggcggcgccccctgcaagctgggcagccaggccggcgaggccgccaaggtgttcggcggcttccaggtggtgcccgcccccgacggccagttcgccttcctgatccccaacggcgccttcgcccacagcggccccgtgatccccgtgtacaccagcaacagcggcaccagcgtgggccccaacgccgtgagccccagcagcggccccagcctgaccgccgacagcatgtggagaccctggagaaactag

SEQ ID NO: 157011 - DNA, 843 bp, Artificial Sequence
  derived and/or modified sequence
atgcctgcagacattatggagaaaaacagctctagtcccgttgctgctactcctgcttcagtgaacacaaccccagacaagccaaagacggccagcgagcataggaagtcatccaaaccaatcatggagaagcggcgccgagctaggatcaatgaaagcctgtcccagctgaagacactgattcttgatgcgctcaaaaaagactctagtcgacactcaaaactggagaaggctgacatcctggaaatgacggtgaagcaccttcggaatctgcagcgcgcgcagatgactgccgcactgtctaccgaccctagtgtgctgggaaagtaccgggctggctttagcgagtgcatgaatgaggtgacgcgctttttgtccacatgcgagggtgtgaatactgaagtcaggaccaggttgcttggacaccttgccaattgtatgactcagattaatgccatgacctacccgggccagccccatcctgccctccaggctccaccaccccccccacctggccccggtgggccgcagcatgcaccctttgcgcctccccctcctctggtgccgatcccaggtggcgctgccccaccgccaggtggagctccctgtaagttaggatcccaggccggggaggccgctaaagtatttggggggtttcaggtagtgcctgcccctgacggccagttcgccttcctgatcccaaatggagcttttgcccacagcgggccggtgatccccgtgtatacctccaactccggaacttctgtcggccctaatgcagtctctcccagtagtggtccatcattaacagcggactctatgtggcgcccctggagaaactag

SEQ ID NO: 157012 - DNA, 843 bp, Artificial Sequence
  derived and/or modified sequence
atgcctgctgacatcatggagaagaacagcagcagccctgtggccgccaccccagcctctgtgaacaccaccccagacaagcccaagacagccagcgagcacaggaagagcagcaagcccatcatggagaagagaagaagagcccgcatcaatgaaagcctgagccagctgaagaccctcatcctggatgccctgaagaaggacagcagccgccacagcaagctggagaaggctgacatcctggagatgacagtgaagcacctgaggaacctgcagagggcccagatgacagctgccctgagcacagaccccagcgtgctgggcaagtaccgggccggcttcagcgagtgcatgaatgaggtgacccgcttcctgagcacctgtgagggcgtgaacacagaggtgaggacccggctgctgggccacctggccaactgcatgacccagatcaatgccatgacctacccaggccagccccacccagccctgcaggcccctcctcctcctcctcctggccctgggggcccccagcacgccccctttgcccctcctccacccctggtgcccatccctggaggagctgcccctcctcctgggggcgccccctgcaagctgggcagccaggccggggaggccgccaaggtgtttggaggcttccaggtggtgcctgccccagatggccagtttgccttcctgatccccaatggagcctttgcccacagcggccctgtgattcctgtgtacaccagcaacagcggcacctctgtgggccccaatgctgtgagccccagcagcggccccagcctgacagctgacagcatgtggaggccctggagaaattag

SEQ ID NO: 157013 - DNA, 843 bp, Artificial Sequence
  derived and/or modified sequence
atgcccgccgacatcatggagaagaacagcagcagccccgtggccgctacccccgctagtgtgaacacaacacccgacaagcccaaaactgcatccgagcatcgtaagtcctcaaagcccataatggagaagagacgacgggcacgtataaacgagtcactctcccagctgaagacacttattctggatgcattgaaaaaggattccagtaggcatagcaagcttgaaaaggcagatatcctagaaatgaccgttaagcacctgagaaaccttcaacgtgcacaaatgacagctgccctctctacagatcctagcgtcctgggcaagtatagggcagggttcagcgagtgtatgaatgaggtgactcgtttcctgtccacatgtgagggtgtgaacacagaagtgaggactcgcctgctcggccacctggccaattgcatgactcagataaatgcgatgacctatcctgggcagccacaccccgctctgcaggccccccctcctccccctccaggacccggcgggccccaacatgcaccatttgcccctccccctcccctcgtccccattcccgggggcgcagctccacccccaggcggtgcaccatgcaagttgggctctcaggccggagaggcggccaaagttttcggtggatttcaggtcgttcccgcgccagacggccaatttgcttttttgattccgaatggcgcctttgcacactctggacccgtgattcccgtgtacactagcaacagcggaactagtgtaggacctaatgcagtcagcccttccagcggtccttccctaacagcggattcaatgtggcgtccctggaggaactag

SEQ ID NO: 157014 - DNA, 843 bp, Artificial Sequence
  derived and/or modified sequence
atgccggctgacatcatggaaaagaactcatcgagtccagtcgccgctacaccagccagcgtaaacactactcccgataagccaaaaaccgcctctgaacacagaaaaagcagtaaacctatcatggagaaacgaaggcgcgcacgaattaatgaaagtctgagccaattgaaaacattaattttagatgcactgaaaaaggactcctcccgacatagcaaacttgagaaggccgatattctggagatgactgtgaagcatcttagaaatctccagcgagcccagatgaccgccgctctctctaccgatccctcagtgttagggaagtatcgggcaggcttctccgagtgtatgaacgaagtcacaaggttcctgagcacatgcgagggagtcaacactgaggtgagaacccgcctcctgggtcatctggcaaattgcatgacacaaatcaacgctatgacatatcctggtcagccgcaccccgcactgcaggctcccccaccgccacctcctggcccaggagggccacagcatgccccatttgctcccccacctcccctagtgcctattcccggaggagccgcaccgccaccagggggagcgccatgcaaactgggctctcaggcaggtgaagcagcaaaggtattcgggggatttcaagttgtaccggctcctgacggccagttcgccttcctgattcctaatggagcttttgcccattccgggccagttattcccgtctatacatcaaactctgggaccagtgttggtcccaacgcagtgagtccgagttcagggccatctcttacagccgacagcatgtggcgaccatggcggaattag

SEQ ID NO: 157015 - DNA, 1578 bp, Artificial Sequence
  derived and/or modified sequence
atcacacaggatccggagctggtgctgataacagcggaatcccccgtctacctctctccttggtcctggaacagcgctactgatcaccaagtagccacaaaatataataaaccctcagcacttgctcagtagttttgtgaaagtctcaagtaaaagagacacaaacaaaaaattctttttcgtgaagaactccaaaaataaaattctctagagataaaaaaaaaaaaaaaaggaaaatgccagctgatataatggagaaaaattcctcgtccccggtggctgctaccccagccagtgtcaacacgacaccggataaaccaaagacagcatctgagcacagaaagtcatcaaagcctattatggagaaaagacgaagagcaagaataaatgaaagtctgagccagctgaaaacactgattttggatgctctgaagaaagatagctcgcggcattccaagctggagaaggcggacattctggaaatgacagtgaagcacctccggaacctgcagcgggcgcagatgacggctgcgctgagcacagacccaagtgtgctggggaagtaccgagccggcttcagcgagtgcatgaacgaggtgacccgcttcctgtccacgtgcgagggcgttaataccgaggtgcgcactcggctgctcggccacctggccaactgcatgacccagatcaatgccatgacctaccccgggcagccgcaccccgccttgcaggcgccgccaccgcccccaccgggacccggcggcccccagcacgcgccgttcgcgccgccgccgccactcgtgcccatccccgggggcgcggcgccccctcccggcggcgccccctgcaagctgggcagccaggctggagaggcggctaaggtgtttggaggcttccaggtggtaccggctcccgatggccagtttgctttcctcattcccaacggggccttcgcgcacagcggccctgtcatccccgtctacaccagcaacagcggcacctccgtgggccccaacgcagtgtcaccttccagcggcccctcgcttacggcggactccatgtggaggccgtggcggaactgagggggctcaggccacccctcctcctaaactccccaacccacctctcttccctccggactctaaacaggaacttgaatactgggagagaagaggacttttttgattaagtggttactttgtgtttttttaatttctaagaagttactttttgtagagagagctgtattaagtgactgaccatgcactatatttgtatatattttatatgttcatattggattgcgcctttgtattataaaagctcagatgacatttcgttttttacacgagatttcttttttatgtgatgccaaagatgtttgaaaatgctcttaaaatatcttcctttggggaagtttatttgagaaaatataataaaagaaaaaagtaaaggcttttatgtcttcgaactgattcttccagaatatgtaaaaaggcttttggtggaatttgaattacatgtaattggtaattcaggaattgactcttttgttattaaaagaacatttgtaaaaatcca

SEQ ID NO: 157016 - protein, 529 aa, Artificial Sequence
  derived and/or modified sequence
MDLPVGPGAAGPSNVPAFLTKLWTLVSDPDTDALICWSPSGNSFHVFDQGQFAKEVLPKYFKHNNMASFVRQLNMYGFRKVVHIEQGGLVKPERDDTEFQHPCFLRGQEQLLENIKRKVTSVSTLKSEDIKIRQDSVTKLLTDVQLMKGKQECMDSKLLAMKHENEALWREVASLRQKHAQQQKVVNKLIQFLISLVQSNRILGVKRKIPLMLNDSGSAHSMPKYSRQFSLEHVHGSGPYSAPSPAYSSSSLYAPDAVASSGPIISDITELAPASPMASPGGSIDERPLSSSPLVRVKEEPPSPPQSPRVEEASPGRPSSVDTLLSPTALIDSILRESEPAPASVTALTDARGHTDTEGRPPSPPPTSTPEKCLSVACLDKNELSDHLDAMDSNLDNLQTMLSSHGFSVDTSALLDLFSPSVTVPDMSLPDLDSSLASIQELLSPQEPPRPPEAENSSPDSGKQLVHYTAQPLFLLDPGSVDTGSNDLPVLFELGEGSYFSEGDGFAEDPTISLLTGSEPPKAKDPTVS

SEQ ID NO: 157017 - DNA, 2166 bp, Artificial Sequence
  derived and/or modified sequence
gcggcgggagcgcgcccgttgcaagatggcggcggccatgctgggccccggggctgtgtgtgcgcagcgggcggcggcgcggcccggaaggctggcgcggcgacggcgttagcccggccctcggcccctctttgcggccgctccctccgcctattccctccttgctcgagatggatctgcccgtgggccccggcgcggcggggcccagcaacgtcccggccttcctgaccaagctgtggaccctcgtgagcgacccggacaccgacgcgctcatctgctggagcccgagcgggaacagcttccacgtgttcgaccagggccagtttgccaaggaggtgctgcccaagtacttcaagcacaacaacatggccagcttcgtgcggcagctcaacatgtatggcttccggaaagtggtccacatcgagcagggcggcctggtcaagccagagagagacgacacggagttccagcacccatgcttcctgcgtggccaggagcagctccttgagaacatcaagaggaaagtgaccagtgtgtccaccctgaagagtgaagacataaagatccgccaggacagcgtcaccaagctgctgacggacgtgcagctgatgaaggggaagcaggagtgcatggactccaagctcctggccatgaagcatgagaatgaggctctgtggcgggaggtggccagccttcggcagaagcatgcccagcaacagaaagtcgtcaacaagctcattcagttcctgatctcactggtgcagtcaaaccggatcctgggggtgaagagaaagatccccctgatgctgaacgacagtggctcagcacattccatgcccaagtatagccggcagttctccctggagcacgtccacggctcgggcccctactcggccccctccccagcctacagcagctccagcctctacgcccctgatgctgtggccagctctggacccatcatctccgacatcaccgagctggctcctgccagccccatggcctcccccggcgggagcatagacgagaggcccctatccagcagccccctggtgcgtgtcaaggaggagccccccagcccgcctcagagcccccgggtagaggaggcgagtcccgggcgcccatcttccgtggacaccctcttgtccccgaccgccctcattgactccatcctgcgggagagtgaacctgcccccgcctccgtcacagccctcacggacgccaggggccacacggacaccgagggccggcctccctcccccccgcccacctccacccctgaaaagtgcctcagcgtagcctgcctggacaagaatgagctcagtgaccacttggatgctatggactccaacctggataacctgcagaccatgctgagcagccacggcttcagcgtggacaccagtgccctgctggacctgttcagcccctcggtgaccgtgcccgacatgagcctgcctgaccttgacagcagcctggccagtatccaagagctcctgtctccccaggagccccccaggcctcccgaggcagagaacagcagcccggattcagggaagcagctggtgcactacacagcgcagccgctgttcctgctggaccccggctccgtggacaccgggagcaacgacctgccggtgctgtttgagctgggagagggctcctacttctccgaaggggacggcttcgccgaggaccccaccatctccctgctgacaggctcggagcctcccaaagccaaggaccccactgtctcctagaggccccggaggagctgggccagccgcccacccccacccccagtgcagggctggtcttggggaggcagggcagcctcgcggtcttgggcactggtgggtcggccgccatagccccagtaggacaaacgggctcgggtctgggcagcacctctggtcaggagggtcaccctggcctgccagtctgccttcccccaaccccgtgtcctgtggtttggttggggcttcacagccacacctggactgaccctgcaggttgttcatagtcagaattgtattttggatttttacacaactgtcccgttccccgctccacagagatacacagatatatacacacagtggatggacggacaagacaggcagagatctataaacagacaggctctatgctaaaaaaaaaaaaaaa

SEQ ID NO: 157018 - DNA, 1590 bp, Artificial Sequence
  derived and/or modified sequence
atggacctccctgtggggcccggagccgccgggccatcgaacgtccccgccttcctgacaaagctgtggactctcgtgagcgatcctgatacagatgcactgatctgctggtcaccctccggaaatagcttccatgttttcgatcagggacagttcgctaaagaggtcctccccaagtactttaaacataacaatatggcctcctttgttaggcaactaaatatgtatggtttccgcaaggtcgtccacatagagcagggaggtctggtgaaaccagagcgggatgatacagagtttcagcacccatgtttccttagggggcaggaacaattgctggaaaacattaagagaaaagtcacaagcgtgtctacacttaagtctgaagacattaagatccggcaggactcagtaactaaactccttaccgatgtgcagctgatgaaaggaaagcaggaatgcatggactccaagctgcttgctatgaagcatgagaacgaggccctctggcgggaggtggccagcctaaggcagaaacacgcacagcagcagaaggtcgtcaataagctgatccagtttctcatctctctggtacagagcaatagaatcctgggcgttaagagaaagatcccactgatgttaaacgacagcgggtcagcacactctatgccgaaatacagccggcagttttcgctcgagcacgtgcatggctctggcccatacagcgctccttctcctgcttatagctcttccagtctgtatgccccggacgccgtggcttcttctggccccatcatcagtgatataactgagctggctccagcctcaccaatggcaagcccaggtggcagtattgacgaacggccactgagcagcagtccactggttagagtaaaggaggagccccctagtccacctcagagtcccagggtcgaggaggcgtccccaggaagaccctcctccgtggacaccctgctttcaccaacagctctcatcgatagcatcttacgggaaagcgagccagcacctgcttccgtgacagccctgacagacgcacgtggacatacggacacagaagggaggccccctagtccaccaccaacgtccacccctgagaaatgcctgtcggtcgcttgtttagataagaatgagttgagcgaccacctcgatgccatggactccaatttagataacttacagacaatgctttcttcccatggcttttccgtcgatacctcggccttgctggatcttttctccccgagcgttacagtacccgatatgtctctgcctgacctagacagtagtttggcctcaatccaagagttgctgtccccacaggagcctccacgccctccagaggcagagaacagttccccggattcaggcaagcagctcgtgcactatacggcgcaaccactgtttcttctggatccaggtagtgtggacacggggtccaacgatctgcccgtattatttgaacttggggagggttcatacttttcggaaggtgacggctttgctgaagacccaaccatctccctgctgacaggttccgaacccccgaaagctaaggaccccactgtgtcctag

SEQ ID NO: 157019 - DNA, 2142 bp, Artificial Sequence
  derived and/or modified sequence
cgcgcccgttgcaagatggcggcggccatgctgggccccggggctgtgtgtgcgcagcgggcggcggcgcggcccggaaggctggcgcggcgacggcgttagcccggccctcggcccctctttgcggccgctccctccgcctattccctccttgctcgagatggatctgcccgtgggccccggcgcggcggggcccagcaacgtcccggccttcctgaccaagctgtggaccctcgtgagcgacccggacaccgacgcgctcatctgctggagcccgagcgggaacagcttccacgtgttcgaccagggccagtttgccaaggaggtgctgcccaagtacttcaagcacaacaacatggccagcttcgtgcggcagctcaacatgtatggcttccggaaagtggtccacatcgagcagggcggcctggtcaagccagagagagacgacacggagttccagcacccatgcttcctgcgtggccaggagcagctccttgagaacatcaagaggaaagtgaccagtgtgtccaccctgaagagtgaagacataaagatccgccaggacagcgtcaccaagctgctgacggacgtgcagctgatgaaggggaagcaggagtgcatggactccaagctcctggccatgaagcatgagaatgaggctctgtggcgggaggtggccagccttcggcagaagcatgcccagcaacagaaagtcgtcaacaagctcattcagttcctgatctcactggtgcagtcaaaccggatcctgggggtgaagagaaagatccccctgatgctgaacgacagtggctcagcacattccatgcccaagtatagccggcagttctccctggagcacgtccacggctcgggcccctactcggccccctccccagcctacagcagctccagcctctacgcccctgatgctgtggccagctctggacccatcatctccgacatcaccgagctggctcctgccagccccatggcctcccccggcgggagcatagacgagaggcccctatccagcagccccctggtgcgtgtcaaggaggagccccccagcccgcctcagagcccccgggtagaggaggcgagtcccgggcgcccatcttccgtggacaccctcttgtccccgaccgccctcattgactccatcctgcgggagagtgaacctgcccccgcctccgtcacagccctcacggacgccaggggccacacggacaccgagggccggcctccctcccccccgcccacctccacccctgaaaagtgcctcagcgtagcctgcctggacaagaatgagctcagtgaccacttggatgctatggactccaacctggataacctgcagaccatgctgagcagccacggcttcagcgtggacaccagtgccctgctggacctgttcagcccctcggtgaccgtgcccgacatgagcctgcctgaccttgacagcagcctggccagtatccaagagctcctgtctccccaggagccccccaggcctcccgaggcagagaacagcagcccggattcagggaagcagctggtgcactacacagcgcagccgctgttcctgctggaccccggctccgtggacaccgggagcaacgacctgccggtgctgtttgagctgggagagggctcctacttctccgaaggggacggcttcgccgaggaccccaccatctccctgctgacaggctcggagcctcccaaagccaaggaccccactgtctcctagaggccccggaggagctgggccagccgcccacccccacccccagtgcagggctggtcttggggaggcagggcagcctcgcggtcttgggcactggtgggtcggccgccatagccccagtaggacaaacgggctcgggtctgggcagcacctctggtcaggagggtcaccctggcctgccagtctgccttcccccaaccccgtgtcctgtggtttggttggggcttcacagccacacctggactgaccctgcaggttgttcatagtcagaattgtattttggatttttacacaactgtcccgttccccgctccacagagatacacagatatatacacacagtggatggacggacaagacaggcagagatctataaacagacaggctctatgcta

SEQ ID NO: 157020 - DNA, 1590 bp, Artificial Sequence
  derived and/or modified sequence
atggacctgcctgtgggccctggagctgctggccccagcaatgtgcctgccttcctgaccaagctgtggaccctggtgtctgaccctgacacagatgccctgatctgctggagccccagcggcaacagcttccacgtgtttgaccagggccagtttgccaaggaggtgctgcccaagtacttcaagcacaacaacatggccagctttgtgcggcagctgaacatgtatggcttcaggaaggtggtgcacatcgagcagggcggcctggtgaagccagagagagatgacacagagttccagcacccctgcttcctgcggggccaggagcagctgctggagaacatcaagaggaaggtgacctctgtgtccaccctgaagtctgaggacatcaagatccggcaggacagcgtgaccaagctgctgacagatgtgcagctgatgaagggcaagcaggagtgcatggacagcaagctgctggccatgaagcatgaaaatgaggccctgtggagggaggtggccagcctgcggcagaagcacgcccagcagcagaaggtggtgaacaagctgatccagttcctgatcagcctggtgcagagcaaccgcatcctgggcgtgaagaggaagatccccctgatgctgaatgacagcggcagcgcccacagcatgcccaagtacagccggcagttcagcctggagcacgtgcacggcagcggcccctacagcgcccccagccctgcctacagcagcagcagcctgtatgccccagatgctgtggccagcagcggccccatcatcagtgacatcacagagctggccccagccagccccatggccagccctgggggcagcattgatgagcggcccctgagcagcagccccctggtgcgggtgaaggaggagccccccagccccccccagagcccccgggtggaggaggccagccctggccggcccagctctgtggacaccctgctgagccccacagccctgattgacagcatcctgcgggagagcgagcccgccccagcctctgtgacagccctgacagatgcccggggccacacagacacagagggccggccccccagccccccacccaccagcaccccagagaagtgcctgtctgtggcctgcctggacaagaatgagctgagtgaccacctggatgccatggacagcaacctggacaacctgcagaccatgctgagcagccacggcttctctgtggacaccagcgccctgctggacctcttcagccccagcgtgacagtgcctgacatgagcctgcctgacctggacagcagcctggccagcatccaggagctgctgagcccccaggagccccccaggcctcctgaggccgagaacagcagcccagattctgggaagcagctggtgcactacacagcccagcccctcttcctgctggaccccggctctgtggacaccggcagcaatgacctgcctgtgctgtttgagctgggggagggcagctacttctctgaaggagatggctttgctgaggaccccaccatcagcctgctgaccggcagcgagccccccaaggccaaggaccccaccgtgtcctag

SEQ ID NO: 157021 - DNA, 1590 bp, Artificial Sequence
  derived and/or modified sequence
atggacctgcccgtgggccccggcgccgccggccccagcaacgtgcctgcatttctgactaagctgtggactctggtctcagaccccgacaccgatgccctaatctgttggagcccatcaggcaatagttttcacgtgttcgatcaggggcagtttgcaaaagaggtcttgcccaagtatttcaagcataataacatggctagcttcgttcgccagctgaatatgtacggctttcggaaggtggtgcatatcgagcagggtggactggtcaaaccagaacgggacgacacagaatttcagcatccctgttttcttcgggggcaggagcagctgctcgaaaatatcaaaagaaaggtgacttcggtgtccaccctcaaatcagaagacattaaaatccggcaggactccgtgactaagctcctaaccgatgtgcagttaatgaagggcaaacaggaatgtatggattcaaagcttctagccatgaagcacgaaaatgaagcattatggcgtgaagtcgcatcgctgagacagaaacacgcccagcagcagaaagtcgttaacaaactgattcagttcctcatctccctagtacagtccaatcggatcctaggcgtgaagcgaaagattccactcatgttaaacgactccggcagtgcccatagtatgcctaaatattcgcgtcagttcagcctcgagcacgtacacggctcggggccgtattcagccccttccccagcatattcgagttccagcttgtacgctcccgatgccgtggcttccagcggaccaattatctccgacatcaccgagctcgcccccgctagtccgatggccagcccaggtggttccattgacgagagacccttatcttcttctccgctagttagagtaaaagaagaacctccttccccaccgcagagtcccagggtggaggaggcatcccccggcagaccatcgtcagtcgatactctcctatcccctacagccttaatcgactctatcttacgtgagagtgagccagctccggccagcgttacggcactgacagacgctcgcggtcatacagacacggaggggcggcctccgagcccaccgcctacttctactccggaaaagtgtttatccgtagcctgtcttgataagaacgaactgtctgaccacctggacgctatggatagcaatctcgacaacctccagaccatgttgagtagccacggattttctgtggatacatccgcactgctcgacttatttagcccttctgtgaccgtgccagatatgagcctgcctgacttggatagcagccttgcatctatacaagagctgctctcaccacaggagcccccacgcccgccagaagccgagaactcctctcctgattcggggaagcagctggtccattacacagcgcagccccttttcctgctggatccaggctccgttgacactgggagcaacgacctgccagtgttgtttgaattgggggaagggtcttacttctcagagggcgacggttttgcggaggatcccaccatctctcttttaaccggttccgagcctccgaaagcaaaagatcccaccgtaagctag

SEQ ID NO: 157022 - DNA, 1590 bp, Artificial Sequence
  derived and/or modified sequence
atggacttgccggtgggacccggagcagctgggccaagcaacgtaccagctttcctgacaaagctatggaccttggtttctgaccccgacactgatgcactgatctgttggagccctagcggcaatagttttcatgttttcgatcagggccaattcgccaaagaggtcctgcccaaatacttcaagcataataatatggcctccttcgtgaggcagctcaatatgtacggatttcgcaaggtggtccacatcgagcaaggtggactcgtcaagccggagcgagacgacacagagtttcagcacccatgcttcctcagaggacaagagcagctgctggagaacataaagcgcaaggtaacctccgtgagcaccttgaagtccgaggacataaaaatccggcaggattctgtcaccaaactactcactgacgtgcagttaatgaaagggaaacaggagtgcatggattctaagttattagccatgaagcacgaaaacgaggccctgtggagagaagttgcatcgctccgacagaagcatgcccaacagcagaaagtcgtaaacaaacttattcaattcctgatttccctagtgcaatccaatagaatcctgggtgtgaagcgcaaaatccctctgatgctaaatgactcaggaagcgcacacagtatgcccaagtactcgcgtcagttttccctggaacatgttcatggttccggcccatattccgccccatcgccagcttacagctcttcttctctttacgcacccgatgcggtggccagcagcggcccaattatctctgatatcacggagctagcccctgcctcgcccatggccagcccgggaggtagcatcgacgaacggccactatcctcctctccattggtacgggtaaaagaggaaccacctagccctccccaaagccctagggtggaggaggcaagtcccggacggccatcttcagtcgatactttgctctcccctactgccttgattgactccatcctccgagagtcagagcccgctcccgcttcagtgacggcccttaccgatgccagaggacacaccgacactgagggcaggcccccatctccgccaccaacctcaacccccgaaaaatgcctttccgtggcctgtctggacaagaacgaactcagcgaccatttggacgctatggactccaacctagacaacttgcagactatgctctcttcgcatggcttcagcgtggacacgtccgcccttctggacttattttcacccagtgtgacagtccccgatatgtctctgcctgatctcgatagtagcttggcttccatccaggagctgctgagccctcaagagcccccacggccacctgaggccgagaatagcagtcctgatagtggtaaacagctagttcattacacagctcagcccctattcctgctcgaccctggcagcgtggatacgggtagcaatgacctccctgtcctattcgaattaggtgagggtagttatttctccgaaggtgatggatttgctgaggacccaaccattagcctccttaccgggtccgagcccccaaaggccaaggacccaaccgtatcctag

SEQ ID NO: 157023 - DNA, 1590 bp, Artificial Sequence
  derived and/or modified sequence
atggacctgcccgtgggccccggcgccgccggccccagcaacgtgcccgccttcctgaccaagctgtggaccctggtgagcgaccccgacaccgacgccctgatctgctggagccccagcggcaacagcttccacgtgttcgaccagggccagttcgccaaggaggtgctgcccaagtacttcaagcacaacaacatggccagcttcgtgagacagctgaacatgtacggcttcagaaaggtggtgcacatcgagcagggcggcctggtgaagcccgagagagacgacaccgagttccagcacccctgcttcctgagaggccaggagcagctgctggagaacatcaagagaaaggtgaccagcgtgagcaccctgaagagcgaggacatcaagatcagacaggacagcgtgaccaagctgctgaccgacgtgcagctgatgaagggcaagcaggagtgcatggacagcaagctgctggccatgaagcacgagaacgaggccctgtggagagaggtggccagcctgagacagaagcacgcccagcagcagaaggtggtgaacaagctgatccagttcctgatcagcctggtgcagagcaacagaatcctgggcgtgaagagaaagatccccctgatgctgaacgacagcggcagcgcccacagcatgcccaagtacagcagacagttcagcctggagcacgtgcacggcagcggcccctacagcgcccccagccccgcctacagcagcagcagcctgtacgcccccgacgccgtggccagcagcggccccatcatcagcgacatcaccgagctggcccccgccagccccatggccagccccggcggcagcatcgacgagagacccctgagcagcagccccctggtgagagtgaaggaggagccccccagccccccccagagccccagagtggaggaggccagccccggcagacccagcagcgtggacaccctgctgagccccaccgccctgatcgacagcatcctgagagagagcgagcccgcccccgccagcgtgaccgccctgaccgacgccagaggccacaccgacaccgagggcagaccccccagccccccccccaccagcacccccgagaagtgcctgagcgtggcctgcctggacaagaacgagctgagcgaccacctggacgccatggacagcaacctggacaacctgcagaccatgctgagcagccacggcttcagcgtggacaccagcgccctgctggacctgttcagccccagcgtgaccgtgcccgacatgagcctgcccgacctggacagcagcctggccagcatccaggagctgctgagcccccaggagccccccagaccccccgaggccgagaacagcagccccgacagcggcaagcagctggtgcactacaccgcccagcccctgttcctgctggaccccggcagcgtggacaccggcagcaacgacctgcccgtgctgttcgagctgggcgagggcagctacttcagcgagggcgacggcttcgccgaggaccccaccatcagcctgctgaccggcagcgagccccccaaggccaaggaccccaccgtgagctag

SEQ ID NO: 157024 - protein, 586 aa, Artificial Sequence
  derived and/or modified sequence
MATAKGIAIGIDLGTTYSCVGVFQHGKVEIIANDQGNRTTPSYVAFTDTERLIGDAAKNQVAMNPQNTVFDAKRLIGRKFNDPVVQADMKLWPFQVINDSQRQATKDAGVIAGLNVLRIINEPTAAAIAYGLDKGGQGERHVLIFDLGGGTFDVSILTIDDGIFEVKATAGDTHLGGEDFDNRLVSHFVEEFKRKHKKDISQNKRAVRRLRTACERAKRTLSSSTQANLEIDSLYEGIDFYTSITRARFEELCADLFRGTLEPVEKALRDAKMDKAKIHDIVLVGGSTRIPKVQRLLQDYFNGRDLNKSINPDEAVAYGAAVQAAILMGDKSEKVQDLLLLDVAPLSLGLETAGGVMTALIKRNSTIPTKQTQIFTTYSDNQPGVLIQVYEGERAMTKDNNLLGRFDLTGIPPAPRGVPQIEVTFDIDANGILNVTATDKSTGKVNKITITNDKGRLSKEEIERMVLDAEKYKAEDEVQREKIAAKNALESYAFNMKSVVSDEGLKGKISESDKNKILDKCNELLSWLEVNQLAEKDEFDHKRKELEQMCNPIITKLYQGGCTGPACGTGYVPGRPATGPTIEEVD

SEQ ID NO: 157025 - protein, 641 aa, Artificial Sequence
  derived and/or modified sequence
MATAKGIAIGIDLGTTYSCVGVFQHGKVEIIANDQGNRTTPSYVAFTDTERLIGDAAKNQVAMNPQNTVFDAKRLIGRKFNDPVVQADMKLWPFQVINEGGKPKVLVSYKGENKAFYPEEISSMVLTKLKETAEAFLGHPVTNAVITVPAYFNDSQRQATKDAGVIAGLNVLRIINEPTAAAIAYGLDKGGQGERHVLIFDLGGGTFDVSILTIDDGIFEVKATAGDTHLGGEDFDNRLVSHFVEEFKRKHKKDISQNKRAVRRLRTACERAKRTLSSSTQANLEIDSLYEGIDFYTSITRARFEELCADLFRGTLEPVEKALRDAKMDKAKIHDIVLVGGSTRIPKVQRLLQDYFNGRDLNKSINPDEAVAYGAAVQAAILMGDKSEKVQDLLLLDVAPLSLGLETAGGVMTALIKRNSTIPTKQTQIFTTYSDNQPGVLIQVYEGERAMTKDNNLLGRFDLTGIPPAPRGVPQIEVTFDIDANGILNVTATDKSTGKVNKITITNDKGRLSKEEIERMVLDAEKYKAEDEVQREKIAAKNALESYAFNMKSVVSDEGLKGKISESDKNKILDKCNELLSWLEVNQLAEKDEFDHKRKELEQMCNPIITKLYQGGCTGPACGTGYVPGRPATGPTIEEVD

SEQ ID NO: 157026 - protein, 532 aa, Artificial Sequence
  derived and/or modified sequence
MATAKGIAIGIDLGTTYSCVGVFQHGKVEIIANDQGNRTTPSYVAFTDTERLIGDAAKNQVAMNPQNTVFDAKRLIGRKFNDPVVQADMKLWPFQVINEGGKPKVLVSYKGENKAFYPEEISSMVLTKLKETAEAFLGHPVTNAVITVPAYFNDSQRQATKDAGVIAGLNVLRIINEPTAAAIAYGLDKGGQGERHVLIFDLGGGTFDVSILTIDDGIFEVKATAGDTHLGGEDFDNRLVSHFVEEFKRKHKKDISQNKRAVRRLRTACERAKRTLSSSTQANLEIDSLYEGIDFYTSITRARFEELCADLFRGTLEPVEKALRDAKMDKAKIHDIVLVGGSTRIPKVQRLLQDYFNGRDLNKSINPDEAVAYGAAVQAAILMGDKSEKVQDLLLLDVAPLSLGLETAGGVMTALIKRNSTIPTKQTQIFTTYSDNQPGVLIQVYEGERAMTKDNNLLGRFDLTGIPPAPRGVPQIEVTFDIDANGILNVTATDKSTGKVNKITITNDKGRLSKEEIERMVLDAEKYKAEDV

SEQ ID NO: 157027 - DNA, 699 bp, Artificial Sequence
  derived and/or modified sequence
gccaagggcatcgccatcggcatcgacctgggcaccacctacagctgcgtgggcgtgttccagcacggcaaggtggagatcatcgccaacgaccagggcaacagaaccacccccagctacgtggccttcaccgacaccgagagactgatcggcgacgccggcgtgatcgccggcctgaacgtgctgagaatcatcaacgagcccaccgccgccgccatcgcctacggcctggacaagggcggccagggcgagagacacgtgctgatcttcgacctgggcggcggcaccttcgacgtgagcatcctgaccatcgacgacggcatcttcgaggtgaaggccaccgccggcgacacccacctgggcggcgaggacttcgacaacagactggtgagccacttcgtggaggagttcaagagaaagcacaagaaggacatcagccagaacaagagagccgtgagaagactgagaaccgcctgcgagagagccaagagaaccctgagcagcagcacccaggccaacctggagatcgacagcctgtacgagggcatcgacttctacaccagcatcaccagagccagattcgaggagctgtgcgccgacctgttcagaggcaccctggagcccgtggagaagggcgccccccccgccagccccagatgcagcggctgcttcagaaccaccagcatggacgtgatctag

SEQ ID NO: 157028 - DNA, 699 bp, Artificial Sequence
  derived and/or modified sequence
gctaaggggattgcaatcggcattgacctggggacgacatacagctgtgttggggtgttccagcatggaaaagttgaaattattgccaacgaccaagggaatagaactactccatcctacgtcgctttcactgacacagagaggctgattggcgacgccggggtgatcgctggattgaacgtcctgaggatcatcaatgagcccactgccgctgcaatcgcatacggactggacaagggaggccaaggcgaaagacacgtgctaatattcgacctgggaggcggcacatttgacgtctcaatcctcacgattgacgacggtattttcgaagttaaggctacagcaggggatactcaccttggcggcgaggacttcgataaccgtctggtcagtcatttcgtggaggaatttaaaagaaagcataagaaggacatcagccagaataaaagagccgttcggcggctacgcaccgcgtgcgagcgcgccaagcggactttaagcagctctacccaggccaatttggaaatagactcactgtatgaagggatcgacttttacacatccattacgcgggcccggttcgaggaactctgcgctgacctgtttcgcggaacattggagccggtggagaaaggggcacctcctgctagcccccggtgctccggctgcttccgcactacctcaatggatgttatctag

SEQ ID NO: 157029 - DNA, 696 bp, Artificial Sequence
  derived and/or modified sequence
gccaagggaatcgccataggcatcgacctgggcaccacctactcctgtgtgggggtgttccagcacggcaaggtggagatcatcgccaacgaccagggcaaccgcaccacccccagctacgtggccttcacagacaccgagcggctcattggggatgcaggtgtgattgctggacttaatgtgctaagaatcatcaatgagcccacggctgctgccattgcctatggtttagataaaggaggtcaaggagaacgacatgtcctgatttttgatctgggtggaggcacatttgatgtgtcaattctgaccatagatgatgggatttttgaggtaaaggccactgctggggacactcacctgggtggggaggactttgacaacaggcttgtgagccacttcgtggaggagttcaagaggaaacacaaaaaggacatcagccagaacaagcgagccgtgaggcggctgcgcaccgcctgcgagagggccaagaggaccctgtcgtccagcacccaggccaacctagaaattgattcactttatgaaggcattgacttctatacatccatcaccagagctcgatttgaagagttgtgtgcagacctgtttaggggtaccctggagcctgtagaaaaaggggctccacccgcatccccaaggtgcagcggctgcttcaggactacttcaatggacgtgatc

SEQ ID NO: 157030 - DNA, 699 bp, Artificial Sequence
  derived and/or modified sequence
gccaagggcatcgccatcggcatcgacctgggcaccacctacagctgtgtgggcgtcttccagcacggcaaggtggagatcatcgccaatgaccagggcaacagaaccacccccagctatgtggccttcacagacacagagcggctgattggagatgctggggtgattgctggcctgaatgtgctgcgcatcatcaatgagcccacagctgctgccatcgcctacggcctggacaagggcggccagggcgagcggcacgtgctgatctttgacctgggcggcggcacctttgatgtgtccatcctgaccattgatgatggcatctttgaggtgaaggccacagctggggacacccacctgggcggagaagattttgacaaccggctggtgagccactttgtggaggagttcaagaggaagcacaagaaggacatcagccagaacaagagagctgtgcggcggctgaggacagcctgtgagcgggccaagaggaccctgagcagcagcacccaggccaacctggagattgacagcctgtatgagggcatcgacttctacaccagcatcacccgggccaggtttgaggagctgtgtgccgacctcttccggggcaccctggagcctgtggagaagggggcccccccagccagcccccgctgcagcggctgcttccgcaccacctccatggatgtgatctag

SEQ ID NO: 157031 - DNA, 699 bp, Artificial Sequence
  derived and/or modified sequence
gccaagggcatcgccatcggcatcgacctgggcaccacctacagctgtgtgggggtgtttcaacatgggaaggtggaaataattgccaatgaccaaggaaataggactacgccatcctatgtggctttcaccgataccgagcgcctcatcggagatgccggtgtaatcgccgggttgaacgtcctgagaatcataaatgaacccactgccgccgcaatagcttacgggctggacaagggcggacagggcgagaggcacgttctgatctttgatcttgggggagggacctttgacgtttccattctgaccatagatgatggtatcttcgaagtcaaggccacagctggtgacactcaccttggcggcgaagatttcgacaatcgcctggtatcgcatttcgtggaagaatttaaaaggaagcataagaaggacatcagtcagaacaagcgagcagtgcggaggctgcgtaccgcatgcgagcgtgcgaagaggacgttgagctccagcacccaagccaacttagaaattgacagtctgtacgaggggatcgatttctacacctcaataacgcgcgccaggttcgaggaactctgtgctgatctctttcgcggcaccctggagccagtggaaaagggggctcctcccgcctcaccgcgctgtagcggatgtttcaggaccacttcaatggatgtcatttag

SEQ ID NO: 157032 - DNA, 699 bp, Artificial Sequence
  derived and/or modified sequence
gccaaaggcattgctattggcatcgacttgggaacgacttactcctgcgtaggcgtcttccagcatggaaaggtagaaatcattgctaacgaccagggtaatagaacaacccccagttatgtagccttcacagacaccgagagactcattggtgatgccggagtcatcgccggtctgaacgtgctccgcattattaatgagcctaccgccgcagccatcgcctacggattggacaaagggggtcagggcgagcggcacgttctgatattcgatcttgggggaggaacttttgacgtgtcgattctcactattgacgacgggatcttcgaggtgaaggcaaccgctggcgacacccatctcggtggtgaggacttcgacaatcgcttggtttctcacttcgtcgaagaatttaagagaaagcacaaaaaagatatatcccaaaataagcgcgctgtccgcaggctgcggaccgcctgtgaacgggctaaacggaccttgagtagtagcactcaggcgaatctagagattgattccctctacgagggcatcgacttttacacctccattacgagagctaggttcgaggagctgtgcgccgacctgttccgtggaaccctggaacccgttgaaaagggagctcccccagcatcccctcgctgctcaggatgcttcaggacaaccagcatggatgtcatctag

SEQ ID NO: 157033 - DNA, 1761 bp, Artificial Sequence
  derived and/or modified sequence
atggcaacagccaagggtatcgcaatcggtatagacctgggcactacatactcctgcgtgggcgtttttcagcacggtaaggttgagatcatagccaacgaccagggcaatcgcactaccccaagttatgtggccttcacggatactgaaagactgattggagacgcggcaaagaaccaggtagctatgaatcctcaaaacaccgtgtttgatgcaaagcgtcttattggaagaaaatttaatgatccagtggtgcaggcagacatgaagctttggccctttcaagtgatcaatgactcccagcggcaggcaaccaaggacgccggcgtcattgccgggctgaatgtgctccggattatcaacgaaccaactgccgccgcaattgcttatgggttagacaagggagggcagggagagcggcacgttttgatttttgacctaggcggcggcacttttgatgttagcatccttaccatcgatgacggaatttttgaggttaaggcaactgcgggggatacacacctcgggggggaagatttcgataataggctcgtatcccactttgtcgaggagtttaagaggaaacacaaaaaggacatctcccagaataagagggcggtgcgaaggctgagaactgcctgcgagcgggcaaaacgaaccctgtcatcctccacccaagccaacctggagatcgacagcctgtacgaaggaatcgatttctacacctcgattaccagggctcggttcgaagaactttgtgccgacctatttagaggcaccctggagcctgttgagaaggctctgcgggatgctaaaatggacaaagcaaagattcacgatattgtactcgtgggaggcagcactaggatacctaaggtgcagaggttactgcaggactatttcaacgggagggatctgaacaaatccattaatccggatgaagccgtagcctatggagcagctgtgcaggccgccatactcatgggagataaaagtgagaaagtgcaggatctgcttctcttggatgtcgcacccttatcactgggcctggaaaccgctggcggagtgatgactgcccttatcaagcgtaattctaccatccctacgaagcagacccagatctttaccacgtactctgataaccaaccaggggtgctgatacaggtgtatgaaggggaacgcgctatgacaaaggacaataatctgttgggaaggttcgaccttaccggcatacctccagcccctagaggggtgcctcagatcgaagtgacttttgacatcgatgcaaatggcattcttaacgtgacagcgacagataaaagtactggcaaagttaacaaaatcactattaccaatgataagggacggttgtccaaggaggagatagagagaatggttctcgatgccgaaaaatacaaggcagaggacgaggtgcagcgcgagaagatcgcagcaaaaaacgccttagagtcctacgcgttcaatatgaaaagcgtggtgtcagacgaggggcttaaaggcaaaattagcgaatcagacaagaacaaaattttggataaatgtaatgagctcctgagctggctagaggtcaaccagctggcagaaaaagatgagttcgaccacaaaaggaaagagctggaacagatgtgcaaccctatcattactaaactgtatcagggggggtgtactggacccgcttgtggaacaggttacgtccccggacgccctgcaacgggaccgacgatcgaagaagtggactag

SEQ ID NO: 157034 - DNA, 1926 bp, Artificial Sequence
  derived and/or modified sequence
atggcaacagctaagggcattgcgattggcatagatctgggtactacctacagctgcgttggggttttccagcatggaaaagtcgaaatcatcgccaatgaccagggtaatcgcaccaccccgtcttacgtggctttcaccgatacagaacgattaataggggacgctgctaagaaccaggtagccatgaacccccagaataccgtgtttgacgccaaacggctgattggcaggaagtttaacgacccagtggtccaagccgacatgaagttgtggcccttccaggtgatcaatgagggaggcaagccaaaagttctggtatcatacaagggtgaaaataaggctttctacccagaggaaatctcttctatggtcctcacgaaactgaaggagacagcagaagcgttcttggggcaccccgtgactaatgccgtcataacagtcccggcctactttaatgattcacagcgccaggccaccaaagacgctggggtgatcgctggcctgaacgtcctgcgtatcattaacgagcctacagccgccgccatcgcttacggcttagataaaggcggccagggagagagacatgtgcttatctttgatctcggcggcggaacctttgacgttagcatccttacaatagatgacggaatctttgaagtgaaggccactgcgggtgacactcacctggggggggaagacttcgataaccgcctggtgagtcacttcgtagaagaattcaagaggaagcacaagaaagatatttcccagaataagcgggcagtgcggaggctgcgcacggcttgtgaaagggctaagcgtacactgtcatctagcacccaagccaaccttgaaattgatagcctgtatgagggcattgacttctacaccagcataacccgggctcgtttcgaggagctctgtgccgaccttttcagaggtaccctggaacctgtcgagaaggccctacgcgacgcgaaaatggacaaagctaaaatccatgatattgtgctggtgggggggtccacaaggatcccaaaagtgcagagattactgcaggattacttcaatggccgcgatctgaataagtccattaatcctgacgaggcggtcgcatacggcgccgccgttcaggcggcaatcttgatgggtgacaagagcgagaaagtgcaggaccttctgctgctcgatgtagctcctctctccctgggacttgaaacagctggcggagtgatgactgctttgatcaagagaaattccactatccccaccaagcagacacagatttttacgacctactccgacaaccagcctggagtgctgattcaggtgtacgagggggaaagagctatgaccaaggataacaacttactgggaagatttgatctgacaggaatcccacctgcccccaggggcgttcctcagatcgaagtgacatttgacatcgatgcgaacggaattctcaacgtgaccgctactgacaagtccacggggaaagtaaacaaaatcaccatcaccaacgataaagggaggctaagtaaggaggagattgaacggatggtgctggacgccgagaagtacaaagcggaggacgaggtgcagcgagagaaaattgccgctaaaaatgcactggaatcctacgccttcaatatgaagtctgtcgtcagcgatgagggactcaaggggaagatttctgagagcgataaaaataagatcttggataagtgtaacgaactgctctcttggctggaggtgaaccaacttgcggaaaaggatgagtttgaccacaaacgtaaagagctagaacaaatgtgtaatcccattatcaccaaactttatcagggaggctgcactggaccagcttgtggtaccgggtacgtgcctggtcggcctgccactggaccaacaattgaggaggtcgactag

SEQ ID NO: 157035 - DNA, 1926 bp, Artificial Sequence
  derived and/or modified sequence
atggctacagctaaaggaatcgctattggaatcgatctggggacaacctatagctgcgtcggcgtgttccagcatggaaaggtggagatcatcgccaacgatcaggggaacaggactacaccctcatatgtggctttcactgatacagaacggctaatcggggacgccgctaagaatcaagtggcaatgaatccacagaacacggtctttgacgctaagcgtctgatcggcagaaaattcaacgatccagtagtccaggccgacatgaagttgtggcctttccaggttatcaacgaagggggtaagcccaaagtcctggttagctacaaaggggaaaataaggcgttctatcctgaggagatttcgtctatggtactcacgaaactgaaggaaactgcagaggctttcttgggacacccagtaaccaacgcagtcatcactgttccagcctacttcaatgactcacaaaggcaggccaccaaggatgctggagtgatagctggactgaacgtgcttcggataatcaatgagccgacagcggctgccattgcatatgggttggacaaaggaggccagggggagagacacgtcctgatttttgaccttggggggggaacctttgacgtctcaattttgaccatagatgatgggatctttgaagtgaaagccactgcaggggacacccatctgggcggcgaagactttgataacaggctggtctcacacttcgtggaggaatttaagaggaaacataaaaaggatatctcccagaataagcgggccgtgcgcaggctgaggactgcctgcgagagggcgaagagaacattgagttcctctactcaagcaaacttagagattgacagtctctatgagggcattgacttttatacaagcattactcgtgccagatttgaagaactttgtgcggatctgttccgcggcacgttagagcctgtcgaaaaggcgctccgtgacgcaaagatggacaaagcaaaaatacacgatattgtgctggttggcggctccaccagaatacccaaggtgcagaggctgctgcaggactactttaacgggagggacttaaacaaatcaatcaatcccgacgaggccgtggcgtacggagctgctgttcaggcagccattttgatgggagacaaatcagaaaaggtgcaggacttgttgctcctcgacgtagctccactctccctggggcttgaaaccgcaggcggggttatgacggctctgatcaagaggaacagtacgatacctactaaacagacccaaattttcactacctacagcgataaccagccaggcgttttgattcaggtctatgagggtgagagggccatgacaaaggacaataatctgctgggcagatttgacctgacgggcatcccaccagcgcccagaggagtcccacagatcgaggttacttttgacatcgacgccaacggcatattaaacgtcaccgctacggacaaatcgacgggcaaggtgaacaagatcaccattacaaatgacaaaggccgtctttccaaggaggaaattgaaaggatggtgctggatgcggagaaatacaaggccgaggatgaggttcagagagagaagatagctgcaaagaacgccctcgagagttacgctttcaatatgaagtccgtcgtctccgacgaaggtctcaaaggcaagattagcgagtctgacaaaaataagattctggacaaatgtaatgagctgctctcctggcttgaggtgaaccaactcgccgaaaaagacgaatttgatcacaagagaaaagaactagagcagatgtgcaaccccattattaccaagctttaccagggggggtgtactggccccgcctgcggcactggctatgtgccggggcggccggccaccggccccactattgaagaagtggactag

SEQ ID NO: 157036 - DNA, 1926 bp, Artificial Sequence
  derived and/or modified sequence
atggccacagctaaagggatcgcaattggcattgacctggggacaacatacagttgcgtcggggtattccaacatgggaaagttgaaataatcgcaaatgatcaaggtaaccgcactacgccctcatatgtggcctttacggacaccgagcgactcatcggcgatgccgccaagaaccaggtagctatgaacccccagaacacagtgttcgatgcaaaaagactgatcgggcggaaattcaatgatcccgtggtccaggccgatatgaaactgtggcctttccaggttattaatgaggggggtaaacctaaggtgctcgtttcatataagggggagaacaaggccttttaccctgaggagataagcagcatggtcctgactaagttaaaggaaaccgccgaggccttcctgggccatcctgtgacaaacgctgttattacggtccctgcgtactttaatgattcgcaaagacaggctacaaaggacgctggtgtaatcgctggccttaatgtactgcggattatcaacgagccaaccgcggccgctattgcatacggattggacaagggaggtcagggcgaaagacatgtcttaatattcgacctcggcggtggcacatttgacgtttcaatccttaccatagatgacggcatctttgaggtcaaagctacagccggtgacacccacttgggcggggaggattttgacaatcggctggtctctcacttcgtggaggagttcaaaagaaaacataagaaagacatctcccagaacaaacgtgcggtgagacggctgcggaccgcatgtgaacgggccaaacggactctttccagcagcacccaagctaatctagaaatagattctttgtacgagggcatcgatttttacacgagcataactcgcgcccgcttcgaagaactctgcgcggacctttttcggggaacgctcgaacctgttgaaaaggcactgcgagacgcaaagatggataaagccaaaatccatgacattgtccttgtaggaggttccacgcggatccccaaagtccaaaggctcctgcaggattattttaatggccgggatttaaataagagcattaatcccgatgaggccgtggcctacggagcagcggttcaagccgccatcttaatgggcgacaagtcggaaaaggtgcaggacctcctgctgctggatgttgcacctttatcacttggcctggaaacagccggaggcgtgatgaccgcattaattaagcgcaattctacaattcccaccaaacagacacagatcttcacaacctactcagataaccagccgggcgtccttatacaagtgtacgagggcgaacgcgctatgacaaaagacaataacctgctcggacgctttgatttgacggggattcccccggccccaagaggagtgccgcagatcgaagttacctttgacatcgacgctaacggaattcttaacgtgacagctacagataaaagcacgggaaaagtgaataagattacaattaccaacgacaagggcaggctttccaaagaagaaatcgagcgtatggtactagatgcggagaagtataaggccgaagatgaggttcagcgcgagaaaattgctgcaaaaaatgctctggaaagctatgcctttaatatgaaaagcgtcgtgtctgacgaaggtctgaaaggcaagatatctgagagcgataagaacaagatcctggacaagtgtaatgagctgttgagttggctggaggttaaccagcttgccgagaaggatgagttcgatcacaaacggaaggaactggagcagatgtgtaatcccattattaccaagctgtaccagggcgggtgtacgggacctgcatgcggcacaggctatgtgccaggccggcctgccactggccctacgatagaagaggtcgactag

SEQ ID NO: 157037 - DNA, 699 bp, Artificial Sequence
  derived and/or modified sequence
gcaaaagggattgcgatcgggatagatcttggcactacttattcctgcgttggcgttttccagcatggtaaggttgaaatcattgcaaacgaccaaggtaatcgtactaccccttcatatgtcgcttttactgacaccgaacggcttattggcgacgccggcgtgatagcaggcctgaatgtgttgaggatcatcaacgagcccacggccgctgcaatcgcctacggcttggacaagggaggccaaggcgaacgacacgtattaatcttcgatctgggtggaggcacgtttgacgtgtcaatattgaccattgatgacggtattttcgaagttaaggccactgctggcgatacacacttaggcggcgaggatttcgacaatagactcgttagccatttcgtggaagaattcaaaaggaagcacaagaaagatatcagccaaaataagcgtgccgtgcgacgactccgtacggcctgcgaacgggcaaaacgaacgttgagttcatcaactcaggccaacctggaaattgactcactgtacgaaggcattgatttctatacctccattacgagggccagattcgaggagctgtgcgcggatctgttccgcgggaccttagagcctgtcgaaaagggcgccccccctgccagcccgagatgctccgggtgtttccgcacaacatctatggacgtgatttag

SEQ ID NO: 157038 - DNA, 699 bp, Artificial Sequence
  derived and/or modified sequence
gccaaaggtatcgcaattggcatcgatctgggaaccacgtatagctgtgtgggtgtgtttcaacacggcaaggtcgagataatagcaaatgaccaaggtaacaggacaactcccagttatgtggcctttacagatacagagaggctgattggcgatgctggcgtgattgcaggtttgaacgttctgaggataatcaacgaacccacagcagccgcaattgcatacggacttgacaaaggaggtcaaggggaaaggcacgtgctgattttcgaccttggcgggggaacattcgacgtttccatcctcactatcgacgacggtatatttgaggtgaaggccactgccggggatactcaccttggtggagaagatttcgacaaccgcttagtcagccatttcgttgaagagttcaagcgcaaacataaaaaggacatcagccagaataagcgcgccgtccggcggttgaggacagcctgcgaacgcgccaaacgcactctgtcctcaagtacccaagccaatttggaaatagactcattgtatgagggaattgacttctacactagcattacaagagcccggttcgaagagctctgtgccgacttgtttcggggtacgctcgagccagttgagaagggggcccccccagcatctccacgttgttcaggatgctttcggacgacctccatggacgtaatttag

SEQ ID NO: 157039 - DNA, 1926 bp, Artificial Sequence
  derived and/or modified sequence
atggccactgccaaagggattgcaatcggtattgacttgggtacaacttactcctgcgtaggggtattccaacatggtaaggtagaaattattgcgaacgatcaaggtaatagaacgacaccatcctatgttgcgtttacggataccgaacgtttgataggggatgcagccaaaaaccaagtggctatgaacccgcaaaacactgtattcgacgcgaaacgactaatagggagaaaatttaacgatccagttgtgcaggccgatatgaaactatggcctttccaggtaatcaatgaaggcggcaagccaaaagtccttgtgtcatacaaaggcgagaacaaagcattctatcccgaagagatttcaagcatggtgttgaccaaactcaaggaaaccgccgaagcttttctgggccaccctgtcacgaatgccgtgataaccgtgcccgcctactttaacgatagccaaagacaggcaaccaaggatgcaggtgtgatagctgggctcaatgttctgcgcatcattaatgaacccaccgcagccgcaatcgcttacggcttagacaaaggcgggcagggcgagagacatgttctgatttttgacctggggggtggaacttttgatgtgtctatcctgactattgatgatggaatctttgaagtgaaagccaccgctggcgatactcatctggggggcgaagacttcgataatcgactcgtgtcacactttgtggaagaatttaagcgcaagcacaagaaagatattagccagaataagcgtgcagtccggaggcttcgcacggcgtgcgaacgcgcaaagcgaaccttgtccagctcaacccaggccaaccttgagattgatagtctctacgaggggattgacttctatacaagtattactcgtgcccgtttcgaggagctttgcgcagatctgtttcggggtacgcttgaaccagtcgagaaggccttgagagacgctaagatggacaaagcgaaaatccatgatattgtgctggttggcggctctacgcgcattcctaaagtgcaacgattgttacaggattatttcaacggcagggacctgaataagtccattaatccggatgaagctgtggcttacggagcagctgttcaggcagccattcttatgggcgataagtctgagaaagtgcaggatctcttgctgcttgacgtggcaccactgtctctgggcttggaaacagcaggtggagtaatgactgcacttataaagcgaaactcaaccatccccaccaaacaaactcagatattcaccacctacagcgacaaccagcctggggtcctgattcaggtgtacgagggggaaagggctatgaccaaagataataatttgctgggtcgctttgacttgaccggcatccccccagctcctcggggagtcccacagatcgaagtgacctttgatattgacgccaacggaattctcaacgtcaccgcaaccgacaaatcaaccggcaaagtcaataagatcacaataacaaacgataagggccgccttagcaaagaagaaatagagcgcatggtgctggatgccgagaagtataaggctgaagatgaggtgcaaagggaaaagatcgctgcaaagaatgcattagagtcatacgcctttaatatgaaatctgtggttagcgacgaagggctaaaagggaaaatttctgaaagcgacaaaaacaagattctggacaaatgtaatgagttgctgtcatggttggaggtgaaccaactggcagagaaggatgagtttgatcacaaacgcaaagagctggagcagatgtgtaatccaatcatcacaaaactttaccagggaggatgtacagggccagcttgtggcacaggctacgtgcccggtcgccctgctacgggtccgacaattgaagaggtcgactag

SEQ ID NO: 157040 - DNA, 1599 bp, Artificial Sequence
  derived and/or modified sequence
atggctacggctaaggggatagcaatcggcatcgacctcggcactacttatagctgcgtgggggtttttcaacacggtaaagtcgaaataattgctaatgaccagggtaatcgaactaccccgagttatgtcgcctttaccgacacagagcgactcatcggtgacgctgccaaaaaccaagtcgctatgaatcctcagaatacagtctttgatgctaaaagactcatcggccgtaagtttaacgatccagttgtgcaggcagatatgaaattgtggccctttcaggtcatcaacgaaggtgggaagcctaaagtgctcgtgtcctataagggcgagaataaggctttctaccccgaggagatttcgtccatggtgttgaccaagctaaaagaaaccgccgaagcattcctggggcaccctgtgaccaatgcagtaatcactgttcctgcttactttaacgattctcagagacaagcgacaaaagatgcaggcgtaattgccgggctgaatgtgctgcgaattatcaatgagcccacagccgcagcaattgcatacggactcgacaaaggcggccagggtgagcggcatgtgttgattttcgacttaggaggggggaccttcgacgtaagcatcctgacaatcgacgacggcattttcgaagttaaagcgacagcaggagatacccatctcggcggcgaggactttgacaacagactggtgtcacactttgtggaggagtttaaaaggaaacacaaaaaggatatttcgcagaacaagcgcgccgttcggcggctgcgaactgcatgtgaacgcgcgaagaggaccctcagtagtagcactcaagctaatttggaaattgactccctctatgaagggattgacttttacacctccattacgagagcccgattcgaagagctttgtgccgacctgttccgcggaaccttggagccagtagaaaaagccttaagggatgccaagatggataaagccaagattcacgatatcgtgctagtgggagggagtacccgcattccaaaggtccagaggctcctgcaggactatttcaatgggagggatctcaacaagagcattaatcctgacgaggcggtagcctacggagccgccgttcaggccgccattctcatgggtgacaaatccgagaaagtgcaagacttactgttactggatgtcgctcctttatccctcgggctcgagaccgccggtggggtgatgaccgcattgattaagaggaattccaccattcctactaagcagacacaaatattcacgacgtactctgacaatcagcccggagtgctcatccaggtatatgaaggcgagagggcaatgactaaggataataacctgttaggacggtttgatctcacgggaataccccccgctcctagaggtgtaccacagatagaggttactttcgacatagacgcaaatggtattctcaacgtaaccgccacggacaaaagtacagggaaggttaacaagattactatcaccaacgataaagggagactcagtaaagaagaaattgagcgcatggtattggatgccgaaaaatacaaagctgaagacgtctag

SEQ ID NO: 157041 - DNA, 699 bp, Artificial Sequence
  derived and/or modified sequence
gcaaaaggtattgccatcggcatcgacctcggtacaacctacagttgcgtcggagttttccagcacggaaaagttgaaatcatagctaatgaccagggcaacagaacgaccccctcatacgtggccttcaccgacacagagaggttgattggcgatgcgggggtcatcgccggattgaacgtactccgcatcatcaatgaacctacagcggctgcaattgcatatggtctggataagggaggccagggggagcggcatgtgctgatatttgacctgggtggagggacattcgatgtgtcaattttaaccattgacgatgggatcttcgaggtgaaggccactgccggcgacactcatcttggcggtgaggactttgataatagacttgttagccacttcgtagaagaattcaagcgcaagcacaagaaggacatttcacagaacaagagggctgtgaggcggttaagaacagcctgtgagagagccaagcgcacactttcttctagcacacaagccaatttggagatcgattcgctgtatgaggggatcgacttctatacaagcatcacacgggcacgcttcgaagaactgtgtgctgacctgtttagaggtactctggagcccgtggagaaaggtgcgccccctgcctctcccaggtgctccggatgttttcgcaccacctcaatggacgttatatag

SEQ ID NO: 157042 - DNA, 699 bp, Artificial Sequence
  derived and/or modified sequence
gccaaaggcattgccattggcatcgacctcggaactacttactcctgcgtcggagtattccagcacgggaaagtggaaataatcgcaaacgaccaaggtaacagaacgactccatcatatgtggcgttcactgacacagaacgactgatcggcgacgcaggcgtgatcgctgggctgaatgtcctccggattatcaatgaacctacagccgccgccatcgcatatgggctggataagggagggcagggagagcggcatgtgcttatttttgacctcggtggcgggactttcgatgttagcatcctgactatcgatgacggaatcttcgaggtgaaggctaccgctggcgatactcatctcgggggtgaagacttcgacaatagactggtgtcccattttgtcgaagagttcaagcgcaaacataagaaagatattagccagaataagcgcgctgttagaagactgagaaccgcttgtgaacgggcaaagcgtactttgtcttcctcgacacaggctaatttggagatcgactctctgtacgaaggcattgacttctataccagcattactagagcgcggtttgaagagttgtgtgccgatctgttcaggggcaccttagagcctgtcgagaaaggggcaccgccggcctcaccaagatgctctggatgctttcggaccactagtatggacgtcatttag

SEQ ID NO: 157043 - DNA, 1761 bp, Artificial Sequence
  derived and/or modified sequence
atggccacagccaagggcatcgccatcggcatcgacctgggcaccacctacagctgtgtgggcgtcttccagcacggcaaggtggagatcatcgccaatgaccagggcaacagaaccacccccagctatgtggccttcacagacacagagcggctgattggagatgctgccaagaaccaggtggccatgaacccccagaacacagtgtttgatgccaagaggctcatcggcaggaagttcaatgaccctgtggtgcaggccgacatgaagctgtggcccttccaggtgatcaatgacagccagaggcaggccaccaaggatgctggggtgattgctggcctgaatgtgctgcgcatcatcaatgagcccacagctgctgccatcgcctacggcctggacaagggcggccagggcgagagacatgtgctgatctttgacctgggcggcggcacctttgatgtgtccatcctgaccattgatgatggcatctttgaggtgaaggccacagctggggacacccacctgggcggggaggactttgacaaccggctggtgagccactttgtggaggagttcaagaggaagcacaagaaggacatcagccagaacaagagagctgtgcggcggctgaggacagcctgtgagcgggccaagaggaccctgagcagcagcacccaggccaacctggagattgacagcctgtatgagggcatcgacttctacaccagcatcacccgggccaggtttgaggagctgtgtgccgacctcttccggggcaccctggagcctgtggagaaggccctgagagatgccaagatggacaaggccaagatccatgacatcgtgctggtgggcggcagcacccgcatccccaaggtgcagaggctgctgcaggactacttcaacggccgggacctgaacaagagcatcaacccagatgaagctgtggcctacggggctgctgtgcaggccgccatcctgatgggagacaagtctgagaaggtgcaggacctgctgctgctggatgtggcccccctgagcctgggcctggagacagctggaggagtgatgacagccctgatcaagaggaacagcaccatccccaccaagcagacccagatcttcaccacctacagcgacaaccagcccggggtgctgatccaggtgtatgaaggagagcgggccatgaccaaggacaacaacctgctgggccgctttgacctgaccggcatccccccagccccccggggcgtgccccagatcgaggtgacctttgatattgatgccaacggcatcctgaatgtgacagccacagacaagagcacaggcaaggtgaacaagatcaccatcaccaatgacaagggccgcctgagcaaggaggagattgaaagaatggtgctggatgctgagaagtacaaggcagaagatgaggtgcagcgggagaagattgctgccaagaatgccctggagagctatgccttcaacatgaagtctgtggtgtctgatgagggcctgaagggcaagatcagcgagagtgacaagaacaagatcctggacaagtgcaatgagctgctgtcctggctggaggtgaaccagctggccgagaaggatgaatttgaccacaagaggaaggagctggagcagatgtgcaaccccatcatcaccaagctgtaccagggcggctgcaccggccctgcctgtggcaccggctacgtgcccggccggcctgccaccggccccaccatcgaggaggtggactag

SEQ ID NO: 157044 - DNA, 1926 bp, Artificial Sequence
  derived and/or modified sequence
atggccacagccaagggcatcgccatcggcatcgacctgggcaccacctacagctgtgtgggcgtcttccagcacggcaaggtggagatcatcgccaatgaccagggcaacagaaccacccccagctatgtggccttcacagacacagagcggctgattggagatgctgccaagaaccaggtggccatgaacccccagaacacagtgtttgatgccaagaggctcatcggcaggaagttcaatgaccctgtggtgcaggccgacatgaagctgtggcccttccaggtgatcaatgaaggaggcaagcccaaggtgctggtgtcctacaagggggagaacaaggccttctacccagaggagatcagctccatggtgctgaccaagctgaaggagacagctgaggccttcctgggccaccctgtgaccaatgctgtgatcaccgtgcctgcctacttcaatgacagccagaggcaggccaccaaggatgctggggtgattgctggcctgaatgtgctgcgcatcatcaatgagcccacagctgctgccatcgcctacggcctggacaagggcggccagggcgagcggcacgtgctgatctttgacctgggcggcggcacctttgatgtgtccatcctgaccattgatgatggcatctttgaggtgaaggccacagctggggacacccacctgggcggagaagattttgacaaccggctggtgagccactttgtggaggagttcaagaggaagcacaagaaggacatcagccagaacaagagagctgtgcggcggctgaggacagcctgtgagcgggccaagaggaccctgagcagcagcacccaggccaacctggagattgacagcctgtatgagggcatcgacttctacaccagcatcacccgggccaggtttgaggagctgtgtgccgacctcttccggggcaccctggagcctgtggagaaggccctgagagatgccaagatggacaaggccaagatccatgacatcgtgctggtgggcggcagcacccgcatccccaaggtgcagaggctgctgcaggactacttcaacggccgggacctgaacaagagcatcaacccagatgaggccgtggcctatggagctgctgtgcaggccgccatcctgatgggagacaagtctgagaaggtgcaggacctgctgctgctggatgtggcccccctgagcctgggcctggagacagctgggggcgtgatgacagccctgatcaagaggaacagcaccatccccaccaagcagacccagatcttcaccacctacagcgacaaccagcccggggtgctgatccaggtgtatgaaggagagcgggccatgaccaaggacaacaacctgctgggccgctttgacctgaccggcatccccccagccccccggggcgtgccccagatcgaggtgacctttgatattgatgccaacggcatcctgaatgtgacagccacagacaagagcacaggcaaggtgaacaagatcaccatcaccaatgacaagggccgcctgagcaaggaggagattgaaagaatggtgctggatgctgagaagtacaaggccgaggatgaggtgcagcgggagaagattgctgccaagaatgccctggagagctatgccttcaacatgaagtctgtggtgtctgatgagggcctgaagggcaagatcagcgagagtgacaagaacaagatcctggacaagtgcaatgagctgctgtcctggctggaggtgaaccagctggccgagaaggatgaatttgaccacaagaggaaggagctggagcagatgtgcaaccccatcatcaccaagctgtaccagggcggctgcaccggccctgcctgtggcaccggctacgtgcccggccgcccagccaccggccccaccatcgaggaggtggactag

SEQ ID NO: 157045 - DNA, 1599 bp, Artificial Sequence
  derived and/or modified sequence
atggccacagccaagggcatcgccatcggcatcgacctgggcaccacctacagctgtgtgggcgtcttccagcacggcaaggtggagatcatcgccaatgaccagggcaacagaaccacccccagctatgtggccttcacagacacagagcggctgattggagatgctgccaagaaccaggtggccatgaacccccagaacacagtgtttgatgccaagaggctcatcggcaggaagttcaatgaccctgtggtgcaggccgacatgaagctgtggcccttccaggtgatcaatgaaggaggcaagcccaaggtgctggtgtcctacaagggggagaacaaggccttctacccagaggagatcagctccatggtgctgaccaagctgaaggagacagctgaggccttcctgggccaccctgtgaccaatgctgtgatcaccgtgcctgcctacttcaatgacagccagaggcaggccaccaaggatgctggggtgattgctggcctgaatgtgctgcgcatcatcaatgagcccacagctgctgccatcgcctacggcctggacaagggcggccagggcgagcggcacgtgctgatctttgacctgggcggcggcacctttgatgtgtccatcctgaccattgatgatggcatctttgaggtgaaggccacagctggggacacccacctgggcggagaagattttgacaaccggctggtgagccactttgtggaggagttcaagaggaagcacaagaaggacatcagccagaacaagagagctgtgcggcggctgaggacagcctgtgagcgggccaagaggaccctgagcagcagcacccaggccaacctggagattgacagcctgtatgagggcatcgacttctacaccagcatcacccgggccaggtttgaggagctgtgtgccgacctcttccggggcaccctggagcctgtggagaaggccctgagagatgccaagatggacaaggccaagatccatgacatcgtgctggtgggcggcagcacccgcatccccaaggtgcagaggctgctgcaggactacttcaacggccgggacctgaacaagagcatcaacccagatgaggccgtggcctatggagctgctgtgcaggccgccatcctgatgggagacaagtctgagaaggtgcaggacctgctgctgctggatgtggcccccctgagcctgggcctggagacagctgggggcgtgatgacagccctgatcaagaggaacagcaccatccccaccaagcagacccagatcttcaccacctacagcgacaaccagcccggggtgctgatccaggtgtatgaaggagagcgggccatgaccaaggacaacaacctgctgggccgctttgacctgaccggcatccccccagccccccggggcgtgccccagatcgaggtgacctttgatattgatgccaacggcatcctgaatgtgacagccacagacaagagcacaggcaaggtgaacaagatcaccatcaccaatgacaagggccgcctgagcaaggaggagattgaaagaatggtgctggatgctgagaagtacaaggccgaggatgtgtag

SEQ ID NO: 157046 - DNA, 1761 bp, Artificial Sequence
  derived and/or modified sequence
atggccaccgccaagggcatcgccatcggcatcgacctgggcaccacctattcctgcgtgggagtgtttcagcatggcaaggtggagattatcgccaatgatcagggaaacagaacaactcccagttacgtggcatttaccgataccgagaggctcatcggtgacgctgcaaaaaaccaggtagccatgaatccccaaaatacagtctttgacgctaaacgactaatcggaagaaaatttaacgacccagtggtgcaggctgatatgaagttgtggccattccaagttatcaatgacagtcagcgtcaggccacgaaagatgcgggcgttatagcgggcctcaacgttctgaggatcatcaatgaaccaaccgcggctgcaattgcatacggcctagataagggaggacaaggagaacgtcatgtcctgatcttcgacctcggaggtggcaccttcgacgtgagcatcttgaccattgatgacgggatcttcgaagtgaaagccaccgccggcgacactcatctgggaggggaggacttcgacaatcgacttgtgtcccacttcgttgaggagtttaagaggaagcataagaaggatatctctcagaataaacgtgctgtccggaggttgaggactgcctgcgaaagggctaaacgaacgctgagttccagcacacaagccaacctcgagatagattcactgtatgagggaattgatttctatacaagcattacaagagctcgattcgaagagctctgtgccgatctgttcaggggaaccctcgagcctgttgaaaaagcactgcgcgatgccaaaatggacaaagcaaaaatccatgacatcgtactcgtcggagggtcaactcgtatccctaaagttcaaaggctgttacaggattacttcaacggacgcgacctcaacaagtccatcaacccagatgaggctgtggcatatggagccgccgttcaggcagcaatcctgatgggcgataagtccgagaaggtgcaggacctacttctgttagatgttgcccctctatccctcgggctcgagactgcgggcggcgtgatgacggcactgattaaacgcaacagtaccatccctaccaaacagacccaaatctttaccacctactccgacaatcagccaggggtgcttatccaggtctacgagggtgaacgtgctatgaccaaagacaacaatcttctgggaagattcgatcttacagggatcccgccagccccccgcggtgtcccacaaatcgaggtgacctttgatatcgacgcaaatggaattctcaacgtgacagcaacggacaaatcaaccgggaaagtgaataaaataacaatcaccaatgacaagggaagattgagcaaggaagagattgaaaggatggttctcgacgctgaaaagtataaggctgaggatgaggtccaacgggagaagatagcagccaagaacgccttggaatcctacgcatttaatatgaaatccgtggtcagcgacgaaggtctgaaagggaagatctccgagtcagataagaacaagatcttggacaaatgtaatgagctcttgtcttggctcgaggtcaaccaactggcagagaaagatgagttcgatcacaaacgaaaagagttggagcagatgtgcaacccaattattaccaagctgtaccaaggtggctgcaccgggcccgcctgtggaacaggctacgtacccggccgccccgccacgggacctaccatcgaggaagtggattag

SEQ ID NO: 157047 - DNA, 1926 bp, Artificial Sequence
  derived and/or modified sequence
atggccaccgccaagggcatcgccatcggcatcgacctgggcaccacgtactcctgtgttggcgttttccagcacggaaaagtggaaattattgcgaacgaccagggcaacagaacgactcctagttacgtcgcattcactgacaccgagcgactgattggggacgctgccaagaatcaggttgccatgaacccacagaacacagtgtttgacgcgaaaaggctcataggtcggaagttcaatgatcccgtggtacaagctgacatgaagctctggccattccaggtcatcaacgagggaggtaagcctaaggtgcttgtttcttataaaggcgagaataaggcgttctacccagaggagatcagctctatggtcctgactaagctgaaggagaccgctgaagctttcttggggcaccccgtgacaaatgctgtgatcactgtccctgcatatttcaatgactctcagaggcaagctactaaagatgctggcgtgatcgccggcttaaacgtccttaggattattaatgagcctaccgccgctgccattgcgtacgggttggacaaaggtggacagggcgaaagacatgttctaatcttcgacttaggaggagggactttcgatgtgagtattctaactatcgacgacgggatttttgaagtcaaggctactgctggagatactcacctaggcggagaagactttgataataggctggtctcccacttcgtggaggaattcaaacggaaacataagaaggatatcagtcagaacaaaagagcagtgaggcgcctgcgaactgcttgcgagagagccaagcggacgctgtcatccagcacacaggctaatctggaaatcgacagcctttatgaagggatagatttctatactagcataacgcgggcaaggtttgaagagctgtgcgctgatctttttcggggcaccctcgagcctgtggaaaaggccctgcgtgacgctaagatggacaaagcaaagatccacgatatcgtcctggtcgggggatctacaagaatccctaaagtgcagagattgttacaggactacttcaacggaagggacctcaataaaagcattaatcccgacgaggccgtggcttacggagcagcagttcaggccgctatcttgatgggtgacaaatcagagaaggtacaagatctactcctcttagatgtggcaccattgtcgttaggcctggaaaccgctggaggggtcatgactgccctgatcaaacggaacagtactattcctacaaaacagacccagatctttaccacctactccgacaatcagcccggagtactcatacaggtatatgaaggagagcgagccatgacgaaagataataatctattggggcgctttgatttaacggggattcccccagcccctcgcggcgtgccccagatcgaggtgacttttgacatcgacgcaaatggcatacttaatgtaactgctaccgataaatctactggcaaggtcaacaagatcactatcactaatgacaaagggcgtttatccaaagaggagattgagcgtatggttctggacgcagagaagtacaaggcggaagatgaggtgcagagggagaagatagccgctaagaatgctctggagtcctatgcttttaacatgaagtcggtcgtgagcgacgaaggcctgaaagggaagatctctgagagcgataagaataaaattctggacaaatgcaatgagttgcttagctggctcgaagtaaatcagctggctgagaaagacgaatttgaccacaaaagaaaggagctcgagcagatgtgcaatcctatcataacgaaactttatcagggcgggtgtaccgggccagcttgcggaacaggatatgtacccggccggccggctaccggccccacaatcgaggaggtggattag

SEQ ID NO: 157048 - DNA, 1926 bp, Artificial Sequence
  derived and/or modified sequence
atggccaccgccaagggcatcgccatcggcatcgacctgggcaccacttactcatgtgtcggagtctttcagcacggtaaggtggagattattgctaacgatcagggaaatagaacaacaccgtcttacgtagcattcactgacacagagcggttaatcggggacgccgcaaaaaaccaggtcgccatgaacccgcaaaacacagtctttgacgccaagagactcatcggaagaaagtttaatgacccagtggtccaggccgacatgaagctctggccattccaggtcattaacgagggtggtaagcctaaagtgctggttagttataaaggcgagaacaaggccttttaccccgaggagatcagttcaatggtactcacgaagcttaaagaaactgccgaagcctttcttgggcacccagtgaccaatgcagtcatcacagtgcctgcgtacttcaacgactcgcagcgacaggcaacaaaagacgctggggttatcgcggggttgaatgtcctcagaattatcaatgagcctacggccgccgccatcgcttacggattggataaaggcggacagggtgaaaggcacgtcctcatattcgacctcggagggggtactttcgacgtgtcaatactcactattgatgacgggattttcgaagtgaaagcgactgccggcgacacacatctcgggggagaggattttgacaataggctagtgagccacttcgttgaggaatttaagaggaagcacaaaaaggatattagccagaacaagagagccgttcgccgcctgagaaccgcttgcgaacgggccaaacgcaccctgtctagttccacacaggcgaatttagaaattgatagcctttacgaaggaattgatttctacaccagcatcactcgagcccgcttcgaagaactctgcgctgatctcttcagaggcactttggaaccagtggagaaggcattacgtgacgctaagatggacaaagccaaaattcatgacattgtactcgtaggggggagtacgcggatccccaaggtgcaacgccttctgcaggattacttcaatgggagagatttaaacaagtctataaatccagacgaggccgtcgcctacggagcagcggtgcaggcagcaatattgatgggcgataagagtgaaaaagtgcaggatctgcttctcttagacgtggcacctctgtccttgggcctggagaccgccggaggcgtcatgaccgccctaatcaagcgcaatagtactatccctaccaagcaaactcagatctttacaacctattcagacaatcaacctggggtgcttatccaggtatacgagggcgaacgtgctatgacaaaagacaacaatctgttaggtagatttgacttaacgggtataccccctgccccaagaggcgtgcctcaaatcgaggtgacgttcgacattgacgcaaatggcattctgaacgtcacagctacggacaagtccaccggaaaggttaacaaaatcaccatcacaaacgataaaggcagattatctaaagaggaaattgaacgcatggtgctggacgccgaaaaatacaaggctgaagacgaagtccagagggaaaaaatcgcagccaagaacgcattggaatcctacgcattcaacatgaaaagcgtcgttagcgacgaaggccttaaaggaaagatcagtgagagcgacaaaaataagattcttgataagtgtaatgaactcctgtcgtggctggaggtcaatcaattggctgagaaggacgaatttgaccacaaacgtaaggagttggaacagatgtgtaacccaataatcaccaaactgtatcagggagggtgcactggcccagcttgcggcacaggctacgttccaggtaggccagccactggcccaactatagaagaagttgattag

SEQ ID NO: 157049 - DNA, 1926 bp, Artificial Sequence
  derived and/or modified sequence
atggccaccgccaagggcatcgccatcggcatcgacctgggcaccacttactcatgtgtgggtgtctttcagcacgggaaagtcgagattattgcaaacgatcagggaaatcgcacgacaccttcttatgtcgcttttactgacacggaaagattgataggtgacgccgctaaaaaccaggtagcaatgaatccgcagaatactgtgttcgacgcaaaaaggttgattggaagaaagtttaacgaccccgtggtacaggcagacatgaagttatggcccttccaggtcatcaatgagggaggcaagcctaaagtgctggtttcttataagggcgagaataaggctttttacccagaggagatctcgtccatggtactaacaaaactgaaggaaactgcggaggccttcctcgggcaccccgtgaccaatgctgtgattactgtgcccgcatactttaatgattcccagaggcaggccaccaaggacgccggcgtgattgccggcttaaatgtgcttcggattatcaacgaaccgactgcggccgcaatcgcctacgggctggacaaaggcggccagggtgagaggcatgtgctgatatttgacctgggggggggaacttttgacgtgtccatcttaacaatcgacgacggaatcttcgaagtgaaagcaacagccggagatacccacttgggaggggaggacttcgataaccgcctggtgagccatttcgtggaagagttcaagaggaagcacaaaaaggatatttcccagaacaagcgcgcggttcgtcgacttcgtactgcatgcgagcgtgccaaaaggaccttatcttcaagtactcaggcaaacctcgagattgacagtctctacgaggggattgacttctatacgtcgatcacacgtgctcgcttcgaggaactgtgcgccgatttatttcgtggaactctggaacccgtagaaaaggcactacgtgacgccaagatggataaggccaagatccatgacattgtgctcgtgggcgggagtacacgcatcccaaaagtacagcggttgctacaagactactttaatggaagggatctgaacaaaagtataaatcccgatgaagctgtcgcctatggagcagcggttcaggctgccattctgatgggcgacaagagcgaaaaggttcaggatctcttactcctggatgtggcccccttgtcgctgggcctggaaactgccggaggggtcatgactgcactcatcaagagaaattcaacaatccctactaagcagacccagattttcactacatactccgacaaccagcccggggtgcttatccaggtgtacgagggcgagcgggcaatgactaaggacaataacctgcttgggcgatttgatcttaccggaataccacccgcaccccgaggcgttcctcagatcgaagttacttttgacatagacgcaaatggtatcctgaacgtcactgccactgacaagtcaaccggcaaagtcaacaaaattacaataacaaatgataaggggcggctgtcgaaagaagagatagaacgtatggtactggacgctgagaagtataaagcggaggacgaggtacaacgagagaaaattgctgccaaaaacgccctggagtcgtatgcctttaacatgaagtcagtggtcagtgatgaggggctgaaaggtaagatatctgaaagcgacaagaacaagattttagataaatgcaacgagctgttatcctggttagaggtgaaccagctcgccgagaaagatgagtttgaccataaacggaaggaattggagcagatgtgcaatcccatcataactaagctgtaccaaggtggttgcactggcccagcatgcggtaccggctatgttccggggaggcctgctaccgggcctactatcgaagaggtcgattag

SEQ ID NO: 157050 - DNA, 699 bp, Artificial Sequence
  derived and/or modified sequence
gccaagggcatcgccatcggcatcgacctgggcaccacctacagctgcgtaggagtatttcagcacggaaaggtcgagataatagccaatgaccaggggaacagaacaactccatcctatgtggccttcacagatacagagcgtcttattggagatgcaggcgtgatagcgggactgaacgtcttacgaatcatcaacgagcctactgccgctgctatagcatacggcctggataaaggaggccagggagaaaggcacgtgcttatctttgaccttggtggagggacattcgatgtgagtattctcacaatcgatgatggtatttttgaggttaaggctacggccggcgacacccacttaggaggagaggacttcgacaatcgcctggttagccacttcgttgaagaatttaagcgtaagcataaaaaggatatctcccagaataaacgggcggtccgtagacttcggacagcctgcgagcgagcaaagcgaactctcagttcatctactcaggcaaatctcgagatcgatagtctgtacgagggcatagatttctatacctccattacgagggccagattcgaagaattatgtgccgatctgtttcgagggaccctggagcctgttgagaaaggggccccacctgcgtctccccggtgctccggttgttttcggactacctctatggacgttatctag

SEQ ID NO: 157051 - DNA, 699 bp, Artificial Sequence
  derived and/or modified sequence
gccaagggcatcgccatcggcatcgacctgggcaccacctacagctgcgtgggggtgtttcagcatggaaaagtggagatcatcgctaatgatcagggaaaccgcacgaccccctcatatgtagcgttcaccgacactgaaagactcatcggggacgcaggtgtgatcgcaggtctcaatgttttacgcattattaacgaacccacggcagcggcaattgcctatggacttgataagggcggacagggggagcggcacgttctcattttcgatctgggcggaggcacttttgatgtgtctatcctgactatcgatgatggcatcttcgaggtcaaagccaccgccggcgatacccacctggggggggaggatttcgataatagacttgttagtcacttcgtcgaggagtttaaacgcaagcacaagaaagatattagtcagaacaagcgtgctgtgcgcaggcttagaacagcctgtgagcgggccaaaagaacactgagtagttccactcaggccaatctggagattgatagcttgtacgaaggcattgacttctatacaagcatcactcgtgctaggttcgaagaattgtgtgctgacttgtttcgtggcacactggaacccgtggaaaaaggagcccccccggccagcccgcgttgtagtgggtgtttccgaactaccagtatggatgttatttag

SEQ ID NO: 157052 - DNA, 1926 bp, Artificial Sequence
  derived and/or modified sequence
atggccaccgccaagggcatcgccatcggcatcgacctgggcaccacttactcttgtgtgggagtgttccagcacggtaaagtggaaattattgcaaatgatcagggaaaccgcaccactcccagctatgtagccttcactgatacagagcgactgattggcgacgcagcgaagaatcaagttgccatgaacccccagaataccgtgttcgatgcaaagagactgataggaagaaaattcaatgaccccgtggtgcaggcagatatgaagctttggccattccaggtgataaatgagggaggcaaacccaaggttttggtctcctacaagggtgagaacaaagcattctaccctgaggagatcagctccatggtcctgacaaaactaaaagaaacggccgaggcatttctgggccaccccgtgacaaatgcagtcattacagtccccgcgtactttaacgatagccagagacaagccaccaaggatgcgggagtgatcgccggacttaatgtgttacgaattattaatgaaccaacagccgccgcaatcgcctatgggctggataaaggcgggcagggagagaggcacgtgctgatctttgatctcggcggggggaccttcgacgttagcatcctgactatcgacgatggcatctttgaagttaaggcaactgcaggagatactcacttgggcggcgaagattttgataatcggctggttagccactttgttgaagaatttaagaggaaacataagaaggatatttcccagaacaagagggcagttcgccggctccggacggcctgcgaacgggctaagagaaccctgtctagcagtactcaggccaatctagaaatcgactcattgtacgaaggaatcgatttctatacttctatcaccagggcccgattcgaggagctgtgtgcggatctgttccgggggaccttggagcctgtggagaaagccctgagggacgcaaaaatggataaggcaaaaatacacgatattgtgcttgtgggagggtccactcgcatcccaaaggttcaaagactgctacaggactattttaacggccgggacctcaacaagagtattaatccagacgaagccgtagcctatggcgcagcggttcaagctgccatccttatgggtgataaaagcgagaaagttcaggacctgcttctgctcgatgtagccccgctctccctgggtctcgagaccgcgggtggagtgatgacagccctcataaagaggaatagcaccatccccaccaagcagacacagatcttcacaacatattccgacaaccaacccggtgtgctgattcaagtgtacgagggggaacgcgcaatgaccaaagacaacaaccttctggggagattcgacttgactggcatcccccctgccccaagaggtgtgccacagattgaagtgacgttcgacatcgacgctaacggcatattaaatgttacggctaccgacaaaagtaccggtaaggtaaataagattacgatcacaaacgacaaaggccggctttcaaaggaggagatagagaggatggtccttgacgctgaaaagtacaaggctgaggatgaagtgcagcgtgagaaaatcgcggctaagaatgccctggagtcctatgctttcaatatgaaatcagtggtgagcgatgaaggtctaaaagggaagattagtgaatctgacaaaaataagatattggacaagtgtaacgagctcctcagctggttagaggtcaatcagctggcagagaaggatgagttcgaccacaagcggaaagagctagaacagatgtgcaatccaatcataaccaagctgtatcagggcggttgcaccgggccagcctgcggcaccggctacgtacccggacgtccagccacgggaccaaccatcgaagaggtcgactag

SEQ ID NO: 157053 - DNA, 1599 bp, Artificial Sequence
  derived and/or modified sequence
atggccaccgccaagggcatcgccatcggcatcgacctgggcaccacgtatagctgtgtgggggtgttccagcatgggaaggttgagatcatcgctaacgaccagggcaaccgcactacaccctcgtatgttgccttcacggatacagaacggctgatcggggatgcggctaagaaccaggttgcaatgaatcctcaaaatacggtgtttgacgctaaacggctaattggaaggaagtttaatgatcccgtcgtgcaagccgatatgaaactgtggccattccaggtgattaacgaagggggcaagcctaaagtcctcgtaagttacaaaggagaaaataaagctttctatcccgaagaaatttcgtccatggtactgaccaagcttaaagaaaccgccgaggcatttcttggtcacccagttactaatgccgtaattaccgttcccgcttattttaatgactctcagaggcaggcaacaaaagacgcgggtgtgatagccgggctgaacgttctccgtataatcaacgagcccacagcggcagccattgcatacggcttggacaagggaggtcagggtgaaaggcatgtgttgatctttgatcttggaggaggtaccttcgatgtttccatattgacaatcgacgatggaattttcgaagtcaaagccacggcaggagacacgcatctgggcggcgaggacttcgataacaggcttgtaagtcacttcgtggaggaattcaaacgaaagcacaaaaaggacatttctcagaataagcgtgctgtgaggaggctccgcaccgcttgtgagagggccaaacggaccttgtcatccagtactcaggccaacctggaaatcgacagtctgtacgaggggattgatttctacaccagcattacacgggcccgcttcgaggagctgtgcgcggacttatttcgtggcacactcgaacccgtcgagaaggcactccgagatgccaaaatggacaaggccaaaattcatgacatcgttctggtcggaggctctacacggatccccaaggtgcagcggctgctgcaagattattttaatgggagggacttgaacaagtcaataaatccagatgaggcggttgcttatggcgccgccgtccaggcagccatactaatgggagacaagagcgaaaaggtgcaggatttactgcttctggatgtggcacccctgtccttggggctcgaaaccgccggtggagtcatgacagctctgataaaacgcaattctactattccaaccaagcaaacccagatttttaccacatactctgataaccagccaggagtgttaatccaggtgtatgaaggggagcgtgccatgaccaaagacaacaatttactgggtaggttcgacttgactgggatcccacctgcccctcgcggggtcccacagatcgaggttacttttgatatcgatgctaacggcattttaaatgtcaccgccacggataagtccactggaaaggtcaacaagatcacgatcactaacgacaaagggcggctcagcaaagaagagatcgaacgaatggtactggatgctgaaaaatacaaagcggaggacgtttag

SEQ ID NO: 157054 - DNA, 699 bp, Artificial Sequence
  derived and/or modified sequence
gccaagggcatcgccatcggcatcgacctgggcaccacctacagctgcgtgggggttttccagcacggaaaagtagagattatcgcaaacgaccagggcaatcgtaccacacccagttatgttgctttcacagacacggaaaggcttatcggagacgccggtgtaatcgccggactgaacgtgttacgaatcatcaatgaaccaacagcggctgcaatcgcttatggcctcgacaaaggtggtcagggcgaacggcacgtgttaatattcgacctggggggcgggacgtttgatgtgagtatcctcactatcgatgatggaatttttgaggtgaaagccacagccggagacacccacctcgggggagaagatttcgacaacagactagtttctcatttcgttgaagaatttaagaggaagcataagaaagatatttcacaaaacaagagggccgtgagacgactgagaaccgcctgcgaacgggcaaaacgtactctcagctcttccacgcaggccaatctggaaattgattcgctgtatgagggcattgatttctacacctccatcacgagggccagatttgaggaactctgtgccgacctgtttaggggaactctggagccagtggaaaagggagctccccccgcctctcctcggtgctcgggatgctttagaacgacctccatggatgtcatttag

SEQ ID NO: 157055 - DNA, 699 bp, Artificial Sequence
  derived and/or modified sequence
gccaagggcatcgccatcggcatcgacctgggcaccacctacagctgtgtgggagtcttccagcatggaaaggtggaaatcattgcaaatgaccaaggtaatagaacaacaccaagctatgttgcattcacagatacagaaaggctaatcggtgacgccggggtcattgcaggcttgaatgtcctccgcatcatcaacgagcctacagccgctgccattgcctatggcctggataaggggggtcaaggagagaggcatgtgcttatcttcgatctgggcggcggcactttcgatgtttcgatcctcactatagacgatgggatctttgaggtgaaggctaccgccggggacacacacctcggcggtgaggatttcgacaatcgacttgttagccacttcgtggaggagttcaagcgcaagcacaagaaagatatctcacaaaacaaaagagccgtgcgacgccttcggaccgcatgcgaaagagccaagagaacccttagctccagcacgcaagcaaatctggagatcgattcattgtacgagggtatagatttttatacctccattacccgcgctcggtttgaagagctttgcgctgatctctttcgcggaacactcgagcccgttgagaaaggagctccacccgctagcccaagatgctccggatgcttccggactacttcgatggatgttatctag

SEQ ID NO: 157056 - DNA, 1761 bp, Artificial Sequence
  derived and/or modified sequence
atggccacggctaagggaatcgccatcggaatagatctgggcactacctatagctgcgttggtgtctttcagcacggtaaagtggagatcatagcgaacgatcagggaaaccgcacgacgccctcctatgtggcttttacggatacagagaggctgattggtgacgctgcaaaaaaccaagtagccatgaacccccagaacaccgttttcgacgccaagagactgatcggacggaagttcaacgatcctgtcgtgcaggcggatatgaagctttggccctttcaggttatcaatgattcccagcgccaggcaaccaaggacgctggcgtgattgccggacttaatgttctccggattatcaacgaaccaaccgctgccgcaatcgcctacgggcttgataaaggaggccagggcgagagacacgtgttaatcttcgacttgggaggtgggaccttcgatgtctcaatcctaactatcgatgatggaatctttgaggtgaaagctacggctggcgatactcatctcggcggtgaggactttgacaaccggctcgttagtcacttcgtggaagaatttaagcgcaagcacaagaaagatatctcccagaataaacgagccgtgagacgccttaggacagcctgcgagcgcgctaagaggacactgagcagctccacccaggctaatcttgagattgactccttgtacgagggcatcgacttctacacctccatcacacgcgctagattcgaggaattgtgcgctgacttattccgaggcacgcttgagccagtcgaaaaagccctaagagacgccaagatggacaaggcgaagattcacgacatcgtgctcgtcgggggaagtacaaggatccctaaagtccaacggctactgcaggattacttcaacggacgagatctaaataagtcgatcaatccagacgaagcagtggcctacggagctgccgtacaggcggctattctaatgggagacaaatcagagaaggttcaagatcttctgcttctcgacgtggcacctctcagtcttggtttggaaacagccggaggggtgatgaccgctcttatcaagcgcaactccactatcccaactaagcagacacaaatttttaccacatatagcgacaatcagcctggggtattaattcaggtttatgaaggagaacgggcaatgacaaaggacaacaacctactggggagatttgacttgaccggcattcccccagctccacgcggagttccacagatcgaggtgacgttcgatatcgatgcaaatggtatccttaacgtgacagctaccgacaaaagcacgggcaaggtgaacaaaatcacaattacgaatgataagggcagattatcgaaggaggagattgaaagaatggtcttagatgcggaaaagtacaaggccgaagacgaggtccagcgggagaaaatcgccgctaagaacgctttggaatcttacgcttttaatatgaagtcagtggttagtgacgaggggttgaagggcaaaatttctgaaagtgacaagaacaagatcctggataagtgtaatgaactactgtcctggctggaggtaaaccagctggctgaaaaagatgaattcgatcacaagaggaaagaattagagcagatgtgcaacccgataatcacaaagctgtatcaggggggttgtaccggcccagcgtgtgggaccggctacgtgccgggacgtcctgccacaggcccaaccattgaggaggtggactag

SEQ ID NO: 157057 - DNA, 1926 bp, Artificial Sequence
  derived and/or modified sequence
atggcaacggctaaggggatcgcaattggcatagatctggggaccacctattcctgtgtgggcgtattccagcacggcaaggttgagattattgcgaatgatcaaggcaaccgcaccacgcccagctacgtggcgttcaccgacacggaacgtcttattggagatgctgctaagaatcaggttgctatgaatcctcagaacacggtcttcgatgccaagcggttaatcggccgtaaattcaatgatcccgtggtccaggccgacatgaagctctggcccttccaggtcattaatgagggtgggaagccaaaggtactcgtctcatacaaaggggaaaataaggccttttaccctgaggagatatcctccatggttctgacaaagctgaaggagactgcagaagcttttctgggacatcctgtcacaaacgcagtgataaccgtccctgcgtacttcaacgattcccagcggcaggccaccaaagacgccggagtcatcgcaggcctgaacgtgctgaggatcatcaacgagcctaccgctgcggctatcgcatatgggttggataagggaggccaaggcgagcgccacgtgcttatattcgacttgggaggagggacctttgacgtgagcatcctgaccatcgatgatggcatctttgaagtcaaagctaccgctggggatacacaccttggcggtgaggactttgacaaccgcctggtgtcccatttcgtggaagaattcaaacgcaaacacaagaaagacatttcacagaacaaacgtgcggtccgacgtctgaggacagcgtgtgagcgggctaaaaggacactctctagctccacccaggctaacttggaaatcgactcgctgtacgaagggatagatttctacacttctattaccagagcgaggttcgaggagctctgtgccgacttgttccggggaaccctcgagcctgtagagaaagcactgcgcgacgcgaagatggataaagccaagattcacgatatagtcctggtgggtggctccactcgcattccaaaggtccaaaggctccttcaggactacttcaatggaagagatctcaataagagtatcaaccccgacgaagctgtcgcctacggcgcagccgtgcaagccgctatcctgatgggggataagtccgaaaaagtgcaggacctgttgctcttagatgtggcgccactatccttgggattggaaacggctggcggagtcatgactgccctgatcaaacgcaactcaactatccccactaaacagacacagatcttcaccacctactcggataatcagcccggagtgctcatccaggtctatgagggggaacgcgctatgaccaaagacaataacttgttaggaaggtttgacctgacaggtatcccaccggcacctcgcggtgtgccacagatagaggtgacattcgatatcgatgctaatggaattctaaacgtgacagctacagataagagtactgggaaggtaaacaaaatcaccatcactaatgacaaaggcaggcttagtaaggaggaaattgaacgcatggtcctcgacgctgagaagtataaggcagaggacgaagtgcaaagggagaagattgccgcaaagaatgctcttgaaagttacgccttcaacatgaagagcgtggttagtgacgaggggttaaaaggcaaaatcagtgagagcgataagaataagatcttggataagtgtaatgaacttctaagctggctggaagtaaatcagcttgccgaaaaagatgagttcgatcacaaaaggaaagaactggagcagatgtgcaatccgataatcacgaaactctatcaagggggatgtaccggccctgcttgcgggacgggttacgttcccggtcgcccagccaccgggccaacgatcgaagaggtagactag

SEQ ID NO: 157058 - DNA, 1926 bp, Artificial Sequence
  derived and/or modified sequence
atggctactgctaaaggcatcgccatcggaatcgacttaggtaccacgtattcatgtgtgggcgtgttccagcacggtaaggtagagataattgccaacgatcaggggaacagaactactccaagttacgtggcctttacggatactgagcgcctgatcggggatgctgctaaaaatcaggtcgccatgaacccacagaacacagtttttgatgccaaacgtttgattggcagaaagtttaacgacccggttgtgcaggccgacatgaaactctggccttttcaagtaattaatgagggcggaaaaccaaaggtgctcgtctcatacaagggagaaaataaagcgttctaccccgaggaaatctccagcatggtgctcacaaaattgaaagaaacggccgaagcttttcttgggcaccccgtcacgaatgccgttattacagttccggcttatttcaacgattcccagagacaagctaccaaagatgccggagtaattgccggtctcaatgtcttgagaatcattaatgagcccacagccgctgcaatagcctacggcctggacaaagggggtcagggcgagaggcatgttctcatcttcgacctgggaggcggtacgttcgacgtgagcatcctcactattgacgacggtatctttgaggtcaaggccaccgctggagatacacatcttggaggagaggactttgacaatcgtctggtgtctcacttcgtagaagaatttaaacgcaagcacaaaaaggacatatctcagaataaacgcgcagttcgcagacttaggacagcgtgtgagcgggcaaagcgcacgctcagcagtagtacacaggcaaatttagagattgactcactctatgaaggaatcgacttctatacatcaattacacgggcacggtttgaggagctctgcgctgatctctttcgagggacactggaaccagtcgagaaggcactgcgtgatgcgaagatggacaaggctaagatccatgatatcgttcttgtgggcggatctacacggatcccgaaagtccagagacttcttcaagattatttcaacggtcgagacctgaataagtcgatcaatcccgacgaagccgttgcctatggagccgctgtgcaagctgctatcctgatgggtgataagtcagaaaaagttcaggatttgctattgctcgacgtggctcccctgtctcttgggctggagacggcgggaggggtgatgaccgcgctcattaaacgcaactccactattccaactaagcaaactcagatctttaccacttattcagacaaccagccaggcgtactgatccaggtttacgaaggcgagcgagccatgaccaaagataacaaccttctagggcgattcgatcttaccgggatcccacccgctcccagaggcgtcccgcagattgaagtgacctttgatattgacgccaatggaattctaaatgtgacagcaactgacaagagtaccgggaaagtcaataagataactatcacaaacgacaagggaaggctgtcaaaggaggaaatcgaacgaatggtgttggatgccgagaaatataaggctgaggacgaggtgcagcgcgagaaaatcgcagctaaaaatgccctcgagtcttatgcgtttaacatgaaaagtgtagtgtccgatgagggcctaaagggaaaaattagtgagagcgacaaaaataaaattctggataaatgtaatgagctcctatcttggctcgaagtcaatcagttggcagagaaagacgaatttgaccacaagcggaaggagctcgaacagatgtgtaaccctatcattacaaaattgtaccagggcggatgcaccggtccagcctgtggcaccgggtatgtgcccggaaggcccgcaaccgggcctactatcgaggaagtggattag

SEQ ID NO: 157059 - DNA, 1926 bp, Artificial Sequence
  derived and/or modified sequence
atggctacagccaagggcatagctattggaattgacctgggaactacttattcatgcgtgggggtctttcaacatggcaaggtggagatcatcgccaatgaccagggcaatagaacaaccccttcctatgttgcttttacagatacagaaaggctgatcggcgatgctgctaagaaccaagttgccatgaatccacagaacaccgtgttcgacgccaagcgcctaatcggacgcaagttcaacgaccccgtcgtgcaggcagatatgaaactctggccatttcaggtcatcaacgaggggggaaagccaaaggtgctagtttcatacaaaggagaaaataaagctttttatcctgaggaaattagcagtatggttctcacaaagctgaaagagaccgctgaagcgtttctggggcacccagtgacaaatgcagttatcaccgtcccagcatactttaacgatagccagaggcaggctacaaaagacgctggagtgattgcagggctgaacgtactgagaataatcaacgaaccgaccgccgctgccattgcctatgggctcgataaggggggtcaaggggagagacacgtgctgatatttgatttaggtggcggaacgtttgatgtgtctatcctgaccatagatgacgggatattcgaagttaaggcgacggctggcgatacgcatcttgggggagaggactttgacaataggctcgtatcccattttgtcgaggagttcaaacggaagcacaagaaagacataagccagaacaagcgggctgtgcgaaggctaagaaccgcatgcgaacgcgcaaaaagaactctctcgtcaagcacgcaagccaatctggaaatcgactcactttacgagggaattgacttctataccagcattactcgcgcaaggttcgaggagctatgtgccgacctgtttcgcggtacgctggaaccagtggaaaaggccctgcgagacgcgaaaatggacaaagccaagattcacgatatcgtgctggtgggcggaagcacccgaattcctaaagtccagagactgctccaggattatttcaatggaagagatctgaacaaatccatcaatcccgatgaagccgttgcatacggggctgctgtccaggctgccatactgatgggagataagagcgaaaaagtccaagatttgctcttgctggatgtggcacccctttccctgggccttgaaacagctggtggtgtcatgacagcacttatcaagcgcaacagcacgatcccaaccaaacagactcagattttcaccacctattccgacaatcagccgggtgtcctgattcaggtgtacgagggcgagagagctatgactaaagataataaccttctgggccgattcgatctcacaggcatccccccagccccaaggggcgtgccccaaatcgaggtgacctttgacattgatgccaacggcatcctcaatgttaccgccacagataaaagcaccgggaaagtgaataaaattaccatcaccaatgacaaaggcaggctatccaaggaagaaatcgaacgtatggtactggatgcagagaaatataaagccgaggatgaagtccaacgagagaagattgctgctaaaaacgctctagaaagctacgcgttcaatatgaagtctgtcgtttccgacgaaggtctgaaaggtaaaatatccgaatcagacaagaataaaatcctcgacaaatgtaatgaactgctgtcctggctggaggttaatcagctcgctgaaaaggatgagttcgatcacaaacgaaaagagctcgagcagatgtgtaaccccattatcacaaaactgtaccagggcggatgtaccgggcctgcctgcgggaccggatacgtaccagggagacccgcaacaggccctaccatcgaagaggttgattag

SEQ ID NO: 157060 - DNA, 699 bp, Artificial Sequence
  derived and/or modified sequence
gccaaaggcattgcgattgggatcgatttgggaacaacatactcatgcgttggtgtttttcagcacggaaaggtcgagatcattgctaacgatcaaggcaatcgcactacgcccagttacgtggcattcaccgacaccgagaggctcattggcgacgctggggtgatcgccggactgaacgtgctcaggattatcaacgaacctactgctgccgctattgcctatggcttggacaaaggcggacagggcgagagacacgtgctcatcttcgacctcggagggggtacatttgatgtgtccatcttgactatagacgacggaatctttgaggttaaagccactgccggtgatactcatttgggcggtgaggacttcgataatagactggtatcccacttcgtggaagagttcaagcggaaacacaagaaggacatatctcagaacaagcgcgctgtcaggcggttgcggactgcctgcgagcgagccaaaagaaccctgagctcctcaacccaagccaacctggagattgactctctctacgaaggcattgatttctatacgagtatcacaagagctcgattcgaagagctctgtgccgatctgttccgtggcaccctggaaccggtcgagaagggagcccctcctgcaagtcctaggtgcagtggctgcttcagaaccacttcaatggacgtgatctag

SEQ ID NO: 157061 - DNA, 699 bp, Artificial Sequence
  derived and/or modified sequence
gcaaagggtatcgccattggaatcgatcttggaactacatattcctgcgtgggcgtgtttcagcacggcaaggtggaaatcattgccaatgatcaaggtaaccggacaacaccctcttacgtggcctttactgatacagagagacttatcggcgatgctggcgtcatagccggtctgaatgtgttaagaatcataaacgaacctacagctgcagcgattgcatacggcctggacaagggcggtcagggagaaaggcatgtgctcatatttgatttggggggtggcacctttgatgtttccatcctcacgatcgacgatgggattttcgaagtgaaagctacggcaggggatacacacctcggcggagaggacttcgacaatcggctcgtgagtcactttgtcgaagagtttaaacgaaagcacaagaaagacatatcgcagaataaaagggcggtgagacggcttcgtactgcctgcgagcgagccaagcggacactcagctcctcaacccaggcaaacttggaaattgattccctctatgagggaattgacttttatacttccatcactagagctaggttcgaggaactgtgtgcagacctgttccgaggcacattggaaccagttgaaaaaggtgctcctcctgctagcccccgttgtagcggctgcttccggaccacatctatggacgtcatctag

SEQ ID NO: 157062 - DNA, 1926 bp, Artificial Sequence
  derived and/or modified sequence
atggccacagctaaagggatcgcaatagggattgacctcgggacaacctattcttgcgtcggcgtttttcaacacggaaaggttgaaataattgctaatgatcaaggcaaccggactactcccagctatgtggctttcacagacaccgaacggctgattggggacgcagcaaaaaaccaagttgcaatgaatccccagaacactgtcttcgacgccaagcgattgatagggaggaagtttaacgatcctgtggtgcaggccgacatgaagctgtggcccttccaggtgattaatgagggtgggaagccaaaggtgctagtatcctacaaaggggaaaataaggccttctatcctgaggagatctcgtcaatggtgctgacgaaacttaaagagacggctgaggcctttctcggccacccggtcacaaacgcagtcatcacagtgccggcttattttaacgacagtcagaggcaagcaactaaagatgcaggagtcatcgctggcctcaatgtcctacgaatcattaacgaaccgactgccgctgcaatagcttatgggctggacaaaggaggtcagggcgagcgccacgtgctgattttcgaccttgggggtggcaccttcgatgtgtctatcctcacgatcgatgacggcatattcgaggtgaaggccacagccggagatacacacctcggaggggaagacttcgataatcggcttgtgagccatttcgtcgaggaattcaagagaaaacacaaaaaagatatctctcagaacaaacgggcagtgcgaaggttgaggactgcttgcgaaagagcaaaaagaactttatcttcatccacccaagctaacttggagattgattcactatacgagggcatcgatttctacacaagtatcacacgcgcacgcttcgaagagctttgcgcagacctcttccggggaaccctggaaccagtggagaaagcccttagggatgccaagatggacaaagctaaaatacatgatatcgtgcttgttggcggaagtactaggattcccaaagtacagaggcttctgcaggactactttaacggacgcgatctgaacaaaagcatcaaccctgatgaggcagttgcatacggtgccgcagttcaagctgcaatcctcatgggcgataagtctgagaaggtacaggatcttcttttactcgacgttgccccacttagcttggggttagaaacggcagggggagtcatgactgccctgattaaacggaacagtacgattcctaccaaacagacacagattttcacgacttatagcgacaaccagcccggagtgctcattcaagtgtacgaaggcgagagggcgatgacaaaggataataacctgttgggcaggtttgacctcacaggcatcccccctgccccaaggggggtcccacagatcgaggtcacatttgacatcgatgcgaatggaattctgaacgtcactgctaccgacaaatccacaggcaaggtaaacaagatcaccatcaccaatgacaagggtcggctatcaaaggaagagatagagcgaatggtgcttgatgccgaaaagtataaggccgaagatgaggtacagcgcgagaaaatcgccgcaaagaatgccctggagagctacgcctttaatatgaaaagtgtggtgtccgacgagggcctgaagggcaagatcagtgagagcgataaaaataagattttggacaagtgtaatgagttgctcagttggcttgaagtaaaccaacttgcagagaaggacgaattcgaccacaagcgcaaggagctggagcagatgtgtaatcctataattactaagctctaccagggtggctgcaccggccctgcctgtggcacaggctacgtccccggaagacccgctaccggaccgaccattgaggaggtggattag

SEQ ID NO: 157063 - DNA, 1599 bp, Artificial Sequence
  derived and/or modified sequence
atggctacggccaagggcatagccatcggcatcgatctgggaacgacatacagctgcgtgggggtgtttcagcatggtaaggtggaaattatagcaaatgatcaggggaatcggacaaccccctcttacgtggctttcaccgacaccgaacgactgatcggagacgccgctaaaaaccaggtcgccatgaatcctcaaaacactgtgttcgacgccaagcggctaattggtcgcaaattcaacgaccctgttgtgcaggcagacatgaagctgtggccctttcaggttattaacgagggcggaaaaccaaaagtgctggtatcatataagggcgaaaataaggcattctaccctgaggagatttcgagcatggtgctgaccaaattgaaggagacagcagaagccttccttggccaccccgtcacaaatgccgtcattactgtcccagcatacttcaatgattcgcagcggcaggcaacaaaagacgccggtgtgatcgctggtctaaacgtcctgcgcattattaacgagcctacagcagctgccattgcctatgggctcgacaagggagggcagggcgagcggcacgtactgatctttgacttgggtgggggaactttcgatgtgagtatccttacaatcgacgacgggatctttgaagtgaaggctaccgcaggagacacacacctcggcggagaagacttcgataacagacttgttagtcactttgtagaagaatttaagcgcaagcataagaaagatattagccagaataaacgcgcagtgagacggctgcgaaccgcctgtgaacgagccaagcgtaccctgtcaagctcaacacaggccaacttggaaattgattcgctatatgaaggcattgacttctatacctccatcacccgggctcgatttgaggagctctgcgcagatctctttagagggacactggaacccgtggaaaaagcactgcgtgacgcaaaaatggacaaggcgaagatacacgacattgtcctggtggggggtagcactaggattcctaaggttcagagactattacaggactatttcaatggcagagacctcaacaagtcaatcaaccccgacgaggcagtggcctatggcgcagccgtacaagccgctatactgatgggggataaatcagagaaggttcaggatctcctgctgttggacgtggcaccactgagtctgggacttgagaccgctgggggagttatgactgcccttataaagaggaactcgaccatccctactaagcagacacagatttttacaacctacagcgacaaccagccaggcgtccttattcaggtctatgagggtgaacgcgcaatgacaaaagacaataacttgctgggtcggttcgacttaaccgggatccctccggctcccaggggcgtgccacagatagaggtcactttcgatattgacgccaacgggattctgaacgtcaccgcaactgacaagagcaccggcaaggttaataaaatcacgatcacaaatgacaaaggcagactctctaaggaggaaatagagcggatggtgttggacgcagagaaatacaaggctgaagacgtgtag

SEQ ID NO: 157064 - DNA, 699 bp, Artificial Sequence
  derived and/or modified sequence
gctaaaggaatcgccattggtatcgatctcggcaccacctactcctgcgtcggcgtgtttcaacatggtaaagtcgagattattgctaacgaccagggcaatcgcacgacaccgtcttacgtggcctttaccgacaccgaacgcctcattggagatgccggagtaatcgccggtctgaacgtgctgagaatcatcaacgaaccgactgcagccgcaatcgcctatgggttggacaagggagggcagggcgagcgccatgttctgatcttcgatttaggaggaggcacctttgacgtttccattttaactatcgatgacgggattttcgaagtgaaggcaaccgccggtgacacccacctcggcggagaggatttcgataatagactagtgtctcacttcgtggaggagtttaaacgaaaacataagaaagatatttcacagaataaacgagccgtccgcaggctgcgcacagcctgcgaacgggctaaaagaaccctcagctcctctacacaggccaacctcgagattgacagtctgtacgaggggatcgacttctacacctccattacacgagcacgcttcgaggagctttgtgccgatctctttagaggaactttggagcccgtggaaaagggagctcctcccgcatcccccagatgctccggatgttttaggaccacgtctatggacgttatttag

SEQ ID NO: 157065 - DNA, 699 bp, Artificial Sequence
  derived and/or modified sequence
gccaaagggatcgctatcggtatcgacctcggaaccacatatagctgtgttggtgttttccagcatggcaaggtggagatcattgctaacgaccaaggtaataggacaacaccctcttatgtggctttcactgatacagagcgtctcataggggacgcgggtgtcatagcagggctgaacgtcctcagaattatcaatgagcccacggcagcggctatagcttatggtcttgataaaggcggacagggcgagaggcacgtgctgatttttgacctggggggaggaacattcgacgtcagtattttgactattgatgatgggattttcgaagtcaaggcgactgcgggagacacccacctgggaggggaagactttgacaatcgcctcgttagtcacttcgtagaggagtttaagcgaaagcacaaaaaagatattagtcagaacaaaagagctgtaaggagactgagaactgcatgtgagcgagctaaaaggactttgtcttcgtcgacacaggcaaatctagagatcgacagcctctacgaagggattgacttctacaccagcatcacaagggcccgttttgaagagctctgcgccgatctgttcagagggacactcgaacctgtggagaaaggggctcctcccgcttctccccgttgctcaggatgtttccgcacaacatccatggacgtgatttag

SEQ ID NO: 157066 - DNA, 1761 bp, Artificial Sequence
  derived and/or modified sequence
atggccaccgccaagggcatcgccatcggcatcgacctgggcaccacctacagctgcgtgggcgtgttccagcacggcaaggtggagatcatcgccaacgaccagggcaacagaaccacccccagctacgtggccttcaccgacaccgagagactgatcggcgacgccgccaagaaccaggtggccatgaacccccagaacaccgtgttcgacgccaagagactgatcggcagaaagttcaacgaccccgtggtgcaggccgacatgaagctgtggcccttccaggtgatcaacgacagccagagacaggccaccaaggacgccggcgtgatcgccggcctgaacgtgctgagaatcatcaacgagcccaccgccgccgccatcgcctacggcctggacaagggcggccagggcgagagacacgtgctgatcttcgacctgggcggcggcaccttcgacgtgagcatcctgaccatcgacgacggcatcttcgaggtgaaggccaccgccggcgacacccacctgggcggcgaggacttcgacaacagactggtgagccacttcgtggaggagttcaagagaaagcacaagaaggacatcagccagaacaagagagccgtgagaagactgagaaccgcctgcgagagagccaagagaaccctgagcagcagcacccaggccaacctggagatcgacagcctgtacgagggcatcgacttctacaccagcatcaccagagccagattcgaggagctgtgcgccgacctgttcagaggcaccctggagcccgtggagaaggccctgagagacgccaagatggacaaggccaagatccacgacatcgtgctggtgggcggcagcaccagaatccccaaggtgcagagactgctgcaggactacttcaacggcagagacctgaacaagagcatcaaccccgacgaggccgtggcctacggcgccgccgtgcaggccgccatcctgatgggcgacaagagcgagaaggtgcaggacctgctgctgctggacgtggcccccctgagcctgggcctggagaccgccggcggcgtgatgaccgccctgatcaagagaaacagcaccatccccaccaagcagacccagatcttcaccacctacagcgacaaccagcccggcgtgctgatccaggtgtacgagggcgagagagccatgaccaaggacaacaacctgctgggcagattcgacctgaccggcatcccccccgcccccagaggcgtgccccagatcgaggtgaccttcgacatcgacgccaacggcatcctgaacgtgaccgccaccgacaagagcaccggcaaggtgaacaagatcaccatcaccaacgacaagggcagactgagcaaggaggagatcgagagaatggtgctggacgccgagaagtacaaggccgaggacgaggtgcagagagagaagatcgccgccaagaacgccctggagagctacgccttcaacatgaagagcgtggtgagcgacgagggcctgaagggcaagatcagcgagagcgacaagaacaagatcctggacaagtgcaacgagctgctgagctggctggaggtgaaccagctggccgagaaggacgagttcgaccacaagagaaaggagctggagcagatgtgcaaccccatcatcaccaagctgtaccagggcggctgcaccggccccgcctgcggcaccggctacgtgcccggcagacccgccaccggccccaccatcgaggaggtggactag

SEQ ID NO: 157067 - DNA, 1926 bp, Artificial Sequence
  derived and/or modified sequence
atggccaccgccaagggcatcgccatcggcatcgacctgggcaccacctacagctgcgtgggcgtgttccagcacggcaaggtggagatcatcgccaacgaccagggcaacagaaccacccccagctacgtggccttcaccgacaccgagagactgatcggcgacgccgccaagaaccaggtggccatgaacccccagaacaccgtgttcgacgccaagagactgatcggcagaaagttcaacgaccccgtggtgcaggccgacatgaagctgtggcccttccaggtgatcaacgagggcggcaagcccaaggtgctggtgagctacaagggcgagaacaaggccttctaccccgaggagatcagcagcatggtgctgaccaagctgaaggagaccgccgaggccttcctgggccaccccgtgaccaacgccgtgatcaccgtgcccgcctacttcaacgacagccagagacaggccaccaaggacgccggcgtgatcgccggcctgaacgtgctgagaatcatcaacgagcccaccgccgccgccatcgcctacggcctggacaagggcggccagggcgagagacacgtgctgatcttcgacctgggcggcggcaccttcgacgtgagcatcctgaccatcgacgacggcatcttcgaggtgaaggccaccgccggcgacacccacctgggcggcgaggacttcgacaacagactggtgagccacttcgtggaggagttcaagagaaagcacaagaaggacatcagccagaacaagagagccgtgagaagactgagaaccgcctgcgagagagccaagagaaccctgagcagcagcacccaggccaacctggagatcgacagcctgtacgagggcatcgacttctacaccagcatcaccagagccagattcgaggagctgtgcgccgacctgttcagaggcaccctggagcccgtggagaaggccctgagagacgccaagatggacaaggccaagatccacgacatcgtgctggtgggcggcagcaccagaatccccaaggtgcagagactgctgcaggactacttcaacggcagagacctgaacaagagcatcaaccccgacgaggccgtggcctacggcgccgccgtgcaggccgccatcctgatgggcgacaagagcgagaaggtgcaggacctgctgctgctggacgtggcccccctgagcctgggcctggagaccgccggcggcgtgatgaccgccctgatcaagagaaacagcaccatccccaccaagcagacccagatcttcaccacctacagcgacaaccagcccggcgtgctgatccaggtgtacgagggcgagagagccatgaccaaggacaacaacctgctgggcagattcgacctgaccggcatcccccccgcccccagaggcgtgccccagatcgaggtgaccttcgacatcgacgccaacggcatcctgaacgtgaccgccaccgacaagagcaccggcaaggtgaacaagatcaccatcaccaacgacaagggcagactgagcaaggaggagatcgagagaatggtgctggacgccgagaagtacaaggccgaggacgaggtgcagagagagaagatcgccgccaagaacgccctggagagctacgccttcaacatgaagagcgtggtgagcgacgagggcctgaagggcaagatcagcgagagcgacaagaacaagatcctggacaagtgcaacgagctgctgagctggctggaggtgaaccagctggccgagaaggacgagttcgaccacaagagaaaggagctggagcagatgtgcaaccccatcatcaccaagctgtaccagggcggctgcaccggccccgcctgcggcaccggctacgtgcccggcagacccgccaccggccccaccatcgaggaggtggactag

SEQ ID NO: 157068 - DNA, 1599 bp, Artificial Sequence
  derived and/or modified sequence
atggccaccgccaagggcatcgccatcggcatcgacctgggcaccacctacagctgcgtgggcgtgttccagcacggcaaggtggagatcatcgccaacgaccagggcaacagaaccacccccagctacgtggccttcaccgacaccgagagactgatcggcgacgccgccaagaaccaggtggccatgaacccccagaacaccgtgttcgacgccaagagactgatcggcagaaagttcaacgaccccgtggtgcaggccgacatgaagctgtggcccttccaggtgatcaacgagggcggcaagcccaaggtgctggtgagctacaagggcgagaacaaggccttctaccccgaggagatcagcagcatggtgctgaccaagctgaaggagaccgccgaggccttcctgggccaccccgtgaccaacgccgtgatcaccgtgcccgcctacttcaacgacagccagagacaggccaccaaggacgccggcgtgatcgccggcctgaacgtgctgagaatcatcaacgagcccaccgccgccgccatcgcctacggcctggacaagggcggccagggcgagagacacgtgctgatcttcgacctgggcggcggcaccttcgacgtgagcatcctgaccatcgacgacggcatcttcgaggtgaaggccaccgccggcgacacccacctgggcggcgaggacttcgacaacagactggtgagccacttcgtggaggagttcaagagaaagcacaagaaggacatcagccagaacaagagagccgtgagaagactgagaaccgcctgcgagagagccaagagaaccctgagcagcagcacccaggccaacctggagatcgacagcctgtacgagggcatcgacttctacaccagcatcaccagagccagattcgaggagctgtgcgccgacctgttcagaggcaccctggagcccgtggagaaggccctgagagacgccaagatggacaaggccaagatccacgacatcgtgctggtgggcggcagcaccagaatccccaaggtgcagagactgctgcaggactacttcaacggcagagacctgaacaagagcatcaaccccgacgaggccgtggcctacggcgccgccgtgcaggccgccatcctgatgggcgacaagagcgagaaggtgcaggacctgctgctgctggacgtggcccccctgagcctgggcctggagaccgccggcggcgtgatgaccgccctgatcaagagaaacagcaccatccccaccaagcagacccagatcttcaccacctacagcgacaaccagcccggcgtgctgatccaggtgtacgagggcgagagagccatgaccaaggacaacaacctgctgggcagattcgacctgaccggcatcccccccgcccccagaggcgtgccccagatcgaggtgaccttcgacatcgacgccaacggcatcctgaacgtgaccgccaccgacaagagcaccggcaaggtgaacaagatcaccatcaccaacgacaagggcagactgagcaaggaggagatcgagagaatggtgctggacgccgagaagtacaaggccgaggacgtgtag

SEQ ID NO: 157069 - protein, 729 aa, Artificial Sequence
  derived and/or modified sequence
MGKKYKNIVLLKGLEVINDYHFRMVKSLLSNDLKLNLKMREEYDKIQIADLMEEKFRGDAGLGKLIKIFEDIPTLEDLAETLKKEKLKVKGPALSRKRKKEVDATSPAPSTSSTVKTEGAEATPGAQKRKKSTKEKAGPKGSKVSEEQTQPPSPAGAGMSTAMGRSPSPKTSLSAPPNSSSTENPKTVAKCQVTPRRNVLQKRPVIVKVLSTTKPFEYETPEMEKKIMFHATVATQTQFFHVKVLNTSLKEKFNGKKIIIISDYLEYDSLLEVNEESTVSEAGPNQTFEVPNKIINRAKETLKIDILHKQASGNIVYGVFMLHKKTVNQKTTIYEIQDDRGKMDVVGTGQCHNIPCEEGDKLQLFCFRLRKKNQMSKLISEMHSFIQIKKKTNPRNNDPKSMKLPQEQRQLPYPSEASTTFPESHLRTPQMPPTTPSSSFFTKKSEDTISKMNDFMRMQILKEGSHFPGPFMTSIGPAESHPHTPQMPPSTPSSSFLTTLKPRLKTEPEEVSIEDSAQSDLKEVMVLNATESFVYEPKEQKKMFHATVATENEVFRVKVFNIDLKEKFTPKKIIAIANYVCRNGFLEVYPFTLVADVNADRNMEIPKGLIRSASVTPKINQLCSQTKGSFVNGVFEVHKKNVRGEFTYYEIQDNTGKMEVVVHGRLTTINCEEGDKLKLTCFELAPKSGNTGELRSVIHSHIKVIKTRKNKKDILNPDSSMETSPDFFF

SEQ ID NO: 157070 - DNA, 2190 bp, Artificial Sequence
  derived and/or modified sequence
atgggcaagaagtataaaaatattgtcctcctcaaggggctcgaggttataaatgactatcatttcaggatggtgaaatctctgctgtcgaacgacctgaaactgaacctgaagatgagagaggagtatgacaagatacagattgcagaccttatggaggaaaagttcaggggtgacgcaggattaggtaaactcattaaaatctttgaggatattcccacacttgaggatctggccgaaaccctcaaaaaggagaagttgaaggtcaagggtccagcgttatctcggaagcgcaagaaagaagttgatgccacttccccagctccgtctacctccagcacagtgaagacggagggcgctgaagctacaccaggtgcccagaaacgaaaaaagtctacaaaggagaaagcaggtccaaaaggctctaaagtttcagaagagcagacgcaacctcctagcccagccggcgctgggatgtccaccgcaatgggtcgatctccaagccctaaaactagtctctccgctcctcctaacagctcctccaccgagaaccctaagactgtggctaaatgtcaggtcaccccacgccgtaacgtgttacagaaacgccctgtaatcgtcaaagttttgagtactacaaaacctttcgagtacgagacacctgaaatggagaagaaaataatgtttcacgccactgtagctacacagactcagttctttcacgtgaaggtgctgaatacctccctgaaggaaaagttcaacggtaaaaaaataatcatcattagtgactatttggagtacgactctctcctcgaagttaacgaggagtctacagtcagtgaagccggtccaaaccaaacctttgaagtcccaaataagataatcaaccgcgccaaggagacgttgaaaatagatatcctgcataagcaggcaagcgggaacatcgtgtatggcgtgttcatgcttcacaaaaagaccgtcaaccagaagaccaccatttatgaaattcaggacgaccggggtaaaatggacgtggtagggacaggtcaatgtcataatattccctgcgaggagggagacaaactgcagctcttctgcttcaggctgaggaaaaaaaatcagatgtcaaaactaattagcgaaatgcacagttttattcagattaaaaaaaagactaatccccgaaataacgatccgaaaagcatgaaactgcctcaggaacaacgccagcttccctacccatccgaggcctctactacatttccggagtctcaccttaggacacctcagatgcctcctaccacgcccagttcttctttcttcaccaaaaagtcagaagacacaattagtaagatgaacgacttcatgcgaatgcagatactgaaggagggttcccacttcccagggccatttatgacaagcatcggccctgcagaatctcacccccacacgccccagatgcccccttccacaccttcctccagctttttgaccaccctgaagccgaggctgaaaaccgagcccgaggaggtgtcaattgaagattccgcccagtcggacttaaaggaagtcatggtgttgaacgccaccgaatccttcgtctacgagccaaaagagcagaaaaaaatgttccacgcaactgttgcaactgagaatgaggtcttcagggtaaaagtctttaatattgacctcaaggagaagttcacgcctaagaagattatcgcgatagccaattacgtgtgccgtaacggctttttggaggtatatccttttacattggtggccgacgtgaacgccgatcgtaacatggagatccccaaaggcctgatacggtcagcatctgttacacctaaaatcaaccagctatgctcacagactaaaggaagcttcgtgaacggagtgttcgaggtgcataagaaaaatgtccgcggcgaatttacttactatgaaatccaagacaacaccgggaaaatggaggtggtcgtgcacggacggctgaccaccattaattgcgaggaaggcgacaaactcaagctgacatgttttgagcttgctccaaaatcgggaaacaccggagaactaagaagcgtaatacatagccatattaaggtgatcaaaactagaaaaaataaaaaggatattctgaacccggacagcagtatggaaacctcacctgattttttcttctag

SEQ ID NO: 157071 - DNA, 2190 bp, Artificial Sequence
  derived and/or modified sequence
atgggtaaaaagtacaagaacattgtgctgttgaaggggctggaggtcatcaacgactatcatttcagaatggttaagagtctgttgtctaatgatctgaagctgaacctgaagatgcgagaagagtatgacaagatccagatagctgaccttatggaggagaagttccggggagatgccggcttaggtaagttaatcaaaatattcgaagatattcctacgttggaagatctggcagaaacccttaagaaggaaaagctcaaagtgaaaggccctgccctgtcacgcaagcggaaaaaagaggtggatgccactagcccagctcctagcacctcttccactgtgaaaacggaaggtgctgaggcgacacccggcgcccagaaacgcaagaaatctaccaaagaaaaagcagggcccaaagggtccaaggtttccgaggagcaaacacagcctccaagccccgcaggagcaggtatgtccactgccatggggcggagtccatctcccaaaacgagcctgagcgccccccccaattcttcgagtactgaaaatcctaagaccgtggccaaatgccaggtcacacctaggagaaacgtgctgcagaagcgccctgtcatcgtcaaagtcctgagtactactaaaccatttgagtatgaaacacccgaaatggaaaagaaaattatgtttcatgctactgtggctacacagacccagtttttccacgtgaaagttctgaacacctcattgaaggagaaatttaatgggaaaaaaattatcatcatctctgattatcttgagtacgattccctgctggaggttaacgaagagtctaccgtctcagaggccggtccaaatcagacctttgaggtgccaaataagatcattaaccgggcaaaggagactcttaagatcgatatcctgcacaaacaggcatccggtaacatagtgtacggcgttttcatgctccacaaaaagacggtcaatcagaagaccacaatctacgaaattcaggatgaccggggcaagatggatgtggtgggaacgggccagtgccataatatcccctgtgaggagggggataagctgcagctgttctgctttcgccttaggaagaaaaatcagatgagtaaactgatctctgaaatgcatagtttcattcagataaaaaagaaaaccaatccacggaacaacgatcccaaatctatgaagctgcctcaggagcagcggcaactcccttatcctagtgaggcttccacaactttccctgagtcccacttacgcacgccacagatgccacccaccactccatcttcttccttctttacgaaaaaatccgaagatacaatttcaaagatgaatgacttcatgaggatgcagattctgaaagaaggaagccatttccccggccctttcatgacgtctattggaccagccgaaagtcatcctcatacgcctcagatgcctccttctactcccagctcatcattcctgaccaccctcaagcccaggctgaagacagagccagaagaggtgagcatcgaggactccgcccaaagcgatctcaaggaggtgatggtcctgaatgcaacagagtcttttgtgtacgaaccgaaagaacaaaaaaagatgttccacgctacggtggctaccgaaaacgaggttttccgcgtgaaggtgttcaacattgatcttaaggaaaaatttaccccaaagaagatcattgctattgccaattatgtatgccgtaatgggtttttagaggtttatcctttcactctggtggcagatgtgaatgccgatcgtaacatggagatccctaaggggttaatccggtccgccagcgtgaccccaaaaattaaccaattgtgttctcagacaaagggctccttcgtgaatggcgtgtttgaagtacacaagaagaatgtacggggggaatttacatattatgagatccaggacaacacgggaaagatggaagtggtagtgcacggaaggcttactaccatcaattgtgaggagggagataaactgaaacttacctgctttgagctggcacccaagtctggcaacacaggagagcttcgatctgtgatccatagccatatcaaagtgatcaagacacgtaaaaataagaaggacattctgaatccagactcatccatggagacatctcccgacttctttttttag

SEQ ID NO: 157072 - DNA, 2731 bp, Artificial Sequence
  derived and/or modified sequence
gtttcctactccattttctctggggcaatagcagaataggagcaagccagcactagtcagctaactaagtgactcaaccaaggccttttttccttgttatctttgcagatacttcattttcttagcgtttctggagattacaacatcctgcggttccgtttctgggaactttactgatttatctcccccctcacacaaataagcattgattcctgcatttctgaagatctcaagatctggactactgttgaaaaaatttccagtgaggctcacttatgtctgtaaagatgggaaaaaaatacaagaacattgttctactaaaaggattagaggtcatcaatgattatcattttagaatggttaagtccttactgagcaacgatttaaaacttaatttaaaaatgagagaagagtatgacaaaattcagattgctgacttgatggaagaaaagttccgaggtgatgctggtttgggcaaactaataaaaattttcgaagatataccaacgcttgaagacctggctgaaactcttaaaaaagaaaagttaaaagtaaaaggaccagccctatcaagaaagaggaagaaggaagtggatgctacttcacctgcaccctccacaagcagcactgtcaaaactgaaggagcagaggcaactcctggagctcagaaaagaaaaaaatcaaccaaagaaaaggctggacccaaagggagtaaggtgtccgaggaacagactcagcctccctctcctgcaggagccggcatgtccacagccatgggccgttccccatctcccaagacctcattgtcagctccacccaacagttcttcaactgagaacccgaaaacagtggccaaatgtcaggtaactcccagaagaaatgttctccaaaaacgcccagtgatagtgaaggtactgagtacaacaaagccatttgaatatgagaccccagaaatggagaaaaaaataatgtttcatgctacagtggctacacagacacagttcttccatgtgaaggttttaaacaccagcttgaaggagaaattcaatggaaagaaaatcatcatcatatcagattatttggaatatgatagtctcctagaggtcaatgaagaatctactgtatctgaagctggtcctaaccaaacgtttgaggttccaaataaaatcatcaacagagcaaaggaaactctgaagattgatattcttcacaaacaagcttcaggaaatattgtatatggggtatttatgctacataagaaaacagtaaatcagaagaccacaatctacgaaattcaggatgatagaggaaaaatggatgtagtggggacaggacaatgtcacaatatcccctgtgaagaaggagataagctccaacttttctgctttcgacttagaaaaaagaaccagatgtcaaaactgatttcagaaatgcatagttttatccagataaagaaaaaaacaaacccgagaaacaatgaccccaagagcatgaagctaccccaggaacagcgtcagcttccatatccttcagaggccagcacaaccttccctgagagccatcttcggactcctcagatgccaccaacaactccatccagcagtttcttcaccaagaaaagtgaagacacaatctccaaaatgaatgacttcatgaggatgcagatactgaaggaagggagtcattttccaggaccgttcatgaccagcataggcccagctgagagccatccccacactcctcagatgcctccatcaacaccaagcagcagtttcttaaccacgttgaaaccaagactgaagactgaacctgaagaagtttccatagaagacagtgcccagagtgacctcaaagaagtgatggtgctgaacgcaacagaatcatttgtatatgagcccaaagagcagaagaaaatgtttcatgccacagtggcaactgagaatgaagtcttccgagtgaaggtttttaatattgacctaaaggagaagttcaccccaaagaagatcattgccatagcaaattatgtttgccgcaatgggttcctggaggtatatcctttcacacttgtggctgatgtgaatgctgaccgaaacatggagatcccaaaaggattgattagaagtgccagcgtaactcctaaaatcaatcagctttgctcacaaactaaaggaagttttgtgaatggggtgtttgaggtacataagaaaaatgtaaggggtgaattcacttattatgaaatacaagataatacagggaagatggaagtggtggtgcatggacgactgaccacaatcaactgtgaggaaggagataaactgaaactcacctgctttgaattggcaccgaaaagtgggaataccggggagttgagatctgtaattcatagtcacatcaaggtcatcaagaccaggaaaaacaagaaagacatactcaatcctgattcaagtatggaaacttcaccagactttttcttctaaaatctggatgtcattgacgataatgtttatggagataaggtctaagtgcctaaaaaaatgtacatatacctggttgaaatacaacactatacatacacaccaccatatatactagctgttaatcctatggaatggggtattgggagtgcttttttaatttttcatagtttttttttaataaaatggcatattttgcatctacaacttctataatttgaaaaaataaataaacattatcttttttgtgaaaggaa

SEQ ID NO: 157073 - DNA, 2704 bp, Artificial Sequence
  derived and/or modified sequence
ggcaatagcagaataggagcaagccagcactagtcagctaactaagtgactcaaccaaggccttttttccttgttatctttgcagatacttcattttcttagcgtttctggagattacaacatcctgcggttccgtttctgggaactttactgatttatctcccccctcacacaaataagcattgattcctgcatttctgaagatctcaagatctggactactgttgaaaaaatttccagtgaggctcacttatgtctgtaaagatgggaaaaaaatacaagaacattgttctactaaaaggattagaggtcatcaatgattatcattttagaatggttaagtccttactgagcaacgatttaaaacttaatttaaaaatgagagaagagtatgacaaaattcagattgctgacttgatggaagaaaagttccgaggtgatgctggtttgggcaaactaataaaaattttcgaagatataccaacgcttgaagacctggctgaaactcttaaaaaagaaaagttaaaagtaaaaggaccagccctatcaagaaagaggaagaaggaagtggatgctacttcacctgcaccctccacaagcagcactgtcaaaactgaaggagcagaggcaactcctggagctcagaaaagaaaaaaatcaaccaaagaaaaggctggacccaaagggagtaaggtgtccgaggaacagactcagcctccctctcctgcaggagccggcatgtccacagccatgggccgttccccatctcccaagacctcattgtcagctccacccaacagttcttcaactgagaacccgaaaacagtggccaaatgtcaggtaactcccagaagaaatgttctccaaaaacgcccagtgatagtgaaggtactgagtacaacaaagccatttgaatatgagaccccagaaatggagaaaaaaataatgtttcatgctacagtggctacacagacacagttcttccatgtgaaggttttaaacaccagcttgaaggagaaattcaatggaaagaaaatcatcatcatatcagattatttggaatatgatagtctcctagaggtcaatgaagaatctactgtatctgaagctggtcctaaccaaacgtttgaggttccaaataaaatcatcaacagagcaaaggaaactctgaagattgatattcttcacaaacaagcttcaggaaatattgtatatggggtatttatgctacataagaaaacagtaaatcagaagaccacaatctacgaaattcaggatgatagaggaaaaatggatgtagtggggacaggacaatgtcacaatatcccctgtgaagaaggagataagctccaacttttctgctttcgacttagaaaaaagaaccagatgtcaaaactgatttcagaaatgcatagttttatccagataaagaaaaaaacaaacccgagaaacaatgaccccaagagcatgaagctaccccaggaacagcgtcagcttccatatccttcagaggccagcacaaccttccctgagagccatcttcggactcctcagatgccaccaacaactccatccagcagtttcttcaccaagaaaagtgaagacacaatctccaaaatgaatgacttcatgaggatgcagatactgaaggaagggagtcattttccaggaccgttcatgaccagcataggcccagctgagagccatccccacactcctcagatgcctccatcaacaccaagcagcagtttcttaaccacgttgaaaccaagactgaagactgaacctgaagaagtttccatagaagacagtgcccagagtgacctcaaagaagtgatggtgctgaacgcaacagaatcatttgtatatgagcccaaagagcagaagaaaatgtttcatgccacagtggcaactgagaatgaagtcttccgagtgaaggtttttaatattgacctaaaggagaagttcaccccaaagaagatcattgccatagcaaattatgtttgccgcaatgggttcctggaggtatatcctttcacacttgtggctgatgtgaatgctgaccgaaacatggagatcccaaaaggattgattagaagtgccagcgtaactcctaaaatcaatcagctttgctcacaaactaaaggaagttttgtgaatggggtgtttgaggtacataagaaaaatgtaaggggtgaattcacttattatgaaatacaagataatacagggaagatggaagtggtggtgcatggacgactgaccacaatcaactgtgaggaaggagataaactgaaactcacctgctttgaattggcaccgaaaagtgggaataccggggagttgagatctgtaattcatagtcacatcaaggtcatcaagaccaggaaaaacaagaaagacatactcaatcctgattcaagtatggaaacttcaccagactttttcttctaaaatctggatgtcattgacgataatgtttatggagataaggtctaagtgcctaaaaaaatgtacatatacctggttgaaatacaacactatacatacacaccaccatatatactagctgttaatcctatggaatggggtattgggagtgcttttttaatttttcatagtttttttttaataaaatggcatattttgcatctacaacttctataatttgaaaaaataaataaacattatcttttttgtgaaa

SEQ ID NO: 157074 - DNA, 2190 bp, Artificial Sequence
  derived and/or modified sequence
atgggcaagaagtacaagaacatcgtgctgctgaagggcctggaggtgatcaatgactaccacttcaggatggtgaagagcctgctgagcaatgacctgaagctgaacctgaagatgagggaggagtatgacaagatccagattgctgacctgatggaggagaagttcagaggagatgctggcctgggcaagctgatcaagatctttgaggacatccccaccctggaggacctggccgagaccctgaagaaggagaagctgaaggtgaagggccctgccctgagcaggaagaggaagaaggaggtggatgccaccagccctgcccccagcaccagcagcacagtgaagacagaaggagctgaggccacccctggggcccagaagaggaagaagagcaccaaggagaaggccggccccaagggcagcaaggtgtctgaggagcagacccagccccccagccctgctggagctggcatgagcacagccatgggccgcagccccagccccaagaccagcctgagcgccccacccaacagcagcagcacagagaaccccaagacagtggccaagtgccaggtgacccccaggagaaatgtgctgcagaagaggcctgtgattgtgaaggtgctgagcaccaccaagccctttgaatatgagaccccagagatggagaagaagatcatgttccacgccaccgtggccacccagacccagttcttccacgtgaaggtgctgaacaccagcctgaaggagaagttcaacgggaagaagatcatcatcatcagtgactacctggagtatgacagcctgctggaggtgaatgaggagagcacagtgtctgaggccggccccaaccagacctttgaggtgcccaacaagatcatcaacagagccaaggagaccctgaagattgacatcctgcacaagcaggccagcggcaacatcgtgtatggagtcttcatgctgcacaagaagacagtgaaccagaagaccaccatctatgagatccaggatgaccggggcaagatggatgtggtgggcaccggccagtgccacaacatcccctgtgaggagggggacaagctgcagctgttctgcttccggctgaggaagaagaaccagatgagcaagctgatcagcgagatgcacagcttcatccagatcaagaagaagaccaaccccagaaataatgaccccaagtccatgaagctgccccaggagcagaggcagctgccctaccccagcgaggccagcaccaccttccctgagagccacctgcggaccccccagatgccacccaccacccccagcagcagcttcttcaccaagaagtctgaggacaccatcagcaagatgaatgacttcatgaggatgcagatcctgaaggagggcagccacttccctggccccttcatgaccagcatcggccctgctgagagccacccccacaccccccagatgccacccagcacccccagcagcagcttcctgaccaccctgaagccccggctgaagacagagcctgaggaggtgtccattgaggacagcgcccagagcgacctgaaggaggtgatggtgctgaatgccacagagagctttgtgtatgagcccaaggagcagaagaagatgtttcatgccaccgtggccacagaaaatgaggtgttccgggtgaaggtgttcaacatcgacctgaaggagaagttcacccccaagaagatcatcgccatcgccaactacgtgtgcagaaatggcttcctggaggtgtaccccttcaccctggtggctgatgtgaatgctgacaggaacatggagatccccaagggcctcatccgcagcgcctctgtgacccccaagatcaaccagctgtgcagccagaccaagggcagctttgtgaatggagtgtttgaggtgcacaagaagaatgtgcggggggagttcacctactatgagatccaggacaacacaggcaagatggaggtggtggtgcacggccgcctgaccaccatcaactgtgaggagggggacaagctgaagctgacctgctttgagctggcccccaagagcggcaacacaggagagctgcggagcgtcatccacagccacatcaaggtgatcaagaccaggaagaacaagaaggacatcctgaacccagacagctccatggagaccagcccagacttcttcttctag

SEQ ID NO: 157075 - DNA, 2190 bp, Artificial Sequence
  derived and/or modified sequence
atgggcaagaagtacaagaacatcgtgctgctgaagggcctggaggtgataaatgattatcactttcgtatggtgaaatctcttctgtccaacgatctgaagctgaacctgaagatgagggaggagtacgataaaatccaaattgccgatttgatggaggagaaatttagaggggatgcgggactgggaaagctaattaagatcttcgaagatatacctactctggaagatctggcagagacactgaagaaggaaaaacttaaagtcaaggggcccgcactgtccagaaagcgcaagaaggaagttgacgccacttcccccgcaccatccacaagttccacagttaaaactgagggcgctgaagctactccaggcgctcagaagcgcaagaaatcgacaaaagagaaagccgggcccaaggggagcaaagtgagcgaagaacagacgcagccacccagccctgctggcgctgggatgtcaactgccatggggcggagtccctccccaaaaaccagcctttcagccccccctaactctagttccacagaaaaccccaagaccgtggcaaaatgtcaagtgactcccagacgtaatgttctgcagaaaagacccgttatcgttaaggtgttaagtacaactaagcctttcgagtacgagacacctgaaatggagaagaaaatcatgttccatgcaaccgtggccactcagacccagttttttcatgtcaaggtcctaaatactagcctgaaagaaaagttcaacggcaaaaaaatcatcattataagtgactatctcgagtatgatagcctcctagaggtcaatgaggaatccactgtgtccgaggctggccccaatcaaaccttcgaggttcctaacaaaatcataaaccgcgcaaaagagactcttaaaattgacatcttgcacaagcaagccagcggcaacatcgtctatggagtctttatgctccacaagaagactgtgaaccaaaagacaaccatatatgagatccaggacgacagggggaaaatggatgtcgtggggaccggccaatgccacaatatcccttgcgaggagggcgataaactgcaactcttttgtttcagactgcgaaagaaaaaccagatgtcaaagcttattagtgaaatgcatagctttattcagatcaaaaagaaaaccaaccctagaaacaatgatcccaagagcatgaaactgcctcaggaacagagacagctgccataccccagcgaagcctccaccacatttcccgagtctcacctgcgaacaccacaaatgccccccaccactcccagcagttcattcttcacaaagaaatccgaagatactattagcaagatgaacgatttcatgagaatgcagatactgaaagaagggagccactttcctggacccttcatgactagcatagggccagccgaaagccatccccatactcctcagatgcctcccagcactccctcaagctcttttttgacaacgctgaaacctcgccttaagactgaacctgaggaggtgagtatagaagattccgcccagtctgatctcaaagaggtcatggtcctgaacgcgacagaatcatttgtgtacgaacctaaggaacaaaaaaagatgtttcacgctaccgttgcaactgagaatgaggtttttagagtcaaggtatttaacattgacctgaaagaaaaatttactcccaaaaagatcatcgccattgctaactatgtgtgccgaaacgggttcttggaagtgtatccctttactctcgtcgcagacgtcaacgccgaccgcaacatggaaatccctaaaggtcttatccgaagcgcctccgtgacgccgaagatcaatcagctctgctcccagacaaaggggtcatttgtcaatggtgtcttcgaagttcacaaaaagaacgtgcgtggcgagtttacatattacgaaatccaggacaatacaggcaaaatggaagtagtggtgcacggccgcctcacgaccatcaattgtgaggagggagacaaactcaaactgacctgttttgaactcgctccaaagtcaggcaatacaggcgaattgaggagcgtaatccacagtcacattaaggtgattaaaacaagaaagaataaaaaggatatcctgaaccccgactcttccatggagactagtccagactttttcttctag

SEQ ID NO: 157076 - DNA, 2190 bp, Artificial Sequence
  derived and/or modified sequence
atgggcaagaagtacaagaacatcgtgctgctgaagggcctggaggtgataaatgactaccacttccgcatggtaaagagtttgttgagcaacgacctcaagttgaatcttaagatgcgagaagaatacgataaaatccagatcgccgatctgatggaggaaaagttcagaggcgacgctgggctggggaaactaattaagattttcgaggatatccccacccttgaagacctcgcagaaacactgaagaaggaaaagttaaaagtgaagggtccagccctctccagaaagcgtaaaaaagaagttgatgctactagccccgccccctccacctcatccaccgtgaagacagagggggctgaggccacccctggggcccagaagcgtaaaaagagcacgaaagagaaagcaggaccaaagggatctaaggtctccgaggagcagacacagcccccatctcctgcgggcgcgggtatgagtactgcaatgggaaggtcgccgtcccctaagacttccctgagcgcccctcctaattcctccagtactgagaacccgaaaaccgtggccaagtgtcaggtgaccccccggcggaatgtgttacagaagaggccagtcatagtgaaagttttgagcaccacgaagccttttgagtacgaaacaccggaaatggagaagaaaatcatgtttcatgcaactgttgctacccaaacccagttctttcatgtgaaagttctgaacacttcactcaaggagaaattcaatggcaagaagatcatcattatcagtgactacctggaatatgacagtctgctggaagtgaatgaggagtccaccgtttccgaggccggacccaaccaaacgttcgaagtaccaaacaaaattataaacagggcaaaggagacgctcaaaatcgacattctgcataaacaggcttctggaaatatcgtatacggcgtatttatgctgcacaaaaagacagtcaaccagaaaacaacaatttacgaaatccaggacgatcgggggaaaatggacgtcgtggggactgggcaatgtcataatatcccatgcgaggaaggcgacaagctccagctcttttgcttcagactacggaaaaaaaaccagatgtctaaactgatttctgaaatgcacagttttattcagatcaagaagaagaccaatccacgcaataacgatcccaagtcaatgaagctgccccaggagcagagacagctgccttacccctcagaagcctctacaacgttccccgagagtcaccttaggacaccacagatgccgcctacaaccccctcaagctccttctttactaagaagagcgaggataccatcagcaaaatgaatgacttcatgaggatgcaaatattgaaggagggttcgcatttccccggtccattcatgacttcaattggccccgccgaaagtcacccacataccccacagatgcctcctagcacccccagcagcagtttccttactacactgaaaccaagattaaagactgagcccgaagaggtaagcatcgaagatagcgcccaaagcgacctgaaggaagtgatggtgctcaatgcaaccgaaagtttcgtgtacgaaccaaaggaacagaagaagatgtttcatgctacagtcgctacggaaaatgaagtttttagggtgaaggttttcaatatagacttgaaagagaaatttactccgaagaaaataattgcaatcgctaactacgtgtgtcggaacgggtttctggaagtgtatcctttcacactcgtagccgacgtgaatgccgaccgcaacatggagatccctaagggattgatacgttctgcgtcggttacaccaaagataaatcagttatgtagtcagaccaaagggtcctttgtgaacggcgtgtttgaagtacataagaagaacgtgcggggcgagtttacatattatgagattcaagataataccggaaaaatggaggtggtcgtgcatggtcggctgaccaccattaactgtgaggaaggagacaagcttaagctcacctgctttgaactcgcacccaaatcgggcaacactggagagttgaggagtgttatccactctcacattaaagtgattaagacacgcaagaataagaaagatatattaaatcctgacagcagcatggagacctcgccagactttttcttttag

SEQ ID NO: 157077 - DNA, 2190 bp, Artificial Sequence
  derived and/or modified sequence
atgggcaagaagtacaagaacatcgtgttactgaagggacttgaggtaatcaacgactaccattttagaatggttaaatcgctgctgtcaaacgatttgaaactgaacctgaagatgcgcgaggagtacgataagatccagattgctgacctgatggaggaaaagtttcggggtgatgctggcttgggtaagctgatcaaaatatttgaggacataccgacacttgaggacctcgctgagacactgaagaaggaaaagctcaaggtgaagggacctgcacttagtaggaaaagaaagaaagaagtggatgctacatcacccgctccatcaacatcttcaactgtgaaaactgagggggctgaagcgacccccggagcgcagaagaggaagaagagcacaaaagagaaagcgggacctaagggttccaaggtttcagaggagcagacccaacccccaagtcctgcaggcgcagggatgtccaccgctatggggaggagccccagccctaaaacctcactgtctgctccccctaacagctccagtaccgagaacccaaagaccgtagctaagtgccaggtgaccccacgcagaaatgtactccagaagcggcctgttattgtgaaagtgctgtccacgacaaagccgtttgaatacgagactcccgaaatggagaagaagattatgtttcatgctaccgtcgccacccagacacaattctttcacgtgaaggtattgaacacctccctgaaggaaaaatttaatggaaagaagattatcatcatctccgattaccttgaatacgacagtctcttggaagtaaatgaagagtcaactgtctccgaagccggtcccaatcagacgtttgaagtcccaaacaagattatcaatcgtgcgaaggaaaccctgaagatcgacatcctccataaacaagcatccgggaacatcgtgtacggagtcttcatgctccacaaaaagacagtgaatcaaaagaccacgatctatgagatacaagacgacagggggaaaatggacgtggtgggaactgggcaatgccataacattccttgtgaagagggggataagctgcagttgttttgcttcaggctacgcaaaaagaaccagatgtcaaagctgatctcagagatgcactctttcatccagataaaaaaaaaaaccaaccccaggaacaatgacccaaagtctatgaaactgccacaggagcagcgccagttgccttatcccagtgaagcaagcactacctttccagagagccacctgaggaccccccagatgcccccaacaacgccatcatcatccttttttactaaaaagtcggaggacacgatctcaaaaatgaatgacttcatgagaatgcaaatcctcaaagagggatctcacttcccgggacctttcatgacctccatcggccctgctgagtcgcacccacacaccccgcagatgcccccttcaacgcctagcagcagctttctgaccactctgaaaccccgtctgaaaaccgagcctgaggaggtatccatcgaggactcggcccaatctgatcttaaagaggttatggtgctcaacgctaccgaatcatttgtctacgaacctaaagagcaaaaaaagatgtttcacgcaacagtagcgacggagaacgaagtgttccgagttaaggtgtttaacatagatctgaaggagaagtttacaccgaaaaaaatcatcgcgattgctaactatgtatgcagaaacggctttctggaagtatacccatttaccctggtggccgacgtaaacgcggataggaatatggagatacctaaaggcctcatccgaagcgcttcagtcacacctaaaataaaccaactctgctctcagaccaagggaagctttgtcaatggtgtgtttgaggtgcacaagaaaaacgttcggggtgaattcacttattacgagatccaggataacaccgggaaaatggaggtcgtcgtgcatgggcgactgaccactattaattgcgaggaaggtgacaagctgaaattgacctgttttgagctagcaccaaaaagcggtaacactggcgagttgcggagcgtcatacatagtcacattaaagtcatcaagaccaggaagaacaaaaaggatattctgaatcccgacagctccatggaaacttctccagactttttcttctag

SEQ ID NO: 157078 - DNA, 2190 bp, Artificial Sequence
  derived and/or modified sequence
atgggcaagaaatacaaaaacatcgtgctcctgaaggggctggaagtcatcaatgactaccactttcgaatggtgaaatcccttctgagtaatgaccttaaattgaacctgaaaatgcgggaggaatacgataagatccagattgccgatctgatggaagagaagttccggggtgacgccggactggggaaactcatcaaaatctttgaagacattccaactcttgaggacctggccgagacattgaagaaggagaaattgaaagtgaaaggcccagccctgagtagaaagagaaaaaaggaggttgacgcgacgtcaccggcaccctcaactagctcgacagtgaagacagaaggtgcagaagcgaccccgggagcacaaaaacggaagaaaagtactaaagaaaaggccggaccaaaaggttcgaaggtgagcgaagagcaaacccagcccccatctccagccggagcgggaatgagcactgccatggggcgatcaccttcacctaaaactagtctgtcagcacctcctaatagctcttcaacagagaacccaaagacggtggcaaaatgtcaagtgacccccagaagaaacgtgttacaaaagcgcccagtgattgttaaggtactctccaccactaagcctttcgagtatgagactcccgaaatggagaaaaaaatcatgttccatgccactgtcgctactcagacacagtttttccacgtaaaggtgctgaatactagcctgaaagaaaaatttaatggcaaaaagattatcattattagtgactatcttgaatatgacagtctgctcgaggtgaacgaagaatcaactgtttccgaagccggacccaatcagacttttgaagttccaaataaaattataaatcgcgctaaagagacactcaaaattgatattctgcacaaacaggcctctggcaatatcgtttatggcgtgttcatgctccacaagaagaccgtgaaccagaagactaccatctatgagatccaggatgataggggcaagatggacgttgttggaacaggacagtgtcataatataccctgcgaggagggcgacaaactccagctgttctgcttcaggctgaggaaaaagaatcaaatgtcaaagttgatcagcgagatgcattcatttatccaaattaaaaaaaaaacgaaccctaggaataatgaccccaagtccatgaaactcccccaggagcagcgacaactgccttatcctagtgaggcatctaccacttttcctgagtcccatctgcgaactccccaaatgcctcctacgacccctagcagctcattcttcacaaagaaaagcgaggacacgataagcaagatgaatgactttatgcgcatgcagatcctcaaggagggcagtcatttccctggcccttttatgacaagtatcgggccagctgagtcacatcctcatactccacaaatgcctccctccactccctcatcaagctttttaacgactttaaagccaagattaaaaaccgaaccggaggaggtgtctattgaggacagcgcccagtcagacctgaaggaagtgatggtgctgaacgccacagaaagttttgtttatgaacccaaagagcagaagaagatgttccatgccacggtagccaccgaaaacgaggtcttcagagtcaaggtcttcaacatcgatctgaaggagaaatttacccctaaaaagattatagccattgccaactacgtgtgtcgtaatggctttcttgaggtctacccattcaccctagttgcagacgtcaatgcagaccggaacatggagatccctaagggcttgattagaagtgcctcggtcacgcctaagatcaaccagctttgctctcaaacaaaaggcagttttgtgaatggcgtctttgaggtgcataagaagaacgtaaggggcgagttcacctattatgagattcaagacaacacaggcaaaatggaggttgtggtgcacgggaggctaaccacaatcaactgtgaagaaggagataagctcaaactgacttgctttgagcttgccccaaagagtggcaacaccggcgaacttaggtctgtgattcattcacacattaaagttattaagactcggaaaaacaagaaggatattctaaatcccgacagctcgatggagacgtccccggatttctttttttag

SEQ ID NO: 157079 - DNA, 2190 bp, Artificial Sequence
  derived and/or modified sequence
atgggcaagaagtacaagaacatcgtgctgctgaagggcctggaggtgatcaacgactaccacttcagaatggtgaagagcctgctgagcaacgacctgaagctgaacctgaagatgagagaggagtacgacaagatccagatcgccgacctgatggaggagaagttcagaggcgacgccggcctgggcaagctgatcaagatcttcgaggacatccccaccctggaggacctggccgagaccctgaagaaggagaagctgaaggtgaagggccccgccctgagcagaaagagaaagaaggaggtggacgccaccagccccgcccccagcaccagcagcaccgtgaagaccgagggcgccgaggccacccccggcgcccagaagagaaagaagagcaccaaggagaaggccggccccaagggcagcaaggtgagcgaggagcagacccagccccccagccccgccggcgccggcatgagcaccgccatgggcagaagccccagccccaagaccagcctgagcgccccccccaacagcagcagcaccgagaaccccaagaccgtggccaagtgccaggtgacccccagaagaaacgtgctgcagaagagacccgtgatcgtgaaggtgctgagcaccaccaagcccttcgagtacgagacccccgagatggagaagaagatcatgttccacgccaccgtggccacccagacccagttcttccacgtgaaggtgctgaacaccagcctgaaggagaagttcaacggcaagaagatcatcatcatcagcgactacctggagtacgacagcctgctggaggtgaacgaggagagcaccgtgagcgaggccggccccaaccagaccttcgaggtgcccaacaagatcatcaacagagccaaggagaccctgaagatcgacatcctgcacaagcaggccagcggcaacatcgtgtacggcgtgttcatgctgcacaagaagaccgtgaaccagaagaccaccatctacgagatccaggacgacagaggcaagatggacgtggtgggcaccggccagtgccacaacatcccctgcgaggagggcgacaagctgcagctgttctgcttcagactgagaaagaagaaccagatgagcaagctgatcagcgagatgcacagcttcatccagatcaagaagaagaccaaccccagaaacaacgaccccaagagcatgaagctgccccaggagcagagacagctgccctaccccagcgaggccagcaccaccttccccgagagccacctgagaaccccccagatgccccccaccacccccagcagcagcttcttcaccaagaagagcgaggacaccatcagcaagatgaacgacttcatgagaatgcagatcctgaaggagggcagccacttccccggccccttcatgaccagcatcggccccgccgagagccacccccacaccccccagatgccccccagcacccccagcagcagcttcctgaccaccctgaagcccagactgaagaccgagcccgaggaggtgagcatcgaggacagcgcccagagcgacctgaaggaggtgatggtgctgaacgccaccgagagcttcgtgtacgagcccaaggagcagaagaagatgttccacgccaccgtggccaccgagaacgaggtgttcagagtgaaggtgttcaacatcgacctgaaggagaagttcacccccaagaagatcatcgccatcgccaactacgtgtgcagaaacggcttcctggaggtgtaccccttcaccctggtggccgacgtgaacgccgacagaaacatggagatccccaagggcctgatcagaagcgccagcgtgacccccaagatcaaccagctgtgcagccagaccaagggcagcttcgtgaacggcgtgttcgaggtgcacaagaagaacgtgagaggcgagttcacctactacgagatccaggacaacaccggcaagatggaggtggtggtgcacggcagactgaccaccatcaactgcgaggagggcgacaagctgaagctgacctgcttcgagctggcccccaagagcggcaacaccggcgagctgagaagcgtgatccacagccacatcaaggtgatcaagaccagaaagaacaagaaggacatcctgaaccccgacagcagcatggagaccagccccgacttcttcttctag

SEQ ID NO: 157080 - protein, 288 aa, Artificial Sequence
  derived and/or modified sequence
MSAPLDAALHALQEEQARLKMRLWDLQQLRKELGDSPKDKVPFSVPKIPLVFRGHTQQDPEVPKSLVSNLRIHCPLLAGSALITFDDPKVAEQVLQQKEHTINMEECRLRVQVQPLELPMVTTIQVMMSSQLSGRRVLVTGFPASLRLSEEELLDKLEIFFGKTRNGGGDVDVRELLPGSVMLGFARDGVAQRLCQIGQFTVPLGGQQVPLRVSPYVNGEIQKAEIRSQPVPRSVLVLNIPDILDGPELHDVLEIHFQKPTRGGGEVEALTVVPQGQQGLAVFTSESG

SEQ ID NO: 157081 - DNA, 867 bp, Artificial Sequence
  derived and/or modified sequence
atgagtgcaccgctggatgctgccctccacgccctccaagaagagcaagccagactcaagatgagactctgggatttgcagcaactaagaaaggagctcggcgacagtcctaaggacaaagtgccgttttccgttcctaagattcctctagtttttaggggacacactcagcaggaccctgaggtcccgaaatcccttgtgtctaacttaagaattcactgccccctgttggctgggtccgctctgattaccttcgatgacccaaaggtcgctgagcaagttctccagcagaaagagcatacaatcaacatggaagagtgcagattgcgagtccaagtgcagccactggaactccctatggtgacaactatccaggttatgatgtctagccagttgtccggtcggagagtcttagttaccggatttcccgcgagtctacggctgagcgaggaggagctcctggacaaattagagatcttcttcggaaagacaagaaacggaggtggcgatgtggatgtgcgggagctcctgcctgggagcgttatgctgggatttgcgagagatggggtggcgcagcggttgtgccagatcggtcaattcacagtcccactcggtgggcagcaagtgcctctgcgagtctcgccatacgtaaatggggagattcagaaagcagagatcagatcccagcctgtcccacgctccgtgctagtcctgaatattccagatatcctcgatggtccagagctgcacgacgtgttggaaatccacttccaaaaacctactagaggcggcggggaggtggaggcactgacagtagtcccccaaggtcaacagggcctggccgtgttcacctctgagagtggatag

SEQ ID NO: 157082 - DNA, 1232 bp, Artificial Sequence
  derived and/or modified sequence
gtgagcgccagaaggcagggatttcacggaaatgaaagtggaagcaaacagcctgcgagcagagcctcctgaggtgtatttcgggtcttgctggggctgagagagaccacagccctttggggggtacaaacaagagttcagttgctgtgaattctgccactgtgcccagctctgaagcctcagctcttgccaaacagacccgagacccatgtcagccccactggatgccgccctccacgcccttcaggaggagcaggccagactcaagatgaggctgtgggacctgcagcagctgagaaaggagctcggggactcccccaaagacaaggtcccattttcagtgcccaagatccccctggtattccgaggacacacccagcaggacccggaagtgcctaagtctttagtttccaatttgcggatccactgccctctgcttgcgggctctgctctgatcacctttgatgaccccaaagtggctgagcaggtgctgcaacaaaaggagcacacgatcaacatggaggagtgccggctgcgggtgcaggtccagcccttggagctgcccatggtcaccaccatccaggtgatgatgtccagccagttgagtggccggagggtgttggtcactggatttcctgccagcctcaggctgagtgaggaggagctgctggacaagctagagatcttctttggcaagactaggaacggaggtggcgatgtggacgttcgggagctactgccagggagtgtcatgctggggtttgctagggatggagtggctcagcgtctgtgccaaatcggccagttcacagtgccactgggtgggcagcaagtccctctgagagtctctccgtatgtgaacggggagatccagaaggctgagatcaggtcgcagccagttccccgctcggtactggtgctcaacattcctgatatcttggatggcccggagctgcatgacgtcctggagatccacttccagaagcccacccgcgggggcggggaggtagaggccctgacagtcgtaccccaaggacagcagggcctagcagtcttcacctctgagtcaggctaggggcctccccttctcatcctccccacccccccgccaaggttctcacactggcctgggcttgggtgcccatataggaggtctgtatgttcaccaacagtgcggaggggtcacacattgcaaaacactgcccagaacagtaaaaagagcctgcatgcca

SEQ ID NO: 157083 - DNA, 867 bp, Artificial Sequence
  derived and/or modified sequence
atgtctgcccccctggatgctgccctgcacgccctgcaggaggagcaggcccggctgaagatgaggctgtgggacctgcagcagctgaggaaggagctgggggacagccccaaggacaaggtgcccttctctgtgcccaagatccccctggtgttccggggccacacccagcaggaccctgaggtgcccaagagcctggtgagcaacctgcgcatccactgccccctgctggccggcagcgccctgatcacctttgatgaccccaaggtggccgagcaggtgctgcagcagaaggagcacaccatcaacatggaggagtgccgcctgcgggtgcaggtgcagcccctggagctgcccatggtgaccaccatccaggtgatgatgagcagccagctgtctggaagaagagtgctggtgacaggcttccctgccagcctgcggctgtctgaggaggagctgctggacaagctggagatcttcttcggcaagaccagaaatggaggaggagatgtggatgtgcgggagctgctgcccggctctgtgatgctgggctttgccagagatggagtggcccagaggctgtgccagatcggccagttcaccgtgcccctgggcggccagcaggtgcccctgcgggtgagcccctacgtgaatggagagatccagaaggccgagatccgcagccagcctgtgcccaggtctgtgctggtgctgaacatcccagacatcctggatggccctgagctgcatgatgtgctggagatccacttccagaagcccacccggggcggcggggaggtggaggccctgactgtggtgccccagggccagcagggcctggccgtgttcaccagcgagagcggctag

SEQ ID NO: 157084 - DNA, 867 bp, Artificial Sequence
  derived and/or modified sequence
atgagcgcccccctggacgccgccctgcacgccctgcaggaggagcaggccagactcaaaatgcgactctgggacttgcagcaactgaggaaagaactcggcgatagccccaaagataaggtacctttcagcgtgccgaagattccccttgtcttcagagggcatacacagcaggatcccgaggttccaaagtcattagtatctaacctcagaatccattgcccgttattggccggatctgcccttatcacgttcgatgaccccaaggtggccgaacaggtgctccagcagaaggaacatactatcaatatggaggagtgtaggctccgggtacaggttcagccgttggaactccccatggtcacaaccattcaggtgatgatgtccagccaattaagcggtcgtagagtccttgtcacggggttccccgcaagtttgcggttgagtgaagaggaattgttggacaaactcgaaatcttcttcggtaaaacccggaacgggggcggagacgtagatgttcgagaacttctgccagggagcgttatgttggggtttgcccgcgatggagtggctcagagattgtgccaaatcgggcaattcactgtgccgctgggaggccaacaagtacccctgagagtcagcccctacgtgaacggagagatccagaaggctgaaatcagatcccagcccgtccctaggtctgtattagtcttgaatattcctgacatcctggatggtcccgaattgcatgacgtcctcgaaatccactttcaaaaaccaacacgaggcggcggcgaagtggaagctctcacagtggtcccgcagggccaacaaggcctcgctgttttcacttctgagagcggatag

SEQ ID NO: 157085 - DNA, 867 bp, Artificial Sequence
  derived and/or modified sequence
atgtctgcccctctggacgctgccttgcacgccttgcaggaggagcaggcccgactcaagatgagactgtgggatcttcagcagctgcgaaaggaacttggggattctcccaaggacaaggtacctttcagcgttcccaagataccactggtgtttagggggcatacgcagcaggatccagaagtgccaaaatctctcgtcagcaaccttcggatccattgcccgctgctcgctggctcagccctcatcacgttcgacgaccctaaagtggccgagcaggtgctgcagcagaaagagcacacaattaacatggaagagtgtaggctacgagtccaggtgcaaccactggaactgcccatggtcactacgattcaagtcatgatgtctagtcagctctcgggacggagggtgctggtgactggctttcctgcgtccctgaggctgagcgaagaagagctgctcgacaaacttgagatcttctttgggaaaacccgtaacgggggaggagatgtggacgtgcgggagctgctccctggttctgtaatgttagggttcgctagggacggtgtcgcccaaagactgtgccaaattgggcagtttacggtgccactcgggggacagcaagtgccgctgcgagtgtcaccctacgtgaatggtgaaattcagaaggccgagatccggtctcaacctgtgcccaggagcgtgctagtgctgaatattcccgacattttggacggcccagagttacacgacgtgttggagattcatttccagaaacctacacgtgggggaggcgaggtcgaggctttgacagtcgtcccccaaggccagcagggcttagcggtgttcacaagcgagtctggttag

SEQ ID NO: 157086 - DNA, 867 bp, Artificial Sequence
  derived and/or modified sequence
atgagcgcccccctggacgccgccctgcacgccctgcaggaggagcaggccagactgaagatgagactgtgggacctgcagcagctgagaaaggagctgggcgacagccccaaggacaaggtgcccttcagcgtgcccaagatccccctggtgttcagaggccacacccagcaggaccccgaggtgcccaagagcctggtgagcaacctgagaatccactgccccctgctggccggcagcgccctgatcaccttcgacgaccccaaggtggccgagcaggtgctgcagcagaaggagcacaccatcaacatggaggagtgcagactgagagtgcaggtgcagcccctggagctgcccatggtgaccaccatccaggtgatgatgagcagccagctgagcggcagaagagtgctggtgaccggcttccccgccagcctgagactgagcgaggaggagctgctggacaagctggagatcttcttcggcaagaccagaaacggcggcggcgacgtggacgtgagagagctgctgcccggcagcgtgatgctgggcttcgccagagacggcgtggcccagagactgtgccagatcggccagttcaccgtgcccctgggcggccagcaggtgcccctgagagtgagcccctacgtgaacggcgagatccagaaggccgagatcagaagccagcccgtgcccagaagcgtgctggtgctgaacatccccgacatcctggacggccccgagctgcacgacgtgctggagatccacttccagaagcccaccagaggcggcggcgaggtggaggccctgaccgtggtgccccagggccagcagggcctggccgtgttcaccagcgagagcggctag

SEQ ID NO: 157087 - protein, 337 aa, Artificial Sequence
  derived and/or modified sequence
MRPTLLWSLLLLLGVFAAAAAAPPDPLSQLPAPQHPKIRLYNAEQVLSWEPVALSNSTRPVVYQVQFKYTDSKWFTADIMSIGVNCTQITATECDFTAASPSAGFPMDFNVTLRLRAELGALHSAWVTMPWFQHYRNVTVGPPENIEVTPGEGSLIIRFSSPFDIADTSTAFFCYYVHYWEKGGIQQVKGPFRSNSISLDNLKPSRVYCLQVQAQLLWNKSNIFRVGHLSNISCYETMADASTELQQVILISVGTFSLLSVLAGACFFLVLKYRGLIKYWFHTPPSIPLQIEEYLKDPTQPILEALDKDSSPKDDVWDSVSIISFPEKEQEDVLQTL

SEQ ID NO: 157088 - DNA, 1014 bp, Artificial Sequence
  derived and/or modified sequence
atgcgccccactctgttgtggtctttattgctgctgctcggtgtttttgcagccgcggccgcggccccgccggaccctctgtcacagcttccagccccccaacacccgaagatccgtctttacaatgccgagcaagttttgagttgggagccggttgccttgtccaatagcacccggcccgtggtgtatcaagtgcaatttaagtatactgattctaaatggtttacagcggacattatgtcaattggcgttaactgtacgcagattaccgctactgaatgcgattttacagctgcctcgcctagcgcaggtttcccgatggacttcaacgtgacacttcgcctgagagctgaactgggcgcactgcacagcgcttgggttacaatgccgtggtttcagcattaccgcaacgtcaccgtaggacctccagaaaacattgaggtaacgccaggggaaggaagcttaattatcaggttctcatcacccttcgatattgcagacaccagtacggcttttttttgttactacgtccactactgggagaagggcggtatccagcaggtgaagggcccattccggtccaattctatctcgctggataatctgaagccctctagggtttattgtcttcaagtgcaggcacagctcctatggaacaaatccaacatatttcgtgtgggacatctttctaatatttcatgttacgaaacaatggccgatgctagtactgaattgcagcaggttatcttgatctccgtcggaacattcagcctgttgtccgtcctggccggcgcctgcttctttctcgtacttaagtatcgaggacttattaagtattggtttcatactcctccttccatccctctgcagattgaggagtatctgaaagaccccacacagcccatcctggaggctcttgataaggattccagcccaaaggatgacgtatgggactctgtgtcaattatatcatttcccgaaaaggaacaggaggatgtgttacagactctgtag

SEQ ID NO: 157089 - DNA, 2221 bp, Artificial Sequence
  derived and/or modified sequence
gttgactggaggcggaggttgcagtgagccgagatcgccccactgcactccagcctggtgactccgtctcaaaaaaaaggggaggggggcgggggagagttgaaagcttaatatgtactttgggggctattaaagcaaacatttcgactaaaggggcgaatcctcgaattgtgcgatcaagcacccgagaggagagttggggggggtcaggaggggtgggggctccagggaaagcccgggggtctgggccggggtctcgcggggcccttccggaaggatcgcggcccccgaaggtgggcgtcccgcggggctccagtctccaggacgttccgggaggctccgcgctctgggaggccggctgcgtggggtccccgcgctgcagccgcagaggccccccagggccgcggttcccggagcgggaaagtcccgcgcgggggcggtggcctcgggggcgggacggggcgggggcgggggcgcgggcggccgagccgaatcccctccaccgggacgccccgctgctgctcgggaagaggcgggccctgcgcgccctgcgctcgccatggcggtttgggcggcgacgtgagcggctccgcggaccccgagcggggccccggccgcgacctgagccgccgccgagcgcccggggccatgcgaccgacgctgctgtggtcgctgctgctgctgctcggagtcttcgccgccgccgccgcggccccgccagaccctctttcccagctgcccgctcctcagcacccgaagattcgcctgtacaacgcagagcaggtcctgagttgggagccagtggccctgagcaatagcacgaggcctgttgtctaccaagtgcagtttaaatacaccgacagtaaatggttcacggccgacatcatgtccataggggtgaattgtacacagatcacagcaacagagtgtgacttcactgccgccagtccctcagcaggcttcccaatggatttcaatgtcactctacgccttcgagctgagctgggagcactccattctgcctgggtgacaatgccttggtttcaacactatcggaatgtgactgtcgggcctccagaaaacattgaggtgaccccaggagaaggctccctcatcatcaggttctcctctccctttgacatcgctgatacctccacggcctttttttgttattatgtccattactgggaaaaaggaggaatccaacaggtcaaaggccctttcagaagcaactccatttcattggataacttaaaaccctccagagtgtactgtttacaagtccaggcacaactgctttggaacaaaagtaacatctttagagtcgggcatttaagcaacatatcttgctacgaaacaatggcagatgcctccactgagcttcagcaagtcatcctgatctccgtgggaacattttcgttgctgtcggtgctggcaggagcctgtttcttcctggtcctgaaatatagaggcctgattaaatactggtttcacactccaccaagcatcccattacagatagaagagtatttaaaagacccaactcagcccatcttagaggccttggacaaggacagctcaccaaaggatgacgtctgggactctgtgtccattatctcgtttccggaaaaggagcaagaagatgttctccaaacgctttgaaccaaagcatgggcctagcccactggctccctggaagagatcaagccatcggagctgctagagttctgtctggactttccagagaccagtattcccttttgctgcctctaaaaggcctgtccctgcagacatgagagacagcaggtctcatgggggtgacaagctttttttttttttcttaaagaattttcaaaatcaaattccagaatgattttacggagatatcccaggaaaattaaggcttctcttaaacactaaaaaggcatgtaattgcttgttagcaaaatggatatgacacatctctgatacttttttcattattggttgggctgagcagtcagaagacctggtcgtcgtcttgactttggcaaatgagccggagccccttgggcaggtcacacaacctgtcccagcgagggacaccgagtggcccttcatgtacatccatggtgtgctggcttaaaatgtaattaatcttgtaaatatactcctagtaatttaagattttgtttttaaactggaaataaaagattgtatagtgcatgttttttaaagtcta

SEQ ID NO: 157090 - DNA, 1014 bp, Artificial Sequence
  derived and/or modified sequence
atgaggcccaccctgctgtggagcctgctgctgctgctgggcgtgtttgctgctgctgctgctgcccccccagaccccctgagccagctgcctgccccccagcaccccaagatccggctgtacaatgctgagcaggtgctgtcctgggagcctgtggccctgagcaacagcaccaggcctgtggtgtaccaggtgcagttcaagtacacagacagcaagtggttcaccgctgacatcatgagcattggagtgaactgcacccagatcacagccacagaatgtgacttcaccgctgccagccccagcgctggcttccccatggacttcaacgtgaccctgcggctgcgggcagagctgggcgccctgcacagcgcctgggtgaccatgccctggttccagcactacagaaatgtgacagtgggccccccagagaacatcgaggtgaccccaggagagggcagcctcatcatccgcttcagcagcccctttgatattgctgacaccagcacagccttcttctgctactacgtgcactactgggagaagggcggcatccagcaggtgaagggccccttccgcagcaacagcatcagcctggacaacctgaagcccagccgggtgtactgcctgcaggtgcaggcccagctgctgtggaacaagagcaacatcttccgggtgggccacctgagcaacatcagctgctatgagaccatggctgatgccagcacagagctgcagcaggtgatcctgatctctgtgggcaccttcagcctgctgtctgtgctggccggggcctgcttcttcctggtgctgaagtaccggggcctcatcaagtactggttccacaccccacccagcatccccctgcagatcgaggagtacctgaaggaccccacccagcccatcctggaggccctggacaaggacagcagccccaaggatgatgtgtgggacagcgtgtccatcatctccttccctgagaaggagcaggaggatgtgctgcagaccctgtag

SEQ ID NO: 157091 - DNA, 1014 bp, Artificial Sequence
  derived and/or modified sequence
atgcggcccaccctgctgtggagcctgctgctgctgctgggcgtgtttgccgctgccgcggcagcgcccccagatcctctgtcacaactgcctgctcctcagcatcccaaaatacgtttgtataatgctgagcaggtgctgtcttgggagccggttgcccttagtaatagcacgagacctgtagtataccaggtgcagttcaaatatactgactctaagtggttcacggcggacataatgtccataggcgtaaattgtacccaaataacagcaaccgagtgtgatttcacagcagcttcgccatctgccggatttcctatggattttaacgttacactcaggcttcgcgccgagctaggtgcactgcacagcgcatgggtaactatgccgtggtttcagcattacagaaacgtgaccgtaggtccccctgaaaatatagaagtcactcctggcgaaggctcactgattatcagattcagctctcccttcgatatcgcagacacatccaccgccttcttttgctattacgtgcactattgggagaagggagggatacagcaggttaaaggaccattcaggtctaacagcataagtctggacaacctgaaaccttccagggtgtactgtctacaggtacaggctcaacttctctggaataaatccaatatttttcgcgtgggacacttaagtaacatcagttgttacgagaccatggctgacgctagtaccgagctgcagcaagtgatcctgatatccgtcgggacgttcagtctgctatccgtccttgccggcgcctgcttctttctggtgctcaagtatcgggggttaatcaagtattggttccacaccccgccatccataccactgcaaattgaggaatacctaaaagatcctacgcagcccatcctcgaagccctggacaaggacagcagtccaaaggacgatgtttgggacagcgtctccataataagcttcccagagaaagaacaggaagacgtacttcagacactgtag

SEQ ID NO: 157092 - DNA, 1014 bp, Artificial Sequence
  derived and/or modified sequence
atgcgccctacattgctgtggtcactgctcttactgctcggcgttttcgctgcagctgctgctgccccacccgaccccctctcccagctcccagcgcctcagcacccaaaaattcggctctataacgctgagcaggtcttgtcatgggagcctgtagccctctcaaattccacacggccagtcgtttatcaggtgcagttcaaatatacagactccaaatggttcacagccgacatcatgagtatcggagtcaattgcacacaaataacggctaccgaatgcgacttcaccgcagcatcaccatctgctggcttcccgatggactttaacgtaacactgcgactgcgtgccgagttgggagccttgcattctgcctgggtgactatgccctggttccaacactatcggaacgttacagtgggcccacccgagaacattgaggtcacgccaggagaagggtccttgatcattcgctttagctctcctttcgatatagccgacacgtccaccgcattcttctgctactatgtgcactattgggagaaaggtgggatccaacaggtaaaagggcctttcaggtccaactctatctctttagataatctgaaaccgagcagggtgtactgcctccaggtccaggcccagctgctgtggaacaagtccaacatcttccgcgtcgggcacctatctaacatttcttgttatgagactatggctgatgccagcaccgaactacagcaggtaatcttaataagtgtgggcaccttttctctcttgtctgtgcttgccggtgcctgtttctttcttgtattgaagtataggggcctaatcaagtactggttccacacacccccaagcatcccattacagatcgaggaatatttaaaggatccaacacaacccatacttgaggcactcgacaaggactcttcacctaaagacgacgtttgggactccgtctctatcatttcctttcccgaaaaggagcaggaggacgtgctgcagactctgtag

SEQ ID NO: 157093 - DNA, 1014 bp, Artificial Sequence
  derived and/or modified sequence
atgagacccaccctgctgtggagcctgctgctgctgctgggcgtgttcgccgccgccgccgccgccccccccgaccccctgagccagctgcccgccccccagcaccccaagatcagactgtacaacgccgagcaggtgctgagctgggagcccgtggccctgagcaacagcaccagacccgtggtgtaccaggtgcagttcaagtacaccgacagcaagtggttcaccgccgacatcatgagcatcggcgtgaactgcacccagatcaccgccaccgagtgcgacttcaccgccgccagccccagcgccggcttccccatggacttcaacgtgaccctgagactgagagccgagctgggcgccctgcacagcgcctgggtgaccatgccctggttccagcactacagaaacgtgaccgtgggcccccccgagaacatcgaggtgacccccggcgagggcagcctgatcatcagattcagcagccccttcgacatcgccgacaccagcaccgccttcttctgctactacgtgcactactgggagaagggcggcatccagcaggtgaagggccccttcagaagcaacagcatcagcctggacaacctgaagcccagcagagtgtactgcctgcaggtgcaggcccagctgctgtggaacaagagcaacatcttcagagtgggccacctgagcaacatcagctgctacgagaccatggccgacgccagcaccgagctgcagcaggtgatcctgatcagcgtgggcaccttcagcctgctgagcgtgctggccggcgcctgcttcttcctggtgctgaagtacagaggcctgatcaagtactggttccacaccccccccagcatccccctgcagatcgaggagtacctgaaggaccccacccagcccatcctggaggccctggacaaggacagcagccccaaggacgacgtgtgggacagcgtgagcatcatcagcttccccgagaaggagcaggaggacgtgctgcagaccctgtag

SEQ ID NO: 157094 - protein, 662 aa, Artificial Sequence
  derived and/or modified sequence
MEPLVTWVVPLLFLFLLSRQGAACRTSECCFQDPPYPDADSGSASGPRDLRCYRISSDRYECSWQYEGPTAGVSHFLRCCLSSGRCCYFAAGSATRLQFSDQAGVSVLYTVTLWVESWARNQTEKSPEVTLQLYNSVKYEPPLGDIKVSKLAGQLRMEWETPDNQVGAEVQFRHRTPSSPWKLGDCGPQDDDTESCLCPLEMNVAQEFQLRRRQLGSQGSSWSKWSSPVCVPPENPPQPQVRFSVEQLGQDGRRRLTLKEQPTQLELPEGCQGLAPGTEVTYRLQLHMLSCPCKAKATRTLHLGKMPYLSGAAYNVAVISSNQFGPGLNQTWHIPADTHTEPVALNISVGTNGTTMYWPARAQSMTYCIEWQPVGQDGGLATCSLTAPQDPDPAGMATYSWSRESGAMGQEKCYYITIFASAHPEKLTLWSTVLSTYHFGGNASAAGTPHHVSVKNHSLDSVSVDWAPSLLSTCPGVLKEYVVRCRDEDSKQVSEHPVQPTETQVTLSGLRAGVAYTVQVRADTAWLRGVWSQPQRFSIEVQVSDWLIFFASLGSFLSILLVGVLGYLGLNRAARHLCPPLPTPCASSAIEFPGGKETWQWINPVDFQEEASLQEALVVEMSWDKGERTEPLEKTELPEGAPELALDTELSLEDGDRCKAKM

SEQ ID NO: 157095 - DNA, 1989 bp, Artificial Sequence
  derived and/or modified sequence
atggagcccctggtgacatgggtggttccactcctgttcttattcctactcagcaggcagggggcagcatgcaggacaagcgagtgctgcttccaggatccaccataccccgacgctgactcgggaagtgccagcgggccaagagacctcagatgctaccgcattagttcagaccgctacgaatgctcctggcagtacgagggccccacagccggtgtgtcacacttcctaaggtgctgcttgagtagtggccgctgttgctactttgccgccggtagcgccacccgactccagtttagcgaccaggctggggttagcgtcttgtataccgtgacactctgggttgagtcttgggctaggaaccaaactgaaaagtcacccgaggtaacactgcagctttacaacagtgtcaaatacgagcctccactgggcgacattaaggtcagcaagctggctggtcagttacgcatggagtgggagacgccggataaccaggtaggcgctgaggtgcagttccgccataggacccccagttccccttggaaactcggcgactgcggcccccaggacgacgacacggaatcttgtctgtgtccccttgagatgaatgttgcccaggagttccagcttcgcaggcggcagctgggtagccagggctcttcttggtcaaagtggagctcgcccgtttgtgtgccccccgagaaccctccacaaccgcaggtaagatttagcgtcgagcagcttggccaggacggacggcggcggctaactctgaaggagcagccaacccagctggaattgccggaggggtgccagggcctcgcaccgggcactgaggttacataccgcctccagctccatatgctcagttgcccctgtaaagctaaggccactcgcactctgcaccttggtaaaatgccgtatctcagcggcgctgcttacaacgtcgcagtaattagctccaatcagttcggccccggactgaatcagacatggcacattccagccgatacacacaccgaacccgtggcattaaatattagcgtcgggaccaatggcaccacaatgtactggcccgctcgtgcgcagagcatgacctactgcattgagtggcagccagtgggtcaagacggtggcctggccacctgctctttgactgccccccaggatcctgaccccgcaggtatggcaacctactcttggtcaagggagagcggggccatgggccaggaaaagtgctactatattactatattcgcgtctgcccaccctgagaaactgacactgtggtctacagtcctctccacctatcatttcggaggcaacgcctctgcggccggaacacctcaccatgttagtgtgaaaaaccacagcctcgatagcgtatcagtcgattgggcaccatctctactcagcacatgtcctggtgtgctgaaagagtacgtcgtgcgctgtagagacgaagacagcaagcaagtgagcgagcaccctgtgcagcccactgagactcaagtgacgcttagtggcctacgcgctggggtcgcgtacaccgtgcaagtgcgggccgataccgcatggctgcgaggagtatggagtcagccacagcgcttttcaatcgaggtgcaggtctccgattggcttatcttctttgcctcgctgggctcatttttgtccattttactggtcggggtgctaggctatttagggctgaaccgggccgccaggcatctatgtccccctctccctacaccctgcgccagtagcgcgatcgagttccctgggggtaaggagacttggcagtggataaatccagtcgatttccaggaggaagcttcgctccaggaggctctcgttgtggaaatgtcgtgggacaagggcgagagaacagaacccttggaaaagactgagttgcccgaaggagcacccgagcttgctttagatacagagctgtcgctcgaggatggggacagatgcaaagccaagatgtag

SEQ ID NO: 157096 - DNA, 1989 bp, Artificial Sequence
  derived and/or modified sequence
atggaaccactggtcacctgggtggtgccattgctcttccttttcctgctctcgagacagggggccgcgtgtcgcacttcagaatgttgttttcaagatccaccttacccagacgctgactcgggctcagcatcgggcccgcgcgacttgaggtgttatcgcatttcttccgatagatacgagtgttcgtggcaatacgagggccccacagccggcgtaagccatttcctgagatgttgcctcagttctggacgttgttgttattttgccgccggctctgctacacgactgcagttttcggaccaggcgggagtgagcgtcctttacacggtgaccctctgggtcgagagctgggcacgcaaccagacagagaagagccctgaggttactttgcagctctacaacagcgtgaagtacgagcctccgcttggcgacatcaaagttagcaaactggctggacagctgaggatggaatgggagactcctgataatcaggtcggcgcagaggtccagttccgtcacaggacaccttccagtccttggaagctaggcgattgtggcccccaagacgacgatacggagtcttgcttatgccccctcgagatgaacgtggcccaggaattccaactcaggcgcaggcagctcgggagtcaggggtcctcctggtcaaagtggtcctctcccgtgtgcgtgcctccggagaatccacctcagcctcaggtgagattttcagtggaacagctcggtcaggatggcagaaggcgactgacactcaaggagcaacctacccaactagaactgcctgaaggatgccaagggctggcccctggcactgaggtcacttaccgactgcaactgcacatgctgtcgtgcccctgcaaggccaaagctacccggaccctgcaccttggcaaaatgccttatctatccggggcggcctacaacgttgccgtcatctcatccaatcagttcggccctggcctgaatcagacatggcatattccagcagacactcatacagaacctgtagcgctcaacatcagcgttggtaccaatggcacgacaatgtattggccagccagagcacaaagtatgacttattgcatcgaatggcagccggtgggccaggacggcggcctggcaacctgcagcctgactgccccgcaggaccccgaccccgcagggatggccacatatagctggtcccgggaaagcggcgccatgggccaagaaaaatgttactatatcactatatttgcttctgcccaccccgagaagctgaccctgtggagtaccgtgctctcgacttaccattttgggggtaacgcctccgcagctgggactccccaccacgtgagtgtcaaaaatcatagcttggattcagtgagtgtggattgggcaccatcactgctgtccacttgccccggggttttgaaggaatatgtcgtcaggtgcagggatgaggactcaaaacaggtcagtgaacaccctgtacagccgactgagacgcaagtgactttgagcggcctgcgcgccggtgtggcctatacagtgcaggtcagggctgacaccgcgtggcttcgaggtgtttggtcccagcctcagagattctcaattgaggtgcaggtatcagactggctgatctttttcgcaagcctggggtccttcctgagcatcctgcttgttggagtcctgggatatctgggtttgaaccgtgctgccagacacctttgtcctcccctgcctaccccctgtgcctcatccgccattgagttccccggcgggaaagaaacatggcaatggattaaccccgtcgattttcaggaagaagcaagtctccaggaggccctggtggtcgaaatgtcatgggacaaaggagagagaacagaacccctagaaaaaacagaactcccagaaggtgcccctgagctcgcccttgacaccgagttgtccctggaggatggtgacaggtgcaaggccaagatgtag

SEQ ID NO: 157097 - DNA, 1989 bp, Artificial Sequence
  derived and/or modified sequence
atggagcccctggtgacctgggtggtgcccctgctcttcctgttcctgctgagccggcagggcgccgcctgcaggaccagcgagtgctgcttccaggaccccccctacccagatgctgacagcggcagcgccagcggcccccgggacctgcgctgctaccgcatcagcagtgacagatatgaatgttcctggcagtatgagggccccacagctggggtgagccacttcctgcgctgctgcctgagcagcggccgctgctgctactttgctgctggcagcgccacccggctgcagttcagtgaccaggccggcgtgtctgtgctgtacacagtgaccctgtgggtggagagctgggccaggaaccagacagagaagagccctgaggtgaccctgcagctgtacaacagcgtgaagtatgagccccccctgggggacatcaaggtgtccaagctggccggccagctgaggatggagtgggagaccccagacaaccaggtgggcgctgaggtgcagttccgccacaggacccccagcagcccctggaagctgggggactgtggcccccaggatgatgacacagagagctgcctgtgccccctggagatgaatgtggcccaggagttccagctgcggcggcggcagctgggcagccagggcagctcctggagcaagtggagcagccctgtgtgtgtgcccccagagaaccccccccagccccaggtgcgcttctctgtggagcagctgggccaggatggaagaagaaggctgaccctgaaggagcagcccacccagctggagctgcctgagggctgccagggcctggcccctggaacagaggtgacctaccgcctgcagctgcacatgctgagctgcccctgcaaggccaaggccaccaggaccctgcacctgggcaagatgccctacctgagcggggccgcctacaacgtggccgtcatcagcagcaaccagtttggacctggcctgaaccagacctggcacatcccagctgacacccacacagagcctgtggccctgaacatctctgtgggcaccaacggcaccaccatgtactggccagcccgggcccagagcatgacctactgcatcgagtggcagcctgtgggccaggacggcggcctggccacctgcagcctgacagccccccaggaccctgaccctgctggcatggccacctacagctggagccgggagagcggggccatgggccaggagaagtgctactacatcaccatctttgccagcgcccaccctgagaagctgaccctgtggagcacagtgctgagcacctaccactttggaggaaatgccagcgctgctggcaccccccaccacgtgtctgtgaagaaccacagcctggacagcgtgtctgtggactgggcccccagcctgctgagcacctgccctggggtgctgaaggagtatgtggtgcgctgcagagatgaggacagcaagcaggtgtctgagcaccctgtgcagcccacagagacccaggtgaccctgagcggcctgcgggccggcgtggcctacacagtgcaggtgcgggctgacacagcctggctgcggggcgtgtggagccagccccagcgcttcagcattgaggtgcaggtgtctgactggctgatcttctttgccagcctgggcagcttcctgagcatcctgctggtgggcgtgctgggctacctgggcctgaacagagctgcccggcacctgtgcccccccctgcccaccccctgtgccagcagcgccatcgagttccctgggggcaaggagacctggcagtggatcaaccctgtggacttccaggaggaggccagcctgcaggaggccctggtggtggagatgtcctgggacaagggggagaggacagagcccctggagaagacagagctgcctgagggcgcccctgagctggccctggacacagagctgagcctggaggatggagaccgctgcaaggccaagatgtag

SEQ ID NO: 157098 - DNA, 1989 bp, Artificial Sequence
  derived and/or modified sequence
atggagcccctggtgacctgggtggtgcccctgctgttcctgttcctgctgtcacgccagggtgctgcctgcaggacctctgagtgctgcttccaggatccaccgtaccccgacgccgactcgggctccgcctcgggaccaagggacctccgctgttaccgaattagcagcgatcgctatgaatgcagttggcaatatgagggccctactgctggggtgtctcattttctgagatgttgcctgtcctccggacgctgctgttatttcgccgcaggatctgcaacccgattgcagttcagcgaccaggccggagttagtgtgctatataccgtaactctctgggtggagtcctgggctagaaatcagaccgagaaatcacccgaagttacgcttcagttatacaactccgttaaatacgagcctccgttgggggatattaaggtcagcaagttggcgggccagcttcgtatggagtgggagacgcctgataatcaggtgggcgcagaagtccagttcaggcatagaacaccgtcctctccatggaagctcggcgattgcggcccccaggatgacgatacagagagttgcctgtgtcctctggagatgaacgtggcccaggagtttcagttacgccgaaggcagctggggtcgcaggggagttcctggtcaaagtggagttccccggtttgcgtgcccccagagaatcccccccagccccaggtgagattctcggtcgaacagctcgggcaggacgggcgtcgcaggttgactctgaaggaacagcctacccaactcgaactgcctgagggctgtcagggtttggccccagggaccgaagtgacctataggctacaacttcacatgttatcctgcccttgtaaggccaaagctactcgaactctccatctcgggaagatgccctatctgtctggcgcagcttacaatgtagctgtaatcagcagcaatcagtttggccccggcctgaatcaaacatggcatattccagctgacactcacaccgagccagtggccttgaacatctccgtgggcaccaatggcactactatgtattggcctgccagagctcagtcaatgacatattgtatagagtggcagccggtaggacaggatggagggctggctacctgctccctcaccgcgccccaggatcccgatccggctggaatggccacgtactcttggtctagagaatcaggcgctatgggccaggaaaaatgctattacattacaatcttcgcatccgcacatccagagaaattaacattgtggagcacagtgctgtccacttatcactttggtgggaacgctagcgcagccggaacaccacaccacgtgtctgtcaagaatcattccctggactctgtgtcggtagattgggccccctctctgttgagcacttgtcccggagtgttgaaggagtacgtggtacggtgcagagatgaggactcaaagcaggtaagtgagcaccctgtgcagcccactgagacacaggtcacactcagtgggcttagagctggggtggcttacaccgtgcaggttagggccgataccgcctggctcaggggcgtgtggagccagccgcagcggttcagtatcgaggttcaggtgagcgactggctgatcttttttgccagcttaggatcattcctttcgatactcctcgtcggagtactgggttatctaggactgaatagggccgcccgccatctttgcccgcctcttcctacaccttgcgcttctagcgccattgaatttcctggcggcaaggaaacctggcaatggattaatcccgtggatttccaagaggaagctagcctgcaggaggcactagtggtggagatgagctgggataagggcgaacgaactgagccattggaaaagacagagttacctgagggcgcacctgagctcgcccttgatacggaactttctctggaagacggcgatcgctgcaaggcgaagatgtag

SEQ ID NO: 157099 - DNA, 1989 bp, Artificial Sequence
  derived and/or modified sequence
atggagcccctggtgacctgggtggtgcccctgctgttcctgttccttctgagcagacagggggcggcttgccgtacatcagagtgctgctttcaagatccaccctacccagatgcagacagcgggtccgcgtccggaccaagagacctaagatgttaccggatctccagcgatagatatgagtgttcgtggcaatacgaggggccaacagcgggcgtgagccactttcttagatgctgcttaagctccggacgctgttgctattttgccgcgggttctgcgaccagacttcagttctctgatcaagccggggtgagcgtgctgtacactgtcaccctgtgggtggagtcctgggcccgcaaccagacggaaaaatccccagaagtgactctacagctctataattctgtaaagtacgagcccccgctgggcgacatcaaagtgtcaaaactcgccgggcaactcaggatggagtgggaaacccccgataatcaggtaggagcggaggtccagttccggcaccgtacaccgtctagcccttggaagcttggtgactgtggcccccaggacgatgataccgaatcatgtctgtgtcctctagaaatgaacgttgcccaggagttccagttgaggcgccggcaactaggatcccaaggttcaagttggtccaagtggagcagccctgtgtgcgttccacccgagaaccctcctcagccccaggtgagattttccgtggaacagcttgggcaggacgggagacggaggctcacgctgaaagaacaacccacccagctcgaattaccagagggctgtcagggcctggcccccggaaccgaggttacctacaggctccagctacatatgctgtcctgcccatgtaaggcaaaggctacaagaacactgcatcttggtaagatgccctacctgtctggagcagcctacaatgtggccgtgatatcatccaatcagttcgggcctggactaaaccagacctggcacatcccggccgacactcacacagagccagttgccttaaatattagcgtagggactaatggcactacaatgtactggcccgccagggctcaatctatgacgtattgtatagagtggcaaccagtggggcaagatggcggactggccacttgttcgctaaccgcgccacaggaccccgatcctgcaggaatggctacttactcttggagcagagaatcaggcgctatgggccaggagaaatgttattacattaccatctttgcaagtgctcacccagagaagttgacactgtggtccaccgtcttgagtacctaccattttgggggcaatgcctctgccgcggggacaccacatcacgtttccgtaaaaaatcactctctggacagcgtcagtgtggactgggcaccatccctgctttcaacctgccccggagtgctcaaggagtatgtggttcgttgccgcgacgaggattcaaaacaggtgagtgaacaccctgtgcaacccactgaaacccaggtcacccttagcgggctacgggccggcgtggcctacacagtgcaggtcagagctgatacagcttggctgcgaggcgtgtggtctcagcctcagagattctctatcgaggtacaggttagcgattggctcattttctttgcatccctgggcagctttctgtccatcctactggtcggagtcttgggatacctggggctcaatagggccgcacggcatttatgcccccccttgcctaccccctgcgcttcctccgccattgagttccctgggggaaaggagacgtggcaatggatcaatcctgttgattttcaggaggaggcttctttgcaggaagccctcgtagtggaaatgagctgggataagggcgaacgtactgagccccttgagaaaacggagcttcctgagggtgcccccgaactggccctggacaccgagttatccctggaggatggcgataggtgtaaggcgaagatgtag

SEQ ID NO: 157100 - DNA, 1989 bp, Artificial Sequence
  derived and/or modified sequence
atggaacccctggtgacctgggtcgttcctttgctgttcttgttcctgctgagtaggcagggagctgcctgtcggacctccgagtgttgcttccaggatccaccatatcctgacgcagatagcggaagtgcaagtgggcctcgtgatcttcggtgctaccgaatctcttctgacagatacgagtgcagttggcagtacgagggccctactgctggggtgtctcattttttgcgatgttgcctaagctcgggacgatgttgttatttcgctgccggaagtgccacccggctgcagttttctgatcaggccggtgtgtctgtactttatactgtgaccctctgggtagaatcatgggcccgtaaccaaactgagaagagcccagaagtaacactgcagttgtacaattcagtaaagtatgagccacctttgggagatatcaaggtgtcaaaactcgctggccaattgcggatggagtgggagactcccgataaccaggtgggtgccgaggtacagttcagacatcgcacgcccagctcaccttggaagttaggggattgtgggcctcaagacgatgacaccgagagttgcctgtgccctctggaaatgaatgtcgcccaggagtttcaactgaggcgtcgacagctcggttcacagggcagtagctggagcaagtggtcctcccccgtttgcgtaccccctgagaacccccctcagcctcaagtccgtttttccgtcgagcagctgggccaggacggtcgacgaaggcttacccttaaggagcaaccaacgcagctcgagttacccgagggatgccagggactggcgccaggaacggaggtcacataccgtctgcagcttcacatgctcagctgcccctgcaaagcaaaagccacgcgaactttgcacttgggtaagatgccctatctaagtggagcagcatataacgtcgcggttatctcaagcaatcagtttggtccaggcctgaatcagacctggcatatcccagccgacacacacaccgagccagtggcactcaacatttctgttggcactaacgggaccactatgtattggcctgccagggcccaatctatgacttactgcatagagtggcagcccgttggccaggatggcggtttggcaacttgttccctcaccgcccctcaggatccggaccctgcaggaatggcgacttacagttggtctcgcgagtcaggcgctatgggacaagagaaatgttactatattactatttttgccagcgctcaccctgaaaagctcaccctgtggtcaactgtcctgtcaacataccattttggaggcaatgccagcgctgccggaactccacatcacgtctccgtaaagaatcacagcttggattctgtctcagtcgattgggctccatcgctcttaagtacctgtccaggcgtgctgaaagagtatgtggtgagatgtcgcgatgaagattcaaaacaggtctccgagcatccagttcagcccacagagacacaggttacactctctggtctgcgagctggtgttgcatacacagttcaagtgcgcgctgacacagcttggttgcggggtgtgtggagtcagccccagagatttagtattgaagtccaagtgtctgactggctgatattctttgcgtccctgggaagtttcttgtccatcctgctggtcggggtcctcggctatctcggattaaaccgggctgcacgacacctctgcccacccttacctaccccttgcgcctcttctgcgatcgagttccccggtgggaaggagacctggcagtggatcaatccggtcgacttccaggaggaagcttccctccaggaggcccttgtcgtcgagatgtcctgggacaagggagaaaggacagagcccctggaaaaaaccgaacttcctgaaggtgctccagagctggcattggacactgagttaagcctggaagacggagatagatgcaaggctaaaatgtag

SEQ ID NO: 157101 - DNA, 1989 bp, Artificial Sequence
  derived and/or modified sequence
atggaacctctggttacgtgggtcgtgcccctcttatttctgttcttgctctcccggcagggggcagcttgccgtacgtcagaatgctgttttcaggaccctccctacccagatgctgactcgggatcggcaagcggccctcgagatctgcgatgttatcgcatctcctcagatcgttacgaatgctcttggcaatatgagggtcctacagccggagtcagccactttttgaggtgctgtcttagtagcggcagatgctgctatttcgccgcaggcagcgccaccagactccaattctcggaccaagccggagtgtctgtgctgtacactgtgaccttatgggtggaatcttgggcacgcaatcagaccgagaagtcccctgaggtaacccttcagctgtataatagcgtcaaatacgagcccccactgggtgacatcaaggtgagcaagctggccggacagctccggatggagtgggaaactcctgataaccaggtgggcgctgaggttcaatttcgccaccgaactccgtcttctccgtggaagttgggcgactgcggccctcaggatgacgatacagagagttgcttatgccctcttgaaatgaatgtagcccaggagtttcaattacgacgcaggcaactggggtcacagggatcatcctggagcaaatggtcctctcccgtgtgtgtaccaccagagaaccccccacagccacaggtcaggttctctgtggaacaactcggtcaggacggcaggagacggcttaccctcaaggagcaacctacccaattagagctgccggagggatgccaaggattggccccaggcactgaagtgacttacaggttacagctacatatgctgtcatgtccctgtaaagccaaggctacccggacactccatttggggaagatgccttatctttccggggctgcctataacgtcgctgtaatttcctcaaaccagttcgggccaggtttgaaccaaacatggcacattcctgctgacacacatacagagcctgttgcgttgaacatctctgtcggaacaaacggtaccaccatgtattggccggctagggctcagtccatgacctactgtatcgagtggcaaccagtcggccaggatgggggactggcaacctgttccctgacagcccctcaggacccagacccagccggaatggccacatattcctggtcaagagagagcggcgctatgggccaggagaagtgttattacattacaatttttgccagcgcgcacccagagaagctcaccctgtggagcaccgtgctgagcacatatcacttcgggggtaatgcgtcagcggctggaactccccaccacgtctcagtcaagaaccactcactggatagtgtttccgtggactgggccccttccctccttagcacttgccctggcgtgttgaaggaatatgttgtgcgttgcagagacgaggactccaagcaggtgtctgagcatcccgtccagcctacagagacgcaggtgaccctctctggtcttcgggctggggtcgcatatacggtccaggtcagagccgacacagcctggcttagaggcgtgtggtcccagcctcagagattctctatcgaagtgcaagtctctgattggctgatcttcttcgcctctctcggatccttcttatctatcctgttggtgggcgtacttggatacctggggctgaaccgggctgctcgccatctgtgcccccctctgcccacgccatgcgcaagcagcgctatcgaattccccggtggcaaagaaacttggcagtggattaacccagtcgattttcaggaggaggcttcactacaggaggccctggtcgttgagatgtcctgggataagggcgagcggactgagcccctagaaaagactgagcttccggagggagcaccagagctggccctggacactgaactgtccctggaggatggggacagatgcaaagcaaagatgtag

SEQ ID NO: 157102 - DNA, 1989 bp, Artificial Sequence
  derived and/or modified sequence
atggagcccctggtgacctgggtggtgcccctgctgttcctgttcctgctgagcagacagggcgccgcctgcagaaccagcgagtgctgcttccaggaccccccctaccccgacgccgacagcggcagcgccagcggccccagagacctgagatgctacagaatcagcagcgacagatacgagtgcagctggcagtacgagggccccaccgccggcgtgagccacttcctgagatgctgcctgagcagcggcagatgctgctacttcgccgccggcagcgccaccagactgcagttcagcgaccaggccggcgtgagcgtgctgtacaccgtgaccctgtgggtggagagctgggccagaaaccagaccgagaagagccccgaggtgaccctgcagctgtacaacagcgtgaagtacgagccccccctgggcgacatcaaggtgagcaagctggccggccagctgagaatggagtgggagacccccgacaaccaggtgggcgccgaggtgcagttcagacacagaacccccagcagcccctggaagctgggcgactgcggcccccaggacgacgacaccgagagctgcctgtgccccctggagatgaacgtggcccaggagttccagctgagaagaagacagctgggcagccagggcagcagctggagcaagtggagcagccccgtgtgcgtgccccccgagaaccccccccagccccaggtgagattcagcgtggagcagctgggccaggacggcagaagaagactgaccctgaaggagcagcccacccagctggagctgcccgagggctgccagggcctggcccccggcaccgaggtgacctacagactgcagctgcacatgctgagctgcccctgcaaggccaaggccaccagaaccctgcacctgggcaagatgccctacctgagcggcgccgcctacaacgtggccgtgatcagcagcaaccagttcggccccggcctgaaccagacctggcacatccccgccgacacccacaccgagcccgtggccctgaacatcagcgtgggcaccaacggcaccaccatgtactggcccgccagagcccagagcatgacctactgcatcgagtggcagcccgtgggccaggacggcggcctggccacctgcagcctgaccgccccccaggaccccgaccccgccggcatggccacctacagctggagcagagagagcggcgccatgggccaggagaagtgctactacatcaccatcttcgccagcgcccaccccgagaagctgaccctgtggagcaccgtgctgagcacctaccacttcggcggcaacgccagcgccgccggcaccccccaccacgtgagcgtgaagaaccacagcctggacagcgtgagcgtggactgggcccccagcctgctgagcacctgccccggcgtgctgaaggagtacgtggtgagatgcagagacgaggacagcaagcaggtgagcgagcaccccgtgcagcccaccgagacccaggtgaccctgagcggcctgagagccggcgtggcctacaccgtgcaggtgagagccgacaccgcctggctgagaggcgtgtggagccagccccagagattcagcatcgaggtgcaggtgagcgactggctgatcttcttcgccagcctgggcagcttcctgagcatcctgctggtgggcgtgctgggctacctgggcctgaacagagccgccagacacctgtgcccccccctgcccaccccctgcgccagcagcgccatcgagttccccggcggcaaggagacctggcagtggatcaaccccgtggacttccaggaggaggccagcctgcaggaggccctggtggtggagatgagctgggacaagggcgagagaaccgagcccctggagaagaccgagctgcccgagggcgcccccgagctggccctggacaccgagctgagcctggaggacggcgacagatgcaaggccaagatgtag

SEQ ID NO: 157103 - protein, 277 aa, Artificial Sequence
  derived and/or modified sequence
MADPWQECMDYAVTLARQAGEVVCEAIKNEMNVMLKSSPVDLVTATDQKVEKMLISSIKEKYPSHSFIGEESVAAGEKSILTDNPTWIIDPIDGTTNFVHRFPFVAVSIGFAVNKKIEFGVVYSCVEGKMYTARKGKGAFCNGQKLQVSQQEDITKSLLVTELGSSRTPETVRMVLSNMEKLFCIPVHGIRSVGTAAVNMCLVATGGADAYYEMGIHCWDVAGAGIIVTEAGGVLMDVTGGPFDLMSRRVIAANNRILAERIAKEIQVIPLQRDDED

SEQ ID NO: 157104 - protein, 153 aa, Artificial Sequence
  derived and/or modified sequence
MADPWQECMDYAVTLARQAGEVVCEAIKNEMNVMLKSSPVDLVTATDQKVEKMLISSIKEKYPSHRFPFVAVSIGFAVNKKIEFGVVYSCVEGKMYTARKGKGAFCNGQKLQVSQQEDITKSLLVTELGSSRTPETVRMVLSNMEKLFCIPVH

SEQ ID NO: 157105 - DNA, 834 bp, Artificial Sequence
  derived and/or modified sequence
atggcagatccatggcaggaatgtatggactacgctgtcactctggcacggcaggcaggagaggttgtgtgcgaggctatcaaaaacgaaatgaatgtgatgctgaaatcctctccagtggatctggtaaccgcaaccgaccagaaagtggagaaaatgttaatctcttccatcaaagagaagtatcctagtcatagttttataggggaggagtccgtggctgcaggtgagaaaagcatcttaaccgacaatcctacctggataatcgacccgatagatggaaccactaatttcgtacaccggtttcccttcgtagccgtgagtattggatttgccgtaaataagaaaatcgagttcggggtggtctattcttgtgtggagggcaaaatgtacaccgctaggaagggcaagggagccttctgtaacgggcagaagctccaggtgagtcagcaggaagacatcaccaaaagcttactggttacagagctgggaagttccaggacacctgagaccgtgagaatggtgctgagcaacatggagaagctgttctgcatccccgtgcatggaatccgatccgttggcacagccgctgttaacatgtgcttagtggccacaggcggagcggatgcgtattacgagatgggaatacactgttgggatgtggctggagccggaatcattgtaacagaagccgggggggtgctcatggacgtaacgggcggtcctttcgatctcatgtcgcgcagagttattgccgctaacaataggatcctggcggagcgcattgccaaggagatccaggtcattcctttacagagggacgacgaggattag

SEQ ID NO: 157106 - DNA, 462 bp, Artificial Sequence
  derived and/or modified sequence
atggctgacccctggcaggaatgcatggactacgccgtgacactagctagacaggccggagaagtcgtgtgtgaagcaatcaagaatgagatgaacgtgatgttgaaatcttcccccgtggacctggtgacagctacagatcaaaaggttgaaaagatgttaatcagctccataaaggagaaatacccctcgcacagattcccctttgttgcggtgtcgattgggttcgccgtaaataagaagatagagttcggagttgtgtatagttgcgttgagggcaagatgtacactgccaggaaagggaagggggccttctgcaacggccagaagttacaggtgtcacaacaagaggacataacaaaatcgctcttggtgacagagctgggaagttccagaacccctgaaactgtgcgcatggtgctgtccaacatggagaagctcttctgtattccggtgcattag

SEQ ID NO: 157107 - DNA, 834 bp, Artificial Sequence
  derived and/or modified sequence
atggctgacccctggcaggagtgcatggactatgctgtgaccctggcccggcaggccggggaggtggtgtgtgaggccatcaagaatgagatgaatgtgatgctgaagagcagccctgtggacctggtgacagccacagaccagaaggtggagaagatgctgatcagcagcatcaaggagaagtaccccagccacagcttcatcggggaggagagcgtggccgccggggagaagagcatcctgacagacaaccccacctggatcatcgaccccattgatggcaccaccaactttgtgcaccgcttcccctttgtggccgtgtccattggatttgctgtgaacaagaagattgaatttggagtggtgtacagctgtgtggagggcaagatgtacacagccaggaaaggaaaaggagccttctgcaatggccagaagctgcaggtgtcccagcaggaggacatcaccaagagcctgctggtgacagagctgggcagcagcaggaccccagagaccgtgaggatggtgctgagcaacatggagaagctgttctgcatccctgtgcacggcatccgctctgtgggcacagctgctgtgaacatgtgcctggtggccactggaggagcagatgcctactatgagatgggcatccactgctgggatgtggccggggccggcatcatcgtgacagaagctggaggagtgctgatggatgtgactggaggcccctttgacctgatgagccggcgggtgattgctgccaacaaccgcatcctggccgagcgcatcgccaaggagatccaggtgatccccctgcagagagatgatgaggactag

SEQ ID NO: 157108 - DNA, 462 bp, Artificial Sequence
  derived and/or modified sequence
atggctgacccctggcaggagtgcatggactatgctgtgaccctggcccggcaggccggggaggtggtgtgtgaggccatcaagaatgagatgaatgtgatgctgaagagcagccctgtggacctggtgacagccacagaccagaaggtggagaagatgctgatcagcagcatcaaggagaagtaccccagccaccgcttcccctttgtggccgtgtccatcggctttgctgtgaacaagaagattgaatttggagtggtgtacagctgtgtggagggcaagatgtacacagccaggaagggcaagggggccttctgcaatggccagaagctgcaggtgtcccagcaggaggacatcaccaagagcctgctggtgacagagctgggcagcagcaggaccccagagaccgtgaggatggtgctgagcaacatggagaagctgttctgcatccctgtgcactag

SEQ ID NO: 157109 - DNA, 834 bp, Artificial Sequence
  derived and/or modified sequence
atggccgacccctggcaggagtgcatggactacgccgtgaccctggcgaggcaggcaggcgaggtagtgtgcgaagctatcaagaatgaaatgaatgtgatgctgaaaagcagcccagtggatcttgtcaccgccacagaccagaaagttgagaagatgcttataagtagcatcaaggagaagtacccttctcactcattcattggggaagaaagtgtggccgcaggcgaaaaatccatcctgacagataatcctacctggattatagacccgattgacggcactacaaacttcgtccaccgcttcccttttgttgcagtttccatcggtttcgccgtgaacaagaagatcgagttcggagtggtctatagctgtgttgagggaaagatgtacactgcaaggaaaggcaagggcgcattttgcaatggccagaagctgcaggtgtctcaacaagaggacatcacaaaaagcttgctggtgactgagctgggatcttctcgtacacccgagacagtccgtatggtactctctaacatggaaaaactgttctgtatccccgtgcatgggatccgcagtgttggcacagccgccgtcaatatgtgcctggtggccacgggaggtgcagatgcctactacgagatgggcatacattgttgggacgtggccggtgctggcatcatagtcaccgaagcaggaggcgtcctgatggatgtaaccggcggaccttttgatttgatgagtagacgcgtgattgccgccaacaacagaattctcgccgagcgaatagccaaagagatccaggtaatccccctgcagcgtgatgacgaagactag

SEQ ID NO: 157110 - DNA, 462 bp, Artificial Sequence
  derived and/or modified sequence
atggccgacccctggcaggagtgcatggactacgccgtgaccctggctcgtcaggccggcgaagttgtctgtgaggctatcaaaaacgagatgaacgttatgcttaaatcatcgccggtcgacctggtcacggccacggatcagaaggtggagaagatgttaatttcatccattaaggagaagtatcccagccacaggttccccttcgttgctgtgagtattgggttcgccgtgaacaaaaagattgagttcggggtagtgtactcgtgcgtggaagggaagatgtacacagctaggaaaggcaaaggggccttttgcaatggccaaaagttacaggtcagccagcaggaagacatcactaaaagccttcttgtaaccgaactgggaagctccagaacaccggagacggtgcgcatggttcttagtaacatggaaaaattattttgtatcccagtgcattag

SEQ ID NO: 157111 - DNA, 834 bp, Artificial Sequence
  derived and/or modified sequence
atggctgatccttggcaggagtgcatggactatgccgtgacccttgccagacaggccggagaagtggtgtgcgaggcgatcaagaacgagatgaacgtaatgcttaagtcctcgccagtggacctggtcactgcgacagaccaaaaggtcgagaagatgctgatatcctcaattaaagagaaatatccgagtcattcattcataggagaagaaagcgtcgctgcgggagagaaatcaattttgaccgacaacccaacttggatcatcgaccctatcgatggcacgaccaactttgtccacaggtttcctttcgtggcggtttccattggattcgcggtgaataagaaaatcgaatttggcgttgtgtactcctgcgtagaaggcaagatgtacactgctcgaaaaggaaagggtgctttctgcaacggccagaaacttcaggtgagtcagcaagaagatattaccaagtcattgctggtgacagagctgggctctagtagaacacctgagaccgtgagaatggttctcagcaacatggaaaagctgttctgcatacctgtgcatgggattcggtcggttggaacagccgcagttaacatgtgtttggtggccacagggggagccgatgcctattatgagatggggatccattgctgggacgtagcaggagcaggaatcatcgtgaccgaagctggaggcgtcctgatggacgtgaccgggggaccattcgacttaatgagcaggagggtgattgcggcaaataaccgcatactggcagagcgtatcgctaaggagatccaggtgattcccttgcagcgcgacgatgaagattag

SEQ ID NO: 157112 - DNA, 462 bp, Artificial Sequence
  derived and/or modified sequence
atggctgacccttggcaagaatgcatggattacgctgtgacactggcacgacaggctggcgaggtcgtgtgtgaggctataaagaacgagatgaacgtgatgctgaagtcctcgccggtggacctggttaccgctaccgaccaaaaagtcgaaaagatgcttatttcttcaatcaaggagaagtacccttcacaccggttccccttcgtcgctgtgagcatcggattcgctgtaaacaagaaaatcgagttcggcgtggtatactcgtgcgtggaaggcaaaatgtacactgcaaggaagggcaagggggctttttgcaacggtcaaaaactacaggtgagccagcaggaggatataaccaagtcgttgctggtgaccgagcttggttcctctcgtacgcctgaaacagtgagaatggtcctttcaaatatggagaagctcttttgtattccagtgcactag

SEQ ID NO: 157113 - DNA, 834 bp, Artificial Sequence
  derived and/or modified sequence
atggccgacccctggcaggagtgcatggactacgccgtgaccctggccagacaggccggcgaggtggtgtgcgaggccatcaagaacgagatgaacgtgatgctgaagagcagccccgtggacctggtgaccgccaccgaccagaaggtggagaagatgctgatcagcagcatcaaggagaagtaccccagccacagcttcatcggcgaggagagcgtggccgccggcgagaagagcatcctgaccgacaaccccacctggatcatcgaccccatcgacggcaccaccaacttcgtgcacagattccccttcgtggccgtgagcatcggcttcgccgtgaacaagaagatcgagttcggcgtggtgtacagctgcgtggagggcaagatgtacaccgccagaaagggcaagggcgccttctgcaacggccagaagctgcaggtgagccagcaggaggacatcaccaagagcctgctggtgaccgagctgggcagcagcagaacccccgagaccgtgagaatggtgctgagcaacatggagaagctgttctgcatccccgtgcacggcatcagaagcgtgggcaccgccgccgtgaacatgtgcctggtggccaccggcggcgccgacgcctactacgagatgggcatccactgctgggacgtggccggcgccggcatcatcgtgaccgaggccggcggcgtgctgatggacgtgaccggcggccccttcgacctgatgagcagaagagtgatcgccgccaacaacagaatcctggccgagagaatcgccaaggagatccaggtgatccccctgcagagagacgacgaggactag

SEQ ID NO: 157114 - DNA, 462 bp, Artificial Sequence
  derived and/or modified sequence
atggccgacccctggcaggagtgcatggactacgccgtgaccctggccagacaggccggcgaggtggtgtgcgaggccatcaagaacgagatgaacgtgatgctgaagagcagccccgtggacctggtgaccgccaccgaccagaaggtggagaagatgctgatcagcagcatcaaggagaagtaccccagccacagattccccttcgtggccgtgagcatcggcttcgccgtgaacaagaagatcgagttcggcgtggtgtacagctgcgtggagggcaagatgtacaccgccagaaagggcaagggcgccttctgcaacggccagaagctgcaggtgagccagcaggaggacatcaccaagagcctgctggtgaccgagctgggcagcagcagaacccccgagaccgtgagaatggtgctgagcaacatggagaagctgttctgcatccccgtgcactag

SEQ ID NO: 157115 - protein, 422 aa, Artificial Sequence
  derived and/or modified sequence
MSFVECPYHSPAERLVAEADEGGPSAITGMGLCFRCLLFSFSGRSGVEGGRVDLNVFGSLGLQPWIGSSRCWGGPCSSALRCGWFSSWPPPSKSAIPIGGGSRGAGRVSRWPPPHWLEAWRVSPLPLSPLSPATFGRGFIAVAVIPGLWARGRGCSSDRLPRPAGPARRQFQAASLLTRGWGRAWPWKQILKELDECYERFSRETDGAQKRRMLHCVQRALIRSQELGDEKIQIVSQMVELVENRTRQVDSHVELFEAQQELGDTAGNSGKAGADRPKGEAAAQADKPNSKRSRRQRNNENRENASSNHDHDDGASGTPKEKKAKTSKKKKRSKAKAEREASPADLPIDPNEPTYCLCNQVSYGEMIGCDNDECPIEWFHFSCVGLNHKPKGKWYCPKCRGENEKTMDKALEKSKKERAYNR

SEQ ID NO: 157116 - DNA, 1269 bp, Artificial Sequence
  derived and/or modified sequence
atgagcttcgtggagtgcccctaccacagccccgccgagagactggtggccgaggccgacgagggcggccccagcgccatcaccggcatgggcctgtgcttcagatgcctgctgttcagcttcagcggcagaagcggcgtggagggcggcagagtggacctgaacgtgttcggcagcctgggcctgcagccctggatcggcagcagcagatgctggggcggcccctgcagcagcgccctgagatgcggctggttcagcagctggcccccccccagcaagagcgccatccccatcggcggcggcagcagaggcgccggcagagtgagcagatggccccccccccactggctggaggcctggagagtgagccccctgcccctgagccccctgagccccgccaccttcggcagaggcttcatcgccgtggccgtgatccccggcctgtgggccagaggcagaggctgcagcagcgacagactgcccagacccgccggccccgccagaagacagttccaggccgccagcctgctgaccagaggctggggcagagcctggccctggaagcagatcctgaaggagctggacgagtgctacgagagattcagcagagagaccgacggcgcccagaagagaagaatgctgcactgcgtgcagagagccctgatcagaagccaggagctgggcgacgagaagatccagatcgtgagccagatggtggagctggtggagaacagaaccagacaggtggacagccacgtggagctgttcgaggcccagcaggagctgggcgacaccgccggcaacagcggcaaggccggcgccgacagacccaagggcgaggccgccgcccaggccgacaagcccaacagcaagagaagcagaagacagagaaacaacgagaacagagagaacgccagcagcaaccacgaccacgacgacggcgccagcggcacccccaaggagaagaaggccaagaccagcaagaagaagaagagaagcaaggccaaggccgagagagaggccagccccgccgacctgcccatcgaccccaacgagcccacctactgcctgtgcaaccaggtgagctacggcgagatgatcggctgcgacaacgacgagtgccccatcgagtggttccacttcagctgcgtgggcctgaaccacaagcccaagggcaagtggtactgccccaagtgcagaggcgagaacgagaagaccatggacaaggccctggagaagagcaagaaggagagagcctacaacagatag

SEQ ID NO: 157117 - DNA, 1269 bp, Artificial Sequence
  derived and/or modified sequence
atgtcattcgtcgagtgtccttaccatagtccagccgaacgcctggtggctgaggctgatgaaggcgggccaagtgccatcacaggcatgggactgtgcttccgctgcctgctctttagcttttccggaaggtccggagtggaaggtggaagggtagacctgaatgtgtttgggagcctgggactccagccctggatcggcagtagcagatgttggggtggaccgtgtagttccgcattacgatgtggctggttttcctcctggcctccaccctccaaaagtgcgatacctataggcggtggctcacgtggagccggaagagtgagtcggtggcccccacctcactggttagaggcatggagagttagtcctctcccacttagccctctcagcccagctacatttggtcggggttttattgcagtcgccgtgatccctgggctgtgggcccgcggacgaggatgcagctcggataggcttcccagaccggctggacctgctcggcgacaattccaggcagcaagtttgctgactcggggatgggggcgagcttggccctggaaacagattcttaaggagcttgacgagtgctacgaaagattttccagagaaactgatggagcccagaagaggcgtatgctgcattgtgtccagagagcgctcattcggtcccaggagctcggggacgagaaaatccagattgtctcacagatggttgaactggttgaaaatcggacgcggcaggtggacagtcacgtcgagctgtttgaggctcagcaggagttgggcgacacagctgggaacagtgggaaggccggagccgaccggccaaaaggcgaggccgccgcacaggccgataagccaaatagcaagcggtcccgccgacaaaggaacaacgagaaccgcgaaaacgcgtcctcaaaccacgatcatgatgatggcgcctccgggacgccaaaagagaagaaggccaagaccagtaaaaaaaagaagcggtctaaggccaaggcagagagagaggcttcccctgccgatctgcctatcgaccctaatgagcccacctactgcctctgcaaccaggtgtcatacggtgaaatgattgggtgtgataacgacgagtgtcctatagaatggtttcacttctcttgcgtcggactcaatcacaaaccaaaaggcaagtggtactgcccgaagtgcagaggcgagaatgaaaaaacgatggacaaagcactcgaaaagtcaaagaaggaacgcgcttataatcggtag

SEQ ID NO: 157118 - DNA, 1269 bp, Artificial Sequence
  derived and/or modified sequence
atgagctttgtggagtgcccctaccacagccctgctgagcggctggtggccgaggctgatgagggcggccccagcgccatcaccggcatgggcctgtgcttccgctgcctgctcttctccttcagcggccgctctggagtggagggcggccgggtggacctgaatgtgtttggcagcctgggcctgcagccctggattggcagcagccgctgctggggcggcccctgcagcagcgccctgcgctgtggctggttcagctcctggcccccacccagcaagagcgccatccccatcggcggcggcagcagaggagctggccgggtgagccgctggcccccaccccactggctggaggcctggagggtgagccccctgcccctgagccccctgagccctgccaccttcggccggggcttcatcgctgtggccgtcatccctggcctgtgggcccggggccggggctgcagcagtgaccggctgcccaggcctgctggccctgcccggcggcagttccaggccgccagcctgctgacccggggctggggccgggcctggccctggaagcagatcctgaaggagctggatgagtgctatgagcgcttcagccgggagacagatggagcccagaagaggaggatgctgcactgtgtgcagagggccctgatccgcagccaggagctgggagatgagaagatccagatcgtgtcccagatggtggagctggtggagaacagaacccggcaggtggacagccacgtggagctgtttgaggcccagcaggagctgggggacacagctggcaacagcggcaaggccggggctgaccggcccaagggggaggccgccgcccaggccgacaagcccaacagcaagaggagccggcggcagagaaataatgaaaatagagaaaatgccagcagcaaccacgaccatgatgatggagccagcggcacccccaaggagaagaaggccaagaccagcaagaagaagaagaggagcaaggccaaggccgagcgggaggccagccctgctgacctgcccatcgaccccaatgagcccacctactgcctgtgcaaccaggtgtcctatggagagatgattggctgtgacaatgatgaatgtcccatcgagtggttccacttcagctgtgtgggcctgaaccacaagcccaagggcaagtggtactgccccaagtgccgcggggagaatgagaagaccatggacaaggccctggagaagagcaagaaggagcgggcctacaacagatag

SEQ ID NO: 157119 - DNA, 2870 bp, Artificial Sequence
  derived and/or modified sequence
agcggaggcggggaaggcgcccatctgcgctgcgctcgggggggcgcgggcagatcgctggcttggagaggactgtggcaggtgagaggacctgtgcgtcgttctctgcagacctggccgccccgggtgtcagagagaggtggcgagttcgtgtccgccgggaattgttggctgttggggaaactttcctgcgaggtcagtcaaggctttgggggctctgttttgaatgtggatcaccactcggagtttactaatgtttacaaggctgcgcagtagggaaacggaagagttgggtgggggcaaaaaaaaaaattgaccgctatccccgaaagtactagacgcctctgccgggaaggcgcccctgcgcgttctatccgagacgtagcttcgcagcgaattttataggaacttcattagcatattatggaacgtcccgcctcagccccccagtagttggctgtgatgtccttcgtggaatgtccttatcattcccctgcggaacgattggtcgctgaggcggatgaaggcgggcctagcgcaataactggtatgggtctgtgtttccgctgtcttcttttttctttttcggggaggagcggggtggagggtggacgagttgatttgaacgtcttcgggtcgctcggcctccagccttggattggttcttctcgctgctggggcgggccgtgctcttccgccctgcggtgtggttggttctcctcctggcctccgccctccaaatcggcgattcccataggcggcggctctcggggtgcggggcgagtctcccgctggcctcctccccattggctggaggcctggcgggtgtcgcccctgcccctctccccgctcagcccggccactttcgggcgcggatttatagcagtagcagtgatcccgggcctgtgggctcggggccggggctgcagttcggaccgcctcccgcgacccgcggggccggctcggagacagtttcaggccgcatctctgctgacccgagggtggggccgcgcgtggccgtggaaacagatcctgaaggagctagacgagtgctacgagcgcttcagtcgcgagacagacggggcgcagaagcggcggatgctgcactgtgtgcagcgcgcgctgatccgcagccaggagctgggcgacgagaagatccagatcgtgagccagatggtggagctggtggagaaccgcacgcggcaggtggacagccacgtggagctgttcgaggcgcagcaggagctgggcgacacagcgggcaacagcggcaaggctggcgcggacaggcccaaaggcgaggcggcagcgcaggctgacaagcccaacagcaagcgctcacggcggcagcgcaacaacgagaaccgtgagaacgcgtccagcaaccacgaccacgacgacggcgcctcgggcacacccaaggagaagaaggccaagacctccaagaagaagaagcgctccaaggccaaggcggagcgagaggcgtcccctgccgacctccccatcgaccccaacgaacccacgtactgtctgtgcaaccaggtctcctatggggagatgatcggctgcgacaacgacgagtgccccatcgagtggttccacttctcgtgcgtggggctcaatcataaacccaagggcaagtggtactgtcccaagtgccggggggagaacgagaagaccatggacaaagccctggagaaatccaaaaaagagagggcttacaacaggtagtttgtggacaggcgcctggtgtgaggaggacaaaataaaccgtgtatttattacattgctgcctttgttgaggtgcaaggagtgtaaaatgtatatttttaaagaatgttagtaaaggaaccattcctttcatagggatggcagtgattctgtttgccttttgttttcattggtacacgtgtaacaagaaagtggtctgtggatcagcattttagaaactacaaatataggtttgattcaacacttaagtctcagactgatttcttgcgggaggagggggactaaactcaacctaacacattaaatgtggaaggaaaatatttcatttagcttttttattttaatacaagtaatattattactttatgaacaattttttttaattggccatgtcgccaaaaatacagcctatagtaaatgtgtttcttgctgccatgatgtatatccatataacaattcagtaacaaaggtttaaagtttgaagattattttttaaaaaggtaaatggttaaattttacatgacagatattttatctattggcctgttccccaaatggccattttaaaatgcttgggtacacttctcttaagtggtctagtcaaggaacctcaagtcatgcttttgctatcaccaatcatagtgtacccatctttaatttatatcaggtgtataaatgtacatttccaaatgaacttgcacttgttatattataattggaagtgcagtcagcagatgctgttgtgaagctaatgtcacaattatgtgcaaaggtgtgcttcctgctgtatgtgagctgtaaaaatgttacgtgaagaaataaatgaaacttggccagtttgttcctctagtagtatatttaattttgacataagtaacttttaaaatttgtcttaaaaatttatacaccagcaatttagacaaagccttaagcaaattttgtattattgttctcacttattattaataatgaagtagaagttacttaattgccagcaaataaatacgtgtcaaaaaagaatctgtattcagaccctgggtcaggaaattactgcccacttgtcaagttcagcccaccatctgtttgaagattatatgaagtttaaattctagtgtccataaataaagtttcagcggaac

SEQ ID NO: 157120 - DNA, 1269 bp, Artificial Sequence
  derived and/or modified sequence
atgagcttcgtggagtgcccctaccacagccccgccgagcggctggttgccgaagccgacgagggggggcctagcgctataacaggtatgggcctatgcttccggtgtctgctgttttctttcagcgggcgttccggagttgaaggcgggcgtgtcgatctgaatgtttttgggagtctgggcctgcagccgtggatcgggagttccaggtgttggggtgggccatgtagcagtgccttacggtgcggctggttttcatcgtggcctcccccttcaaagtctgcgatccccatcggaggcggctccaggggcgccggaagggtatctaggtggccacccccccattggctagaagcttggcgtgttagccccctgcccctgtccccactgtcccccgcgaccttcggcaggggctttatcgctgtggcggtaatccccggtctatgggcgcgagggagaggttgttcctcagaccggctgcctaggcctgctgggccagcacggaggcaatttcaggcagcctctcttttgactcgcggctggggcagggcatggccttggaaacagatactgaaggaactagacgagtgctacgagaggttctcacgtgagacagatggggctcagaagcggagaatgctacactgtgtgcagcgcgctctgattaggagccaagagttgggggacgaaaagattcaaatcgtgtctcaaatggtggagctggtggagaacaggacgcgccaggtggattctcacgtggaactgtttgaggcccagcaagagttgggagataccgccggtaactctggtaaggccggcgctgatcgaccaaagggtgaagccgctgcccaggcggacaagcctaacagcaagcgttcacgcagacagcgcaataatgagaatcgcgagaatgcttccagcaaccacgatcacgatgacggggctagcgggacgccgaaagaaaaaaaagctaagacctcgaaaaagaagaagcgatctaaagccaaggccgagagggaggctagtccagctgatctgccaatagatcccaatgaaccaacatactgcctgtgtaaccaggtgagctacggagagatgatcgggtgtgacaatgacgagtgtcccattgagtggttccacttttcctgcgtaggcctgaatcacaagccaaagggaaaatggtactgtcccaaatgcaggggtgaaaatgaaaaaactatggataaagcattagagaaatctaagaaagagcgggcgtacaaccggtag

SEQ ID NO: 157121 - DNA, 1269 bp, Artificial Sequence
  derived and/or modified sequence
atgagcttcgtggagtgcccctaccactcgcccgctgagaggttggtggccgaagctgacgaaggaggtccttcagctatcaccggaatgggactttgtttccggtgtctgctgttttccttctccggaagatctggggtggagggaggccgtgttgatctaaatgtgtttggttcactgggattgcagccttggatcggaagctcccgatgctggggaggaccttgctcatccgcacttcgatgtggctggttctcaagctggccaccaccatccaagagtgccattcctataggaggcggatccaggggcgctggacgggtgtccagatggcccccaccccactggctcgaggcatggagggtctcacccctgcccctctcgcccttaagccctgctactttcggccgagggttcatcgccgtcgccgtgattccgggtctgtgggccagggggcgtggctgcagttctgaccggttacccagacctgccggtccagcccgtaggcagtttcaagccgctagcctgctcactcgtggatggggcagagcctggccctggaaacagattctgaaagaactggatgagtgttatgagcgtttcagccgggaaacagatggagctcaaaagcgacgcatgctccattgcgtccagcgtgctctgatcaggtcccaggagctcggcgatgaaaaaatccaaattgtgagccagatggtggagttggttgagaaccgtacccgacaggttgattcgcacgtagagctgtttgaagcccagcaagagctgggggatacggccggaaactccggcaaagctggcgctgaccgacctaaaggagaagcggctgcacaggcggacaagccaaactccaaacggagccgcagacaaaggaacaacgaaaacagggaaaatgcgtccagtaatcacgaccacgatgacggcgctagcggtacccctaaagagaaaaaggccaaaacctcaaagaagaagaaaagaagtaaggctaaggcggagcgcgaagcatcacccgctgatctgccgattgaccctaatgagcccacgtactgtttgtgtaatcaggtttcttacggtgagatgatcgggtgtgataacgatgaatgtcccattgagtggtttcatttcagctgtgtgggactgaaccacaagcccaagggcaagtggtactgtcctaagtgtcgtggggaaaatgagaagaccatggacaaggcgttagagaagtctaaaaaagaacgagcttacaatagatag

SEQ ID NO: 157122 - protein, 352 aa, Artificial Sequence
  derived and/or modified sequence
MTSSLLLAFLLLAPTTVATPRAGGQCPACGGPTLELESQRELLLDLAKRSILDKLHLTQRPTLNRPVSRAALRTALQHLHGVPQGALLEDNREQECEIISFAETGLSTINQTRLDFHFSSDRTAGDREVQQASLMFFVQLPSNTTWTLKVRVLVLGPHNTNLTLATQYLLEVDASGWHQLPLGPEAQAACSQGHLTLELVLEGQVAQSSVILGGAAHRPFVAARVRVGGKHQIHRRGIDCQGGSRMCCRQEFFVDFREIGWHDWIIQPEGYAMNFCIGQCPLHIAGMPGIAASFHTAVLNLLKANTAAGTTGGGSCCVPTARRPLSLLYYDRDSNIVKTDIPDMVVEACGCS

SEQ ID NO: 157123 - DNA, 1059 bp, Artificial Sequence
  derived and/or modified sequence
atgacatccagcctgctcctggccttcttgctcctggcacccaccactgtggcaactccacgcgcaggaggtcagtgccccgcttgtggcggcccaacgttagaattggaatctcagcgagaactgctgctggacctagccaaacgcagcattctggacaaacttcatctgacgcagaggcccacgctgaaccggcctgtatcgagggctgctctgagaactgcccttcagcatctccacggtgtgccacagggtgccctcctggaagataatcgcgaacaagaatgcgaaattattagttttgccgaaactgggttgtcaaccatcaaccagactcgactcgacttccattttagctccgaccgcacagccggagatcgagaagtacagcaagcatcactgatgtttttcgtccagttaccgtccaatacaacatggaccttgaaagtgcgcgtactggttctgggcccccacaacaccaacttaactctcgctacacagtatctgctggaagtcgatgcttccggttggcaccagctccccctcggacccgaggctcaagccgcctgtagccagggacatcttactctggaactggtactggagggtcaggtggcccagtcctccgttattcttggtggtgctgcccaccgccctttcgttgcggctagagttcgtgtcggtggcaagcaccagatccacagaagaggaatcgactgccagggtgggtctcgcatgtgctgccggcaggaattcttcgtagatttccgtgagatcggttggcacgactggattattcagccagagggctacgccatgaacttctgtattgggcagtgtcccctgcatattgccggaatgccaggtattgccgccagcttccataccgcagtgctgaacttgctcaaagcaaatactgctgccgggacaacaggagggggctcctgctgtgtgccaacagcaagacgccctttaagcctgctctattacgatcgggatagcaacattgtcaagactgacatccccgatatggtcgtggaagcttgtgggtgttcatag

SEQ ID NO: 157124 - DNA, 1992 bp, Artificial Sequence
  derived and/or modified sequence
caaggagccatgccagctggacacacacttcttccagggcctctggcagccaggacagagttgagaccacagctgttgagaccctgagccctgagtctgtattgctcaagaagggccttccccagcaatgacctcctcattgcttctggcctttctcctcctggctccaaccacagtggccactcccagagctggcggtcagtgtccagcatgtggggggcccaccttggaactggagagccagcgggagctgcttcttgatctggccaagagaagcatcttggacaagctgcacctcacccagcgcccaacactgaaccgccctgtgtccagagctgctttgaggactgcactgcagcacctccacggggtcccacagggggcacttctagaggacaacagggaacaggaatgtgaaatcatcagctttgctgagacaggcctctccaccatcaaccagactcgtcttgattttcacttctcctctgatagaactgctggtgacagggaggtccagcaggccagtctcatgttctttgtgcagctcccttccaataccacttggaccttgaaagtgagagtccttgtgctgggtccacataataccaacctcaccttggctactcagtacctgctggaggtggatgccagtggctggcatcaactccccctagggcctgaagctcaagctgcctgcagccaggggcacctgaccctggagctggtacttgaaggccaggtagcccagagctcagtcatcctgggtggagctgcccataggccttttgtggcagcccgggtgagagttgggggcaaacaccagattcaccgacgaggcatcgactgccaaggagggtccaggatgtgctgtcgacaagagttttttgtggacttccgtgagattggctggcacgactggatcatccagcctgagggctacgccatgaacttctgcatagggcagtgcccactacacatagcaggcatgcctggtattgctgcctcctttcacactgcagtgctcaatcttctcaaggccaacacagctgcaggcaccactggagggggctcatgctgtgtacccacggcccggcgccccctgtctctgctctattatgacagggacagcaacattgtcaagactgacatacctgacatggtagtagaggcctgtgggtgcagttagtctatgtgtggtatgggcagcccaaggttgcatgggaaaacacgcccctacagaagtgcacttccttgagaggagggaatgacctcattctctgtccagaatgtggactccctcttcctgagcatcttatggaaattaccccacctttgacttgaagaaaccttcatctaaagcaagtcactgtgccatcttcctgaccactaccctctttcctagggcatagtccatcccgctagtccatcccgctagccccactccagggactcagacccatctccaaccatgagcaatgccatctggttcccaggcaaagacacccttagctcacctttaatagaccccataacccactatgccttcctgtcctttctactcaatggtccccactccaagatgagttgacacaaccccttcccccaatttttgtggatctccagagaggcccttctttggattcaccaaagtttagatcactgctgcccaaaatagaggcttacctacccccctctttgttgtgagcccctgtccttcttagttgtccaggtgaactactaaagctctctttgcataccttcatccattttttgtccttctctgcctttctctatgcccttaagggctgacttgcctgagctctatcacctgagctcccctgccctctggcttcctgctgaggtcagggcatttcttatccctgttccctctctgtctaggtgtcatggttctgtgtaactgtggctattctgtgtccctacactacctggctacccccttccatggccccagctctgcctacattctgatat

SEQ ID NO: 157125 - DNA, 1059 bp, Artificial Sequence
  derived and/or modified sequence
atgaccagcagcctgctgctggccttcctgctgctggcccccaccaccgtggccaccccccgggccggcggccagtgcccagcctgtggcggccccaccctggagctggagagccagcgggagctgctgctggacctggccaagaggagcatcctggacaagctgcacctgacccagaggcccaccctgaacagacctgtgtcccgggccgccctgaggacagccctgcagcacctgcacggcgtgccccagggcgccctgctggaggacaaccgggagcaggagtgtgagatcatcagctttgctgagaccggcctgagcaccatcaaccagacccggctggacttccacttcagcagtgacagaacagctggggaccgggaggtgcagcaggccagcctgatgttctttgtgcagctgcccagcaacaccacctggaccctgaaggtgcgggtgctggtgctgggcccccacaacaccaacctgaccctggccacccagtacctgctggaggtggatgccagcggctggcaccagctgcccctgggccctgaggcccaggccgcctgcagccagggccacctgaccctggagctggtgctggagggccaggtggcccagagcagcgtcatcctgggcggggccgcccaccggccctttgtggccgcccgggtgcgggtgggcggcaagcaccagatccacagaagaggcatcgactgccagggcggcagcaggatgtgctgccggcaggagttctttgtggacttccgggagatcggctggcatgactggatcatccagcctgagggctacgccatgaacttctgcatcggccagtgccccctgcacatcgccggcatgcctggcattgctgccagcttccacacagctgtgctgaacctgctgaaggccaacacagctgctggcaccactggaggcggcagctgctgcgtgcccacagcccggcggcccctgagcctgctgtactatgaccgggacagcaacatcgtgaagacagacatcccagacatggtggtggaggcctgtggctgcagctag

SEQ ID NO: 157126 - DNA, 1059 bp, Artificial Sequence
  derived and/or modified sequence
atgaccagcagcctgctgctggccttcctgctgctggcccccaccaccgtggctacacctcgggccggcgggcagtgcccggcatgcggcggacctaccctggaattggaaagccagcgagaactgctactggatctcgccaaaaggtccattctggataaactgcatctcacacaacgcccaactttgaatcggcctgtgtcccgagccgcattgaggacagctctgcagcatctccacggagtccctcaaggcgccctccttgaggacaacagggagcaggaatgcgagataatttccttcgcggaaacaggcctctcaacaataaatcagaccagattagatttccacttctcgagtgataggacagctggtgatagagaggtgcagcaggccagccttatgttcttcgtacaactaccttctaacaccacttggactcttaaggtccgcgtcttggttctggggccgcataataccaatttaactctggcaacccagtacctccttgaggtagacgctagcggatggcatcagctcccgttagggcccgaggcacaggcggcctgttctcagggacatctaacactagagctcgtcttggagggacaagtggcccagtccagtgttatcctgggcggagctgcccatcgcccattcgtcgctgcccgagttagggtggggggcaaacatcagattcaccgaaggggcattgactgccagggcggaagtcggatgtgttgtcggcaggagtttttcgttgactttcgggagattgggtggcatgactggattatacagcccgaaggatacgcaatgaacttctgtatcgggcaatgtcctctgcacattgcaggcatgcctggaatcgcagcttcattccataccgccgtgcttaatttactgaaggccaatactgcggccggtacgacaggggggggatcttgctgcgtgcctactgcgaggcgcccacttagtctgttgtattacgatagggattctaacatagtgaagaccgacatccccgacatggtagtggaggcctgcggttgctcctag

SEQ ID NO: 157127 - DNA, 1059 bp, Artificial Sequence
  derived and/or modified sequence
atgacctcttctctgttactcgctttccttcttttagctcctactaccgtggccacgccaagggccggaggccagtgccccgcttgtggcggacctacgctcgaactggagagccagcgagaactgttgctcgatctggctaaaagatccatcttagataaactacacctcacacaacgaccgacgctaaaccgccctgtctctcgggctgcactgcggactgccctccagcatctgcacggagtgccacagggcgcattattggaggacaaccgggaacaggaatgcgaaattataagctttgcagaaaccgggctttccaccattaatcagacacggctcgacttccacttttcaagcgatcggaccgctggcgacagagaagttcagcaagcatcccttatgttttttgtgcaattacccagtaacactacctggactctgaaggtgcgcgtgctggtgctgggacctcataataccaaccttacattagcaacacaatatctactggaggtggatgcatcaggctggcaccagctaccacttggtccagaggcccaggctgcatgtagtcaggggcacctgacattggaactggtccttgaaggccaggtggcccaatctagtgtgattctgggcggagcggctcatcgaccattcgtcgcagcgcgagtcagggtgggtggaaagcaccagatccacaggcgcggaatagactgtcaaggcggatcaagaatgtgttgccgccaagaatttttcgtcgattttcgggagattggttggcatgattggatcattcagccggaaggttacgcgatgaacttctgtatcggccagtgtcctttgcacatcgccggaatgcccggaatcgcagcctccttccacacagccgtgttaaacctgttgaaggctaacactgcagccggaacaacagggggagggtcctgttgtgttcccacagccaggagaccactatctctcctgtactacgaccgtgactctaacatcgtgaagacagacatacccgacatggttgtggaggcatgtggatgttcctag

SEQ ID NO: 157128 - DNA, 1059 bp, Artificial Sequence
  derived and/or modified sequence
atgaccagcagcctgctgctggccttcctgctgctggcccccaccaccgtggccacccccagagccggcggccagtgccccgcctgcggcggccccaccctggagctggagagccagagagagctgctgctggacctggccaagagaagcatcctggacaagctgcacctgacccagagacccaccctgaacagacccgtgagcagagccgccctgagaaccgccctgcagcacctgcacggcgtgccccagggcgccctgctggaggacaacagagagcaggagtgcgagatcatcagcttcgccgagaccggcctgagcaccatcaaccagaccagactggacttccacttcagcagcgacagaaccgccggcgacagagaggtgcagcaggccagcctgatgttcttcgtgcagctgcccagcaacaccacctggaccctgaaggtgagagtgctggtgctgggcccccacaacaccaacctgaccctggccacccagtacctgctggaggtggacgccagcggctggcaccagctgcccctgggccccgaggcccaggccgcctgcagccagggccacctgaccctggagctggtgctggagggccaggtggcccagagcagcgtgatcctgggcggcgccgcccacagacccttcgtggccgccagagtgagagtgggcggcaagcaccagatccacagaagaggcatcgactgccagggcggcagcagaatgtgctgcagacaggagttcttcgtggacttcagagagatcggctggcacgactggatcatccagcccgagggctacgccatgaacttctgcatcggccagtgccccctgcacatcgccggcatgcccggcatcgccgccagcttccacaccgccgtgctgaacctgctgaaggccaacaccgccgccggcaccaccggcggcggcagctgctgcgtgcccaccgccagaagacccctgagcctgctgtactacgacagagacagcaacatcgtgaagaccgacatccccgacatggtggtggaggcctgcggctgcagctag

SEQ ID NO: 157129 - protein, 278 aa, Artificial Sequence
  derived and/or modified sequence
  misc_feature (1)..(1): Xaa can be any naturally occurring amino acid
XQKNWLREFYQVVHTHKPHFMALHCQEFGGKNYEASMSHVDKFVKELLSSDAMKEYNRARVYLDENYKSQEHFTALGSFYFLHESLKNIYQFDFKAKKYRKVAGKEIYSDTLESTPMLEKEKFPQDYFPECKWSRKGFIRTRWCIADCAFDLVNIHLFHDASNLVAWETSPSVYSGIRHKALGYVLDRIIDQRFEKVSYFVFGDFNFRLDSKSVVELLEFDKELSVFKDRLYELDISFPPSYPYSEDARQGEQYMNTRCPAWCDRILMSPSAKELVLR

SEQ ID NO: 157130 - protein, 387 aa, Artificial Sequence
  derived and/or modified sequence
MAGKAAAPGTAVLLVTANVGSLFDDPENLQKNWLREFYQVVHTHKPHFMALHCQEFGGKNYEASMSHVDKFVKELLSSDAMKEYNRARVYLDENYKSQEHFTALGSFYFLHESLKNIYQFDFKAKKYRKVAGKEIYSDTLESTPMLEKEKFPQDYFPECKWSRKGFIRTRWCIADCAFDLVNIHLFHDASNLVAWETSPSVYSGIRHKALGYVLDRIIDQRFEKVSYFVFGDFNFRLDSKSVVETLCTKATMQTVRAADTNEVVKLIFRESDNDRKVMLQLEKKLFDYFNQEVFRDNNGTALLEFDKELSVFKDRLYELDISFPPSYPYSEDARQGEQYMNTRCPAWCDRILMSPSAKELVLRVSVCCPSPGHRGMWSAGSGLAQPW

SEQ ID NO: 157131 - protein, 412 aa, Artificial Sequence
  derived and/or modified sequence
MAGKAAAPGTAVLLVTANVGSLFDDPENLQKNWLREFYQVVHTHKPHFMALHCQEFGGKNYEASMSHVDKFVKELLSSDAMKEYNRARVYLDENYKSQEHFTALGSFYFLHESLKNIYQFDFKAKKYRKVAGKEIYSDTLESTPMLEKEKFPQDYFPECKWSRKGFIRTRWCIADCAFDLVNIHLFHDASNLVAWETSPSVYSGIRHKALGYVLDRIIDQRFEKVSYFVFGDFNFRLDSKSVVETLCTKATMQTVRAADTNEVVKLIFRESDNDRKVMLQLEKKLFDYFNQEVFRDNNGTALLEFDKELSVFKDRLYELDISFPPSYPYSEDARQGEQYMNTRCPAWCDRILMSPSAKELVLRSESEEKVVTYDHIGPNVCMGDHKPVFLAFRIMPGAGKPHAHVHKCCVVQ

SEQ ID NO: 157132 - protein, 185 aa, Artificial Sequence
  derived and/or modified sequence
MAGKAAAPGTAVLLVTANVGSLFDDPENLQKNWLREFYQVVHTHKPHFMALHCQEFGGKNYEASMSHVDKFVKELLSSDAMKEYNRARVYLDENYKSQEHFTALGSFYFLHESLKNIYQFDFKAKKYRKVAGKEIYSDTLESTPMLEKEKFPQDYFPERHVPHTSLEALLILHEDPQLPDPHLPL

SEQ ID NO: 157133 - protein, 355 aa, Artificial Sequence
  derived and/or modified sequence
MAGKAAAPGTAVLLVTANVGSLFDDPENLQKNWLREFYQVVHTHKPHFMALHCQEFGGKNYEASMSHVDKFVKELLSSDAMKEYNRARVYLDENYKSQEHFTALGSFYFLHESLKNIYQFDFKAKKYRKVAGKEIYSDTLESTPMLEKEKFPQDYFPECKWSRKGFIRTRWCIADCAFDLVNIHLFHDASNLVAWETSPSVYSGIRHKALGYVLDRIIDQRFEKVSYFVFGDFNFRLDSKSVVELLEFDKELSVFKDRLYELDISFPPSYPYSEDARQGEQYMNTRCPAWCDRILMSPSAKELVLRSESEEKVVTYDHIGPNVCMGDHKPVFLAFRIMPGAGKPHAHVHKCCVVQ

SEQ ID NO: 157134 - protein, 138 aa, Artificial Sequence
  derived and/or modified sequence
VTANVGSLFDDPENLQKNWLREFYQALGSFYFLHESLKNIYQFDFKAKKYRKVAGKEIYSDTLESTPMLEKEKFPQDYFPECKWSRKGFIRTRWCIADCAFDLVNIHLFHDASNLVAWETSPSVYSGIRHKALGYVLD

SEQ ID NO: 157135 - protein, 329 aa, Artificial Sequence
  derived and/or modified sequence
MKEYNRARVYLDENYKSQEHFTALGSFYFLHESLKNIYQFDFKAKKYRKVAGKEIYSDTLESTPMLEKEKFPLLPRVQMVKKRLHPDEVIADCAFDLVNIHLFHDASNLVAWETSPSVYSGIRHKALGYVLDRIIDQRFEKVSYFVFGDFNFRLDSKSVVETLCTKATMQTVRAADTNEVVKLIFRESDNDRKVMLQLEKKLFDYFNQEVFRDNNGTALLEFDKELSVFKDRLYELDISFPPSYPYSEDARQGEQYMNTRCPAWCDRILMSPSAKELVLRSESEEKVVTYDHIGPNVCMGDHKPVFLAFRIMPGAGKPHAHVHKCCVVQ

SEQ ID NO: 157136 - protein, 104 aa, Artificial Sequence
  derived and/or modified sequence
LDISFPPSYPYSEDARQGEQYMNTRCPAWCDRILMSPSAKELVLRSESEEKVVTYDHIGPNVCMGDHKPVFLAFRIMPGAGKRCQRHERTLREPPCSRGPNTHS

SEQ ID NO: 157137 - protein, 181 aa, Artificial Sequence
  derived and/or modified sequence
AAAPGTAVLLVTANVGSLFDDPENLQKNWLREFYQVVHTHKPHFMALHCQEFGGKNYEASMSHVDKFVKELLSSDAMKEYNRARVYLDENYKSQEHFTALGSFYFLHESLKNIYQFDFKAKKYRKVAGKEIYSDTLESTPMLEKEKFPQDYFPERHVPHTSLEALLILHEDPQLPDPHLPL

SEQ ID NO: 157138 - protein, 152 aa, Artificial Sequence
  derived and/or modified sequence
MAGKAAAPGTAVLLVTANVGSLFDDPENLQKNWLREFYQALGSFYFLHESLKNIYQFDFKAKKYRKVAGKEIYSDTLESTPMLEKEKFPQDYFPECKWSRKGFIRTRWCIADCAFDLVNIHLFHDASNLVAWETSPSVYSGIRHKALGYVLD

SEQ ID NO: 157139 - DNA, 837 bp, Artificial Sequence
  derived and/or modified sequence
taacagaagaattggctgagggagttctaccaagtggtccatacccacaagcctcattttatggccctacactgtcaagagttcggaggcaagaactacgaggcatccatgagccacgtggataaatttgtcaaagagttgctcagtagcgacgctatgaaagagtacaacagagcccgggtctacttagacgaaaactacaagtcccaggaacacttcaccgcactgggaagcttctactttctgcatgagtctctgaagaacatctatcaatttgactttaaagccaagaagtacaggaaagtcgctgggaaagagatttatagtgatacgctggaatcaactcctatgttggagaaggaaaaattcccacaggattactttccagagtgtaagtggtcccggaagggattcatcagaactcgctggtgcatcgccgattgtgcattcgacctcgttaatattcacttgttccacgacgccagcaacctagtagcttgggagacaagcccctccgtgtattccgggattcgccataaagcattgggctacgtactggatcgcattatcgatcaacgctttgagaaggtcagttatttcgtgttcggagatttcaatttcaggctcgactctaaatcggtggtggaactgttagaatttgacaaggaactcagcgtgttcaaagaccgactctatgagctggatatctcttttcctccttcttatccctatagcgaggatgccagacaaggggagcagtacatgaacacacgatgcccagcttggtgtgacaggatcctaatgtcgccttctgctaaggaactggtcctgagatag

SEQ ID NO: 157140 - DNA, 1164 bp, Artificial Sequence
  derived and/or modified sequence
atggcagggaaggctgccgctcctggcacagccgttctgctggtcactgctaatgtggggtctctgttcgatgaccccgaaaacctgcagaaaaattggctgcgggagttttaccaagttgtgcatacacacaagccccattttatggcgttgcactgtcaggagttcggcgggaaaaattatgaggcctctatgtctcacgtcgataaatttgtaaaggaactgttgtcctctgacgctatgaaagagtacaacagggcccgtgtctatctcgatgagaattacaagtctcaggagcattttaccgccctcggctctttctattttttacatgaaagtctcaagaacatctaccagtttgactttaaagcaaagaagtataggaaggtcgctggcaaagagatatacagtgacaccctggaatccaccccaatgctcgaaaaggagaagtttcctcaggattacttcccggagtgtaagtggagccgtaaggggtttattcgaacacgttggtgcatcgccgactgcgcttttgatttggtgaacatacacctgtttcacgatgcgtcaaaccttgtggcgtgggagacatcaccctccgtctactcaggaatacggcacaaagctctgggttatgtcctcgatcgcatcattgaccagagattcgagaaggtgagttattttgtctttggagacttcaacttccgcttggactctaaatccgtggtggagacattatgcacgaaagctaccatgcaaacagttcgtgcagccgacactaacgaggtggtgaagctgattttcagagagtctgataacgatagaaaggtcatgctgcagcttgagaagaagttgtttgactacttcaaccaggaggtattccgggataacaatggcaccgctcttctagagtttgacaaggaactctctgtttttaaggatcggttatatgaattggacatctcctttccacccagctacccatattcagaggacgcgagacagggcgaacagtacatgaatacccgctgccccgcctggtgcgaccggatactaatgtcaccctcagccaaagagttggtcttgcgggtgtccgtgtgctgcccctcccctggtcacagaggtatgtggtcagcaggatcaggactggctcagccttggtag

SEQ ID NO: 157141 - DNA, 1239 bp, Artificial Sequence
  derived and/or modified sequence
atggcgggtaaagctgctgctcccggcaccgctgtgctcctggtcacagcgaacgtgggatctctgtttgacgatcccgagaatctgcagaagaattggctgcgcgagttctatcaagtcgtccatactcataaaccacacttcatggccctccactgccaggaatttggcggtaagaactatgaggcatctatgtcccatgtggataaattcgtcaaagagcttctatcctccgacgctatgaaggaatacaacagggcgcgggtttacctcgacgagaactacaaatcgcaggagcatttcaccgccctgggtagcttctactttttacatgaatcactgaagaatatctatcagttcgacttcaaggcaaagaaatacagaaaagtcgccgggaaggaaatatactccgacaccctcgaatccacgcccatgcttgagaaggaaaagtttcctcaggattacttccccgaatgcaaatggtcccgtaagggcttcatccgcactagatggtgcatcgccgattgtgcattcgacctcgtgaatatccatctctttcatgatgcctccaatctcgtggcttgggaaacaagcccctctgtctactctggcatccgacataaagctctcggttatgtgctcgacagaataatcgaccagcgctttgagaaagtctcctatttcgtgttcggcgacttcaacttccgcctggatagcaaatcagtggtggagacactctgcaccaaagccactatgcagacagtgcgggccgcggacactaacgaagttgttaaactgatcttcagggaatctgataacgatcgaaaagttatgctccagctggagaagaagctgttcgattacttcaatcaggaagtcttccgcgacaacaacggcacagcgctgctcgagttcgataaggaactttctgtgtttaaggaccgtctttacgagttggacatttcatttccccccagctacccgtacagtgaggatgcccgacagggagagcagtacatgaataccagatgtcctgcctggtgtgatcgtattttgatgagtcccagtgcaaaggagttagtgctgcgctcagagagtgaggaaaaggtggtgacttacgatcacattggccctaatgtctgtatgggagatcacaagccagtctttttagcctttcgcattatgcctggggcaggcaagcctcacgcccacgtccacaagtgttgtgtggttcaatag

SEQ ID NO: 157142 - DNA, 558 bp, Artificial Sequence
  derived and/or modified sequence
atggctggtaaggccgctgcccctggtaccgccgttctgctggtcacggcaaacgtcggttctctgttcgacgacccagaaaacttacagaaaaactggctgagggagttctaccaggtcgtgcacacccacaaacctcactttatggccctgcattgtcaagagtttgggggcaagaattatgaggctagcatgtctcacgttgacaaatttgtgaaagagctgctgtcctcagacgccatgaaggagtataatcgggcaagggtgtacttggacgagaactacaaatcacaagagcactttaccgctcttgggagcttctacttcctgcatgagagcctcaagaacatctaccagttcgactttaaagccaagaaatatcgaaaggtagcggggaaagaaatctactctgacacactggagagcaccccaatgttggagaaggaaaaattcccccaagactattttccagagcggcacgttccacatacctcacttgaagcgttgcttatcctgcacgaggaccctcagttgcctgatccacacctgcccctttag

SEQ ID NO: 157143 - DNA, 1068 bp, Artificial Sequence
  derived and/or modified sequence
atggcgggaaaagccgccgcacctggaaccgccgtccttctggtgacagctaatgttggatctctgtttgatgatcctgaaaacctccagaaaaactggctgagggaattctaccaggtggtacatacccacaagccccactttatggccctgcattgtcaggaattcggagggaagaactatgaagccagcatgtcccacgtggacaaattcgtgaaagagctactgtctagcgatgctatgaaagagtacaaccgagccagagtgtatctggatgagaattacaagagtcaggaacactttactgctctaggttcattctacttcctgcacgagtctctgaagaatatctaccagtttgactttaaagccaagaaataccgaaaagtcgctgggaaagagatttacagcgacaccttggaaagcacccccatgctcgaaaaggaaaagtttccccaagactatttcccggaatgtaagtggtcacggaagggattcatccgcactcgctggtgcatagccgattgcgctttcgacctcgttaatattcacctctttcatgatgcgtctaacctcgtcgcctgggagacgtctccaagcgtgtactctggcattagacacaaggctctgggttacgttttagatagaattatcgaccagcggtttgaaaaagtcagctatttcgtgttcggtgactttaactttcgactcgatagcaaaagcgtcgtcgagctgttagagttcgataaagaactgtctgtgttcaaagataggctgtacgagctcgacatctcctttccgccatcttatccctatagtgaagacgccagacagggcgagcaatatatgaacacacgatgtcccgcctggtgcgaccgcatcttgatgtctccaagtgccaaggaactggttctgcgatcagagtcagaggagaaagtcgttacctacgatcacataggaccaaacgtatgcatgggcgatcacaaaccagtgttcctggcctttagaattatgcctggcgccggaaagccacacgcccacgttcataaatgttgcgtggtgcagtag

SEQ ID NO: 157144 - DNA, 990 bp, Artificial Sequence
  derived and/or modified sequence
atgaaggaatacaatcgggcacgagtctacctcgacgagaactataagagccaggaacattttacagcgctcggcagcttctacttcctccatgaaagtttgaaaaatatttaccagttcgacttcaaagctaaaaaatatcgcaaagtggcgggaaaagagatttattcagacactctcgaaagcactcccatgctggagaaggagaaattccccttgctgccacgggtccagatggtgaaaaagcgtttacatcccgacgaggtcatcgcggattgtgccttcgacttagtcaacatacacctttttcacgatgcctccaacttggtagcctgggagacatccccttcggtatactcagggattagacataaagctctcgggtacgtgctagatcgtatcatcgaccaaaggttcgagaaagtatcttacttcgtatttggagattttaattttaggttggactcgaagagtgtcgttgagactttgtgtacgaaagccacaatgcagaccgtgagggctgccgacacgaatgaggtcgtcaagctgatcttccgcgagtcagataatgaccgcaaagtcatgctgcagcttgaaaagaagcttttcgactacttcaatcaggaggtttttagggataataacggaacagctctacttgaattcgataaagaactgagcgtgttcaaagatcggctatatgagctcgatatctccttcccaccttcctacccatacagcgaagacgcaagacagggcgaacaatacatgaacacccgatgtcccgcatggtgcgatcgcatcctgatgagtcccagcgccaaggagctggttttgcgatctgagagtgaggagaaggtggtcacctacgatcacatcggaccaaatgtttgcatgggggatcacaagccggttttcttggctttccgcatcatgcctggggcaggcaagccccacgcgcatgtgcacaaatgctgtgtggttcagtag

SEQ ID NO: 157145 - DNA, 546 bp, Artificial Sequence
  derived and/or modified sequence
gctgcggctcccggtacagccgtgcttctagtgactgctaacgttgggagccttttcgacgatcccgaaaacctccaaaagaactggcttagggaattttaccaagtggtacatactcataagccccattttatggctctgcactgtcaagagtttggggggaagaattacgaagcctccatgagtcacgtggataaattcgttaaagagctgctgtcatcagatgccatgaaggagtataaccgtgctcgcgtgtatctggatgagaactacaaaagtcaagaacacttcacggcactaggctctttctactttctccacgagagcttgaaaaacatctatcagttcgactttaaggcaaagaaatataggaaagtggcagggaaggagatctactccgatacactggaatcaacccccatgctcgagaaggaaaagtttcctcaggactatttccccgagagacatgtaccccataccagtttagaggccctgctgatccttcatgaggatccccagttgccagatcctcatctgcctttatag

SEQ ID NO: 157146 - DNA, 832 bp, Artificial Sequence
  derived and/or modified sequence
gcagaagaactggcttcgggaattttaccaggtcgtgcacacacacaagccgcacttcatggccttgcactgtcaggagtttggagggaagaactacgaggcctccatgtcccacgtggacaagttcgtcaaagaactattgtcgagtgatgcgatgaaagaatataacagggctcgagtctacctggatgaaaactacaaatcccaggagcacttcacggcactaggaagcttttattttcttcatgagtccttaaaaaacatctaccagtttgactttaaagctaagaagtatagaaaggtcgctggcaaagagatctactcggataccttagagagcacgcccatgctggagaaggagaagtttccgcaggactacttccccgagtgcaaatggtcaagaaaaggcttcatccggacgaggtggtgcattgcagactgtgcctttgacttggtgaatatccatcttttccatgatgcttccaatctggtcgcctgggaaacaagcccttccgtgtactcgggaatccggcacaaggcactgggctacgtgctggacagaatcattgatcagcgattcgagaaggtttcctactttgtatttggtgatttcaacttccggctggattccaagtccgtcgtggagctcttggagtttgacaaggagttgtctgtctttaaggacagactgtatgaactggacatctcgttccctcccagctacccgtacagtgaggacgcccgccagggtgagcagtacatgaacacccggtgcccagcctggtgtgaccgcatcctcatgtccccgtctgccaaggagctggtgctgcgg

SEQ ID NO: 157147 - DNA, 1432 bp, Artificial Sequence
  derived and/or modified sequence
gcgcgggccgctgtgaggcgcggcggcgagcgacgggcgcggggccgcggagcagcgagcgagcgagcgagcgcgaggccggagccccggccaggcccggccgacccgccgagcccgcgatgcgccccggggccgccccccggcgcagctgacgccccgcggccccgcgaagaccccggccggccggtcccggaggaagcggccgccgccgccgccgcccagcccagcgcccgcgccgcccgggcaccatggcggggaaggcggccgccccgggcaccgcggtgctgctggtcacggccaacgtgggctcgctcttcgacgacccagaaaacctgcagaagaactggcttcgggaattttaccaggtcgtgcacacacacaagccgcacttcatggccttgcactgtcaggagtttggagggaagaactacgaggcctccatgtcccacgtggacaagttcgtcaaagaactattgtcgagtgatgcgatgaaagaatataacagggctcgagtctacctggatgaaaactacaaatcccaggagcacttcacggcactaggaagcttttattttcttcatgagtccttaaaaaacatctaccagtttgactttaaagctaagaagtatagaaaggtcgctggcaaagagatctactcggataccttagagagcacgcccatgctggagaaggagaagtttccgcaggactacttccccgagtgcaaatggtcaagaaaaggcttcatccggacgaggtggtgcattgcagactgtgcctttgacttggtgaatatccatcttttccatgatgcttccaatctggtcgcctgggaaacaagcccttccgtgtactcgggaatccggcacaaggcactgggctacgtgctggacagaatcattgatcagcgattcgagaaggtttcctactttgtatttggtgatttcaacttccggctggattccaagtccgtcgtggagacgctctgcacaaaagccaccatgcagacggtccgggccgccgacaccaatgaagtggtgaagctcatatttcgtgagtcggacaacgaccggaaggttatgctccagttagaaaagaaactcttcgactacttcaaccaggaggttttccgagacaacaacggcaccgcgctcttggagtttgacaaggagttgtctgtctttaaggacagactgtatgaactggacatctcgttccctcccagctacccgtacagtgaggacgcccgccagggtgagcagtacatgaacacccggtgcccagcctggtgtgaccgcatcctcatgtccccgtctgccaaggagctggtgctgcgggtgagtgtgtgctgccccagccctgggcacagagggatgtggagcgctgggtctggtctggcccagccctggtgacagggccccaggggtggggg

SEQ ID NO: 157148 - DNA, 2962 bp, Artificial Sequence
  derived and/or modified sequence
ggaactttcccagcggatctaatggctgcgcgcgggccgctgtgaggcgcggcggcgagcgacgggcgcggggccgcggagcagcgagcgagcgagcgagcgcgaggccggagccccggccaggcccggccgacccgccgagcccgcgatgcgccccggggccgccccccggcgcagctgacgccccgcggccccgcgaagaccccggccggccggtcccggaggaagcggccgccgccgccgccgcccagcccagcgcccgcgccgcccgggcaccatggcggggaaggcggccgccccgggcaccgcggtgctgctggtcacggccaacgtgggctcgctcttcgacgacccagaaaacctgcagaagaactggcttcgggaattttaccaggtcgtgcacacacacaagccgcacttcatggccttgcactgtcaggagtttggagggaagaactacgaggcctccatgtcccacgtggacaagttcgtcaaagaactattgtcgagtgatgcgatgaaagaatataacagggctcgagtctacctggatgaaaactacaaatcccaggagcacttcacggcactaggaagcttttattttcttcatgagtccttaaaaaacatctaccagtttgactttaaagctaagaagtatagaaaggtcgctggcaaagagatctactcggataccttagagagcacgcccatgctggagaaggagaagtttccgcaggactacttccccgagtgcaaatggtcaagaaaaggcttcatccggacgaggtggtgcattgcagactgtgcctttgacttggtgaatatccatcttttccatgatgcttccaatctggtcgcctgggaaacaagcccttccgtgtactcgggaatccggcacaaggcactgggctacgtgctggacagaatcattgatcagcgattcgagaaggtttcctactttgtatttggtgatttcaacttccggctggattccaagtccgtcgtggagacgctctgcacaaaagccaccatgcagacggtccgggccgccgacaccaatgaagtggtgaagctcatatttcgtgagtcggacaacgaccggaaggttatgctccagttagaaaagaaactcttcgactacttcaaccaggaggttttccgagacaacaacggcaccgcgctcttggagtttgacaaggagttgtctgtctttaaggacagactgtatgaactggacatctcgttccctcccagctacccgtacagtgaggacgcccgccagggtgagcagtacatgaacacccggtgcccagcctggtgtgaccgcatcctcatgtccccgtctgccaaggagctggtgctgcggtcggagagcgaggagaaggttgtcacctatgaccacattgggcccaacgtctgcatgggagaccacaagcccgtgttcctggccttccgaatcatgcccggggcaggtaaacctcatgcccatgtgcacaagtgttgtgtcgtgcagtgacgtggtgggaagagatgccagcgccacgagaggacacttcgtgagcctccctgtagccgtggaccgaatacgcactcttgaaagctgcatcgagaacccgcccaagcgccacctgctagacggccagccccacacttcgcttcagcctccggaccattccggagcagcctcacatacctcactgtctcgtctgtctatgtgacattaagtagaaatattggttttttttttttttttttaaataagtcacagtcctgttgtcaaaactctaatagacagcaaagagggtctgtaccgtagacttcacagttttcagtttttaatgattgccagtggaggggcttcttcagcacagagaccccccactgtgtccagggaccccctctgccaggtggaggtgtgtccaggggctggggaagccgagacgggcactccctctgccggccggcagcgtggccctgagcatggcaagggggtctgtctctgccgatgctccttccgcggcactgactctgcgccgtgtcacatggtttttgaatcacactgcagctgctttccatttttatatatatataaatatatataaatatatactttttaaaaataatttataaatcttaccaaaacttatgctaaatatactttccagtatgaacgcacaggagagtcccatcagcaggcggcattggagtctaggagctcagctgtgtgtccatcaacacacaaattcgtaaaaaacacacatggcctcgccatcgtgggtaaaatcggccccacagcacgtctgcaccagcgggccgttactcccatgccgttcttctgtgtaatattaagaactgaatgtgaagtttatagctagcctgggtgtaccttttaagaattttgtaaaccgtttgtctgtcttttgttactgttttatggtgccaagtatcctacgttacaacaataatatcatgggagaaatagaaatagcctagtttgcttccaatagaaactgcttttaacatgggctgtatataaaaatattaaagagaaacaaaactgtacatttcctcattgctccgctacagacaacccatgtcataaccttgttgcaaatatttttctcctatagcagtaagtacagcattagaaggtgattagagagtctgttgatgaaacacaaatgtatgttttattgattttactttagaacactacagagttcctggaccgggtgaaggcattagctgggtgtttgtgtgggataaatactaccactgcaagtgactgctgtccgctgcggaatctgttcttggtggaagcacaggtccgtgtcgctgctgtggttgccgctgtccgcggttcaacacggagtccgccccgcgggtttcagctgttggtcgttctgaggggcctttggaagtgaccggtctggttcctaagcaataaaattgaccgtggtga

SEQ ID NO: 157149 - DNA, 806 bp, Artificial Sequence
  derived and/or modified sequence
gcgcgggccgctgtgaggcgcggcggcgagcgacgggcgcggggccgcggagcagcgagcgagcgagcgagcgcgaggccggagccccggccaggcccggccgacccgccgagcccgcgatgcgccccggggccgccccccggcgcagctgacgccccgcggccccgcgaagaccccggccggccggtcccggaggaagcggccgccgccgccgccgcccagcccagcgcccgcgccgcccgggcaccatggcggggaaggcggccgccccgggcaccgcggtgctgctggtcacggccaacgtgggctcgctcttcgacgacccagaaaacctgcagaagaactggcttcgggaattttaccaggtcgtgcacacacacaagccgcacttcatggccttgcactgtcaggagtttggagggaagaactacgaggcctccatgtcccacgtggacaagttcgtcaaagaactattgtcgagtgatgcgatgaaagaatataacagggctcgagtctacctggatgaaaactacaaatcccaggagcacttcacggcactaggaagcttttattttcttcatgagtccttaaaaaacatctaccagtttgactttaaagctaagaagtatagaaaggtcgctggcaaagagatctactcggataccttagagagcacgcccatgctggagaaggagaagtttccgcaggactacttccccgagcggcatgttccacacacctcattggaggctctactgattttgcatgaggacccccagctgcctgacccccacctgccactctga

SEQ ID NO: 157150 - DNA, 2767 bp, Artificial Sequence
  derived and/or modified sequence
gcgcgggccgctgtgaggcgcggcggcgagcgacgggcgcggggccgcggagcagcgagcgagcgagcgagcgcgaggccggagccccggccaggcccggccgacccgccgagcccgcgatgcgccccggggccgccccccggcgcagctgacgccccgcggccccgcgaagaccccggccggccggtcccggaggaagcggccgccgccgccgccgcccagcccagcgcccgcgccgcccgggcaccatggcggggaaggcggccgccccgggcaccgcggtgctgctggtcacggccaacgtgggctcgctcttcgacgacccagaaaacctgcagaagaactggcttcgggaattttaccaggtcgtgcacacacacaagccgcacttcatggccttgcactgtcaggagtttggagggaagaactacgaggcctccatgtcccacgtggacaagttcgtcaaagaactattgtcgagtgatgcgatgaaagaatataacagggctcgagtctacctggatgaaaactacaaatcccaggagcacttcacggcactaggaagcttttattttcttcatgagtccttaaaaaacatctaccagtttgactttaaagctaagaagtatagaaaggtcgctggcaaagagatctactcggataccttagagagcacgcccatgctggagaaggagaagtttccgcaggactacttccccgagtgcaaatggtcaagaaaaggcttcatccggacgaggtggtgcattgcagactgtgcctttgacttggtgaatatccatcttttccatgatgcttccaatctggtcgcctgggaaacaagcccttccgtgtactcgggaatccggcacaaggcactgggctacgtgctggacagaatcattgatcagcgattcgagaaggtttcctactttgtatttggtgatttcaacttccggctggattccaagtccgtcgtggagctcttggagtttgacaaggagttgtctgtctttaaggacagactgtatgaactggacatctcgttccctcccagctacccgtacagtgaggacgcccgccagggtgagcagtacatgaacacccggtgcccagcctggtgtgaccgcatcctcatgtccccgtctgccaaggagctggtgctgcggtcggagagcgaggagaaggttgtcacctatgaccacattgggcccaacgtctgcatgggagaccacaagcccgtgttcctggccttccgaatcatgcccggggcaggtaaacctcatgcccatgtgcacaagtgttgtgtcgtgcagtgacgtggtgggaagagatgccagcgccacgagaggacacttcgtgagcctccctgtagccgtggaccgaatacgcactcttgaaagctgcatcgagaacccgcccaagcgccacctgctagacggccagccccacacttcgcttcagcctccggaccattccggagcagcctcacatacctcactgtctcgtctgtctatgtgacattaagtagaaatattggttttttttttttttttttaaataagtcacagtcctgttgtcaaaactctaatagacagcaaagagggtctgtaccgtagacttcacagttttcagtttttaatgattgccagtggaggggcttcttcagcacagagaccccccactgtgtccagggaccccctctgccaggtggaggtgtgtccaggggctggggaagccgagacgggcactccctctgccggccggcagcgtggccctgagcatggcaagggggtctgtctctgccgatgctccttccgcggcactgactctgcgccgtgtcacatggtttttgaatcacactgcagctgctttccatttttatatatatataaatatatataaatatatactttttaaaaataatttataaatcttaccaaaacttatgctaaatatactttccagtatgaacgcacaggagagtcccatcagcaggcggcattggagtctaggagctcagctgtgtgtccatcaacacacaaattcgtaaaaaacacacatggcctcgccatcgtgggtaaaatcggccccacagcacgtctgcaccagcgggccgttactcccatgccgttcttctgtgtaatattaagaactgaatgtgaagtttatagctagcctgggtgtaccttttaagaattttgtaaaccgtttgtctgtcttttgttactgttttatggtgccaagtatcctacgttacaacaataatatcatgggagaaatagaaatagcctagtttgcttccaatagaaactgcttttaacatgggctgtatataaaaatattaaagagaaacaaaactgtacatttcctcattgctccgctacagacaacccatgtcataaccttgttgcaaatatttttctcctatagcagtaagtacagcattagaaggtgattagagagtctgttgatgaaacacaaatgtatgttttattgattttactttagaacactacagagttcctggaccgggtgaaggcattagctgggtgtttgtgtgggataaatactaccactgcaagtgactgctgtccgctgcggaatctgttcttggtggaagcacaggtccgtgtcgctgctgtggttgccgctgtccgcggttcaacacggagtccgccccgcgggtttcagctgttggtcgttctgaggggcctttggaagtgaccggtctggttcctaagcaataaaattgaccgtggtgaaaata

SEQ ID NO: 157151 - DNA, 2929 bp, Artificial Sequence
  derived and/or modified sequence
gcgcgggccgctgtgaggcgcggcggcgagcgacgggcgcggggccgcggagcagcgagcgagcgagcgagcgcgaggccggagccccggccaggcccggccgacccgccgagcccgcgatgcgccccggggccgccccccggcgcagctgacgccccgcggccccgcgaagaccccggccggccggtcccggaggaagcggccgccgccgccgccgcccagcccagcgcccgcgccgcccgggcaccatggcggggaaggcggccgccccgggcaccgcggtgctgctggtcacggccaacgtgggctcgctcttcgacgacccagaaaacctgcagaagaactggcttcgggaattttaccaggtcgtgcacacacacaagccgcacttcatggccttgcactgtcaggagtttggagggaagaactacgaggcctccatgtcccacgtggacaagttcgtcaaagaactattgtcgagtgatgcgatgaaagaatataacagggctcgagtctacctggatgaaaactacaaatcccaggagcacttcacggcactaggaagcttttattttcttcatgagtccttaaaaaacatctaccagtttgactttaaagctaagaagtatagaaaggtcgctggcaaagagatctactcggataccttagagagcacgcccatgctggagaaggagaagtttccgctacttccccgagtgcaaatggtcaagaaaaggcttcatccggacgaggtgattgcagactgtgcctttgacttggtgaatatccatcttttccatgatgcttccaatctggtcgcctgggaaacaagcccttccgtgtactcgggaatccggcacaaggcactgggctacgtgctggacagaatcattgatcagcgattcgagaaggtttcctactttgtatttggtgatttcaacttccggctggattccaagtccgtcgtggagacgctctgcacaaaagccaccatgcagacggtccgggccgccgacaccaatgaagtggtgaagctcatatttcgtgagtcggacaacgaccggaaggttatgctccagttagaaaagaaactcttcgactacttcaaccaggaggttttccgagacaacaacggcaccgcgctcttggagtttgacaaggagttgtctgtctttaaggacagactgtatgaactggacatctcgttccctcccagctacccgtacagtgaggacgcccgccagggtgagcagtacatgaacacccggtgcccagcctggtgtgaccgcatcctcatgtccccgtctgccaaggagctggtgctgcggtcggagagcgaggagaaggttgtcacctatgaccacattgggcccaacgtctgcatgggagaccacaagcccgtgttcctggccttccgaatcatgcccggggcaggtaaacctcatgcccatgtgcacaagtgttgtgtcgtgcagtgacgtggtgggaagagatgccagcgccacgagaggacacttcgtgagcctccctgtagccgtggaccgaatacgcactcttgaaagctgcatcgagaacccgcccaagcgccacctgctagacggccagccccacacttcgcttcagcctccggaccattccggagcagcctcacatacctcactgtctcgtctgtctatgtgacattaagtagaaatattggttttttttttttttttttaaataagtcacagtcctgttgtcaaaactctaatagacagcaaagagggtctgtaccgtagacttcacagttttcagtttttaatgattgccagtggaggggcttcttcagcacagagaccccccactgtgtccagggaccccctctgccaggtggaggtgtgtccaggggctggggaagccgagacgggcactccctctgccggccggcagcgtggccctgagcatggcaagggggtctgtctctgccgatgctccttccgcggcactgactctgcgccgtgtcacatggtttttgaatcacactgcagctgctttccatttttatatatatataaatatatataaatatatactttttaaaaataatttataaatcttaccaaaacttatgctaaatatactttccagtatgaacgcacaggagagtcccatcagcaggcggcattggagtctaggagctcagctgtgtgtccatcaacacacaaattcgtaaaaaacacacatggcctcgccatcgtgggtaaaatcggccccacagcacgtctgcaccagcgggccgttactcccatgccgttcttctgtgtaatattaagaactgaatgtgaagtttatagctagcctgggtgtaccttttaagaattttgtaaaccgtttgtctgtcttttgttactgttttatggtgccaagtatcctacgttacaacaataatatcatgggagaaatagaaatagcctagtttgcttccaatagaaactgcttttaacatgggctgtatataaaaatattaaagagaaacaaaactgtacatttcctcattgctccgctacagacaacccatgtcataaccttgttgcaaatatttttctcctatagcagtaagtacagcattagaaggtgattagagagtctgttgatgaaacacaaatgtatgttttattgattttactttagaacactacagagttcctggaccgggtgaaggcattagctgggtgtttgtgtgggataaatactaccactgcaagtgactgctgtccgctgcggaatctgttcttggtggaagcacaggtccgtgtcgctgctgtggttgccgctgtccgcggttcaacacggagtccgccccgcgggtttcagctgttggtcgttctgaggggcctttggaagtgaccggtctggttcctaagcaataaaattgaccgtggtgaaaata

SEQ ID NO: 157152 - DNA, 594 bp, Artificial Sequence
  derived and/or modified sequence
gcggccgccccgggcaccgcggtgctgctggtcacggccaacgtgggctcgctcttcgacgacccagaaaacctgcagaagaactggcttcgggaattttaccaggtcgtgcacacacacaagccgcacttcatggccttgcactgtcaggagtttggagggaagaactacgaggcctccatgtcccacgtggacaagttcgtcaaagaactattgtcgagtgatgcgatgaaagaatataacagggctcgagtctacctggatgaaaactacaaatcccaggagcacttcacggcactaggaagcttttattttcttcatgagtccttaaaaaacatctaccagtttgactttaaagctaagaagtatagaaaggtcgctggcaaagagatctactcggataccttagagagcacgcccatgctggagaaggagaagtttccgcaggactacttccccgagcggcatgttccacacacctcattggaggctctactgattttgcatgaggacccccagctgcctgacccccacctgccactctgacccttttggttcacggcgatgcattcggagcattgtcactgttccctg

SEQ ID NO: 157153 - DNA, 837 bp, Artificial Sequence
  derived and/or modified sequence
tgacagaagaactggctgcgggagttctaccaggtggtgcacacccacaagccccacttcatggccctgcactgccaggagtttggaggcaagaactatgaggcctccatgagccacgtggacaagtttgtgaaggagctgctgagcagtgatgccatgaaggagtacaacagagcccgggtgtacctggatgagaactacaagagccaggagcacttcaccgccctgggcagcttctacttcctgcacgagagcctgaagaacatctaccagtttgacttcaaggccaagaagtacaggaaggtggccggcaaggagatctacagcgacaccctggagagcacccccatgctggagaaggagaagttcccccaggactacttccctgagtgcaagtggagcaggaagggcttcatccgcacccgctggtgcatcgctgactgtgcctttgacctggtgaacatccacctgttccatgatgccagcaacctggtggcctgggagaccagccccagcgtgtacagcggcatccgccacaaggccctgggctacgtgctggaccgcatcatcgaccagagatttgagaaggtgtcctactttgtgtttggagacttcaacttccggctggacagcaagtctgtggtggagctgctggagtttgacaaggagctgtctgtgttcaaggaccggctgtatgagctggacatctccttccccccatcctacccctacagtgaagatgcccggcagggcgagcagtacatgaacacccgctgcccagcctggtgtgaccgcatcctgatgagccccagcgccaaggagctggtgctgaggtag

SEQ ID NO: 157154 - DNA, 1164 bp, Artificial Sequence
  derived and/or modified sequence
atggccggcaaggccgccgcccctggaacagctgtgctgctggtgacagccaacgtgggcagcctgtttgatgatcctgagaacctgcagaagaactggctgcgggagttctaccaggtggtgcacacccacaagccccacttcatggccctgcactgccaggagtttggaggcaagaactatgaggcctccatgagccacgtggacaagtttgtgaaggagctgctgagcagtgatgccatgaaggagtacaacagagcccgggtgtacctggatgagaactacaagagccaggagcacttcaccgccctgggcagcttctacttcctgcacgagagcctgaagaacatctaccagtttgacttcaaggccaagaagtacaggaaggtggccggcaaggagatctacagcgacaccctggagagcacccccatgctggagaaggagaagttcccccaggactacttccctgagtgcaagtggagcaggaagggcttcatccgcacccgctggtgcatcgctgactgtgcctttgacctggtgaacatccacctgttccatgatgccagcaacctggtggcctgggagaccagccccagcgtgtacagcggcatccgccacaaggccctgggctacgtgctggaccgcatcatcgaccagagatttgagaaggtgtcctactttgtgtttggagacttcaacttccggctggacagcaagtctgtggtggagaccctgtgcaccaaggccaccatgcagacagtgcgggctgctgacaccaatgaggtggtgaagctgatcttccgggagagtgacaatgacaggaaggtgatgctgcagctggagaagaagctgtttgactacttcaaccaggaggtgttccgggacaacaacggcacagccctgctggagtttgacaaggagctgagcgtcttcaaggaccggctgtatgagctggacatctccttcccccccagctacccctacagtgaagatgcccggcagggcgagcagtacatgaacacccgctgcccagcctggtgtgaccgcatcctgatgagccccagcgccaaggagctggtgctgcgggtgtctgtgtgctgccccagccctggccaccggggcatgtggagcgctggcagcggcctggcccagccctggtag

SEQ ID NO: 157155 - DNA, 1239 bp, Artificial Sequence
  derived and/or modified sequence
atggccggcaaggccgccgcccctggaacagctgtgctgctggtgacagccaacgtgggcagcctgtttgatgatcctgagaacctgcagaagaactggctgcgggagttctaccaggtggtgcacacccacaagccccacttcatggccctgcactgccaggagtttggaggcaagaactatgaggcctccatgagccacgtggacaagtttgtgaaggagctgctgagcagtgatgccatgaaggagtacaacagagcccgggtgtacctggatgagaactacaagagccaggagcacttcaccgccctgggcagcttctacttcctgcacgagagcctgaagaacatctaccagtttgacttcaaggccaagaagtacaggaaggtggccggcaaggagatctacagcgacaccctggagagcacccccatgctggagaaggagaagttcccccaggactacttccctgagtgcaagtggagcaggaagggcttcatccgcacccgctggtgcatcgctgactgtgcctttgacctggtgaacatccacctgttccatgatgccagcaacctggtggcctgggagaccagccccagcgtgtacagcggcatccgccacaaggccctgggctacgtgctggaccgcatcatcgaccagagatttgagaaggtgtcctactttgtgtttggagacttcaacttccggctggacagcaagtctgtggtggagaccctgtgcaccaaggccaccatgcagacagtgcgggctgctgacaccaatgaggtggtgaagctgatcttccgggagagtgacaatgacaggaaggtgatgctgcagctggagaagaagctgtttgactacttcaaccaggaggtgttccgggacaacaacggcacagccctgctggagtttgacaaggagctgagcgtcttcaaggaccggctgtatgagctggacatctccttcccccccagctacccctacagtgaagatgcccggcagggcgagcagtacatgaacacccgctgcccagcctggtgtgaccgcatcctgatgagccccagcgccaaggagctggtgctgcggtctgagagcgaggagaaggtggtgacctatgaccacatcggccccaacgtgtgcatgggagaccacaagcctgtgttcctggccttccgcatcatgcctggggccggcaagccccacgcccacgtgcacaagtgctgcgtggtgcagtag

SEQ ID NO: 157156 - DNA, 558 bp, Artificial Sequence
  derived and/or modified sequence
atggccggcaaggccgccgcccctggaacagctgtgctgctggtgacagccaacgtgggcagcctgtttgatgatcctgagaacctgcagaagaactggctgcgggagttctaccaggtggtgcacacccacaagccccacttcatggccctgcactgccaggagtttggaggcaagaactatgaggcctccatgagccacgtggacaagtttgtgaaggagctgctgagcagtgatgccatgaaggagtacaacagagcccgggtgtacctggatgagaactacaagagccaggagcacttcaccgccctgggcagcttctacttcctgcacgagagcctgaagaacatctaccagtttgacttcaaggccaagaagtacaggaaggtggccggcaaggagatctacagcgacaccctggagagcacccccatgctggagaaggagaagttcccccaggactacttccctgagcggcacgtgccccacaccagcctggaggccctgctgatcctgcacgaggacccccagctgcctgacccccacctgcccctgtag

SEQ ID NO: 157157 - DNA, 1068 bp, Artificial Sequence
  derived and/or modified sequence
atggccggcaaggccgccgcccctggaacagctgtgctgctggtgacagccaacgtgggcagcctgtttgatgatcctgagaacctgcagaagaactggctgcgggagttctaccaggtggtgcacacccacaagccccacttcatggccctgcactgccaggagtttggaggcaagaactatgaggcctccatgagccacgtggacaagtttgtgaaggagctgctgagcagtgatgccatgaaggagtacaacagagcccgggtgtacctggatgagaactacaagagccaggagcacttcaccgccctgggcagcttctacttcctgcacgagagcctgaagaacatctaccagtttgacttcaaggccaagaagtacaggaaggtggccggcaaggagatctacagcgacaccctggagagcacccccatgctggagaaggagaagttcccccaggactacttccctgagtgcaagtggagcaggaagggcttcatccgcacccgctggtgcatcgctgactgtgcctttgacctggtgaacatccacctgttccatgatgccagcaacctggtggcctgggagaccagccccagcgtgtacagcggcatccgccacaaggccctgggctacgtgctggaccgcatcatcgaccagagatttgagaaggtgtcctactttgtgtttggagacttcaacttccggctggacagcaagtctgtggtggagctgctggagtttgacaaggagctgtctgtgttcaaggaccggctgtatgagctggacatctccttccccccatcctacccctacagtgaagatgcccggcagggcgagcagtacatgaacacccgctgcccagcctggtgtgaccgcatcctgatgagccccagcgccaaggagctggtgctgcggtctgagagcgaggagaaggtggtgacctatgaccacatcggccccaacgtgtgcatgggagaccacaagcctgtgttcctggccttccgcatcatgcctggagctgggaagccccacgcccacgtgcacaagtgctgcgtggtgcagtag

SEQ ID NO: 157158 - DNA, 990 bp, Artificial Sequence
  derived and/or modified sequence
atgaaggagtacaacagagcccgggtgtacctggatgagaactacaagagccaggagcacttcaccgccctgggcagcttctacttcctgcacgagagcctgaagaacatctaccagtttgacttcaaggccaagaagtacaggaaggtggccggcaaggagatctacagcgacaccctggagagcacccccatgctggagaaggagaagttccccctgctgccccgggtgcagatggtgaagaagaggctgcacccagatgaggtgattgctgactgtgcctttgacctggtgaacatccacctgttccatgatgccagcaacctggtggcctgggagaccagccccagcgtgtacagcggcatccgccacaaggccctgggctacgtgctggaccgcatcatcgaccagagatttgagaaggtgtcctactttgtgtttggagacttcaacttccggctggacagcaagtctgtggtggagaccctgtgcaccaaggccaccatgcagacagtgcgggctgctgacaccaatgaggtggtgaagctgatcttccgggagagtgacaatgacaggaaggtgatgctgcagctggagaagaagctgtttgactacttcaaccaggaggtgttccgggacaacaatggaacagccctgctggagtttgacaaggagctgtctgtgttcaaggaccggctgtatgagctggacatctccttccccccatcctacccctacagtgaagatgcccggcagggcgagcagtacatgaacacccgctgcccagcctggtgtgaccgcatcctgatgagccccagcgccaaggagctggtgctgcggtctgagagcgaggagaaggtggtgacctatgaccacatcggccccaacgtgtgcatgggagaccacaagcctgtgttcctggccttccgcatcatgcctggagctgggaagccccacgcccacgtgcacaagtgctgcgtggtgcagtag

SEQ ID NO: 157159 - DNA, 546 bp, Artificial Sequence
  derived and/or modified sequence
gctgctgcccctggaacagctgtgctgctggtgacagccaacgtgggcagcctgtttgatgatcctgagaacctgcagaagaactggctgcgggagttctaccaggtggtgcacacccacaagccccacttcatggccctgcactgccaggagtttggaggcaagaactatgaggcctccatgagccacgtggacaagtttgtgaaggagctgctgagcagtgatgccatgaaggagtacaacagagcccgggtgtacctggatgagaactacaagagccaggagcacttcaccgccctgggcagcttctacttcctgcacgagagcctgaagaacatctaccagtttgacttcaaggccaagaagtacaggaaggtggccggcaaggagatctacagcgacaccctggagagcacccccatgctggagaaggagaagttcccccaggactacttccctgagcggcacgtgccccacaccagcctggaggccctgctgatcctgcacgaggacccccagctgcctgacccccacctgcccctgtag

SEQ ID NO: 157160 - DNA, 837 bp, Artificial Sequence
  derived and/or modified sequence
tgacagaagaactggctgcgggagttctaccaggtggtgcacacccataaacctcactttatggctctgcactgtcaggagttcggtggcaagaactacgaggcaagtatgagccacgtggataagtttgttaaggaactgttgtcatctgatgctatgaaggaatataatagggctcgagtgtacctggacgaaaactacaaaagtcaggaacacttcactgcactggggtctttttatttcctccatgagtcgctcaagaacatctatcagttcgatttcaaggcaaaaaaataccgaaaggtcgctggaaaggagatctactctgatactctcgagagtacccccatgctggaaaaggagaagttcccacaggattatttccccgaatgcaaatggagccgaaaaggcttcatcaggacacgctggtgtattgccgactgtgcttttgacctagtaaatattcatctcttccacgatgccagcaaccttgtggcgtgggaaacttccccgagcgtgtactctggtatccgccacaaggcgctcgggtatgtcctggataggatcatcgaccagcggttcgaaaaggtctcttattttgtgttcggggacttcaatttccgtcttgattcaaagtcagttgttgagctgctagagtttgataaggaactaagtgtgttcaaagaccggctgtacgagctcgacatctcttttccgccttcatacccgtacagtgaggacgctcgccaaggcgagcagtatatgaacactcggtgccccgcttggtgcgaccgcatcctcatgtccccatctgctaaggagctggttctgagatag

SEQ ID NO: 157161 - DNA, 1164 bp, Artificial Sequence
  derived and/or modified sequence
atggccggcaaggccgccgcccccggcaccgccgtgctgctggtgactgcgaatgtgggcagcctcttcgatgacccggagaaccttcagaaaaattggctacgagagttttatcaagtcgtgcatactcataagccacacttcatggcattgcattgccaggaattcgggggaaagaattacgaggcctctatgagtcatgtggataagttcgtgaaagaattactcagcagcgacgccatgaaggagtataaccgggccagggtgtatctcgacgagaactacaaatcccaggagcacttcacagcactcggctccttttattttttacatgaatctctcaagaacatctatcaatttgatttcaaagccaaaaaatatcggaaagtggctggcaaggaaatctatagcgacacactcgaaagtaccccaatgctggagaaggagaaatttccacaggactatttccctgaatgcaaatggagtagaaaaggtttcatcagaacccggtggtgtatcgctgactgcgcctttgatctggtcaatattcaccttttccacgatgcttctaatctggtcgcctgggagacctctcctagcgtttacagcgggatcagacacaaagccctcggatatgttctggatcggatcatcgaccagaggtttgagaaagtttcctactttgtttttggggacttcaacttccggcttgacagcaagtccgttgtagagaccttgtgcacgaaggcgacaatgcagacggtgcgggcagcggacacgaatgaggtggtcaagttgatattcagggaatcagacaacgatagaaaggtcatgctgcaactcgaaaagaaattgttcgattacttcaatcaggaagtgtttagggacaacaacggaaccgccctgcttgagttcgataaggaactgtccgttttcaaagacaggctctacgagttggatatatcatttccaccctcgtacccttactctgaggacgccaggcagggggaacagtacatgaatactcgctgtcccgcatggtgcgatcgtatcttaatgagtcccagtgctaaggagctggtcttgagggtctcagtgtgctgtccctcacccggccaccgcggcatgtggtcggcagggtccggactcgctcagccttggtag

SEQ ID NO: 157162 - DNA, 1239 bp, Artificial Sequence
  derived and/or modified sequence
atggccggcaaggccgccgcccccggcaccgccgtgctgctggtgacagccaacgtcggatccctcttcgatgatcccgaaaacctccaaaaaaattggttgagagagttttatcaagtggtgcacacccacaaacctcacttcatggctctccattgtcaagagttcgggggtaaaaactacgaagcaagcatgagccacgtcgataaattcgtgaaagagctgttaagctcagatgcaatgaaagagtataatcgggcgcgggtgtacctggacgagaactacaagtctcaggagcactttaccgcacttggaagcttctattttctccacgaaagtttaaaaaacatctatcagttcgacttcaaggcaaaaaagtaccgcaaggtggctggaaaggagatttattccgacacactcgagtctactcccatgctggaaaaggaaaaattcccccaggactactttcccgagtgtaaatggtctcggaaggggtttataagaacaagatggtgcatagccgattgcgcctttgatttagtcaatattcatttgtttcacgatgccagtaacttagtggcttgggaaacaagcccttccgtttattccgggattcggcacaaggcccttgggtacgttttggatcggataattgatcaaagatttgagaaggtgtcttattttgttttcggagattttaacttcaggctggatagtaagtcggtggtggagactctctgcacaaaggcgacaatgcaaaccgtcagagccgctgatactaacgaagtagtgaaactgatcttccgggaaagcgataatgacagaaaggtgatgctgcagttggaaaagaagctgttcgactactttaaccaggaagtattcagggacaacaacggcaccgctctgctggagttcgacaaggagttgagtgtgttcaaggatcgcttatacgagcttgatatctccttcccaccatcctacccttactccgaggacgcacggcagggcgagcagtacatgaataccaggtgtccagcctggtgcgatcgcatacttatgtccccttccgccaaggaactggtgctgagatctgaatccgaagagaaagtggttacctatgaccacatcgggcccaatgtgtgtatgggcgatcataagccagtttttctggctttcagaattatgccaggtgctggaaagcctcatgcccacgttcacaagtgctgcgtggtacaatag

SEQ ID NO: 157163 - DNA, 558 bp, Artificial Sequence
  derived and/or modified sequence
atggccggcaaggccgccgcccccggcaccgccgtgctgctggtgactgccaacgtaggatcacttttcgacgaccccgagaacctccaaaaaaattggcttagagaattctatcaggtggtccacactcataaacctcacttcatggcgctgcattgtcaagagttcggaggcaaaaactatgaagcttccatgtcccatgtcgataaattcgtgaaagagcttctatcctcggacgccatgaaagaatataacagagctcgagtttatctggacgaaaattataaaagccaggagcattttacagctctcgggtccttctatttcttacacgaatccctgaagaatatttaccagttcgacttcaaggctaaaaaatacagaaaggttgccggaaaagagatctacagcgacactctggagagtaccccaatgctcgagaaagagaagttcccccaggattactttccagaacgccacgttccacacacctccctggaagcgctcctcatccttcacgaggaccctcagcttcccgacccacacttaccactctag

SEQ ID NO: 157164 - DNA, 1068 bp, Artificial Sequence
  derived and/or modified sequence
atggccggcaaggccgccgcccccggcaccgccgtgctgctggtgactgcgaatgtcggtagcctgttcgacgaccccgagaatctacaaaaaaattggctgcgagaattctaccaggtagtccacactcacaagccccactttatggccctgcactgccaggaattcggtggtaagaactacgaagccagcatgagccatgttgataaattcgttaaagaattgctcagctctgatgctatgaaggaatacaacagagctcgagtgtatctggatgaaaattataagtcacaggagcactttacagctcttgggtccttttattttttgcacgaaagcttgaagaatatctaccagttcgatttcaaagcaaagaaataccggaaggttgccggcaaagagatttacagcgacaccctggagagcaccccaatgttggagaaggagaagttcccacaggattactttccagagtgtaaatggtctaggaaggggtttataaggacgagatggtgcattgccgattgcgcattcgacttggtaaacattcatctgtttcacgatgctagcaacctggtggcttgggagacttctcccagcgtttactcggggatccgacacaaggccctggggtatgtgcttgacagaatcatagaccaacgctttgagaaagtatcttacttcgtgtttggggacttcaatttccggctagacagcaaatctgtggtggagctcttggagttcgataaggagctgtccgtattcaaggacagactgtatgagctggatatctcatttccgccatcatacccctattctgaagatgcacgccaaggtgagcagtacatgaacacgaggtgcccggcatggtgtgatcgcatcttgatgagcccatccgcaaaggagctggttctcaggagtgaatctgaggagaaagtggtgacctatgatcacatcggacctaatgtatgcatgggagaccacaaaccagtttttcttgcatttcggatcatgcctggcgccggaaagccacacgcccacgtccacaagtgttgtgtggtgcaatag

SEQ ID NO: 157165 - DNA, 990 bp, Artificial Sequence
  derived and/or modified sequence
atgaaggagtacaaccgggcccgggtgtacctggacgagaactacaaatctcaggaacactttaccgctttgggctccttttattttctgcacgagagtttgaaaaatatataccaatttgatttcaaagccaaaaagtacagaaaggtagcgggcaaagaaatttatagtgacactctggagagtacccctatgttagaaaaagaaaaatttccgcttctcccaagggtacagatggtcaagaaaaggttacaccccgacgaggtgatcgcggattgtgcctttgatctggtgaacattcacctcttccatgacgcgagcaatctcgtagcatgggaaacaagtccatccgtgtactccgggataagacacaaggcactcggttatgtgctggaccggatcattgatcagagattcgaaaaggtatcttactttgtctttggcgactttaacttccgcctcgacagtaaatccgtcgtagaaacgctttgcacaaaggctaccatgcagactgtcagggctgcagatacgaatgaggtagttaaactaatttttagagagtcggataacgatcgcaaggtcatgttacagctagaaaagaagctgtttgactatttcaatcaagaagtctttagggacaacaacggaaccgcccttctggagtttgacaaagagctgtccgtattcaaagaccgtctgtatgaactcgatattagcttcccaccctcctacccttatagcgaagacgcccgacagggagagcagtacatgaatacccggtgtcccgcgtggtgcgaccggattcttatgagtccgtccgctaaggaattggtgctgcgctctgagtcagaagaaaaggtagttacctatgaccacattggtcccaatgtgtgtatgggcgatcacaagcccgtctttctagcctttagaattatgccgggagccggcaaacctcacgcacacgtgcacaagtgttgtgtcgtccaatag

SEQ ID NO: 157166 - DNA, 546 bp, Artificial Sequence
  derived and/or modified sequence
gccgccgcccccggcaccgccgtgctgctggtgaccgccaacgtgggctcactctttgatgaccctgaaaacctccagaaaaactggttgagggaattctatcaagtcgttcacacccataagccacacttcatggcactgcactgccaagagttcggaggcaaaaattatgaagccagcatgagtcacgtagacaaattcgtcaaggagctcctgtcctcagacgccatgaaagagtacaacagggccagagtgtatctggatgagaattataagtcccaagaacatttcaccgcgctcgggagtttctatttcttgcacgagtcattgaagaacatttatcagtttgatttcaaagcaaagaagtacaggaaggtcgcaggcaaagagatctactccgatacactggaaagtacccccatgctggagaaagaaaagttccctcaggattatttcccagagcgacacgtacctcacacctctctcgaggctttgctgattcttcacgaggaccctcagctgccagaccctcatttgcccttatag

SEQ ID NO: 157167 - DNA, 837 bp, Artificial Sequence
  derived and/or modified sequence
tgacagaaaaactggctgagagaattctaccaggtggttcacacccacaagccgcactttatggcactgcactgtcaggaatttggaggaaagaattatgaggcttctatgagccatgtggataagttcgtgaaagaactgctgagcagtgacgccatgaaggaatacaaccgggctcgtgtgtacctggacgaaaattacaagagccaggagcattttacagctctcggttcattttacttcctccatgagtccctgaaaaatatctatcagtttgattttaaggctaagaaatacaggaaggttgcagggaaagaaatttacagcgatactctggaatccacccctatgctggagaaagaaaagtttcctcaggactactttcctgaatgcaagtggtcaaggaagggtttcatcaggacgcgttggtgcattgcggattgtgcattcgaccttgtgaacattcatctctttcacgacgctagcaacctagtggcctgggagacatctccatcagtgtactccggaattcggcataaggccctgggttatgtcttggatcgcataatagatcagagatttgagaaggtgtcctactttgtattcggagactttaactttaggctggatagcaaatctgttgttgagttgttggaattcgacaaggagcttagcgtgttcaaggacagactgtacgaattggacatatctttccctccaagctacccatatagcgaggacgcacgtcagggggagcagtacatgaacacccgctgccctgcgtggtgtgataggattctgatgagtcctagcgcaaaggaacttgtccttcgttag

SEQ ID NO: 157168 - DNA, 1164 bp, Artificial Sequence
  derived and/or modified sequence
atggccggaaaggctgctgcacccggaactgccgtacttctggtaacagctaacgttggctccctttttgatgatcccgaaaacctccagaagaattggctgcgcgagttttaccaagtagtgcatactcataagccacactttatggcgctgcattgccaggaattcggagggaaaaattacgaggctagcatgagccatgtggataaattcgtaaaggaacttttatcctccgatgccatgaaggagtacaatcgggctagagtgtacctcgatgaaaattacaagagccaagagcacttcactgcgttgggttcattctattttctccacgagtcacttaaaaatatatatcagttcgattttaaggctaaaaaatatcgcaaggtcgcaggaaaggagatttactcagacaccctggagtcaactcccatgcttgagaaggaaaagttccctcaagattactttccagagtgcaagtggtcacgtaagggattcattcgtaccaggtggtgcatagccgattgtgccttcgacctagtcaacattcatctgtttcatgatgcaagtaaccttgtggcctgggaaacctcaccttctgtttacagcggaattcggcataaggccctcgggtatgtgctggaccggatcatcgatcagcgcttcgaaaaagtgtcctacttcgtgtttggggatttcaactttcgcctggatagtaaatctgtcgtagagaccctatgcaccaaggccacaatgcagacagtgcgagcagccgacaccaacgaggtggtgaagctaatattcagggagtccgacaacgatagaaaagtcatgctgcagctggaaaagaaactgttcgattactttaatcaggaggtatttagagacaacaatggcacggcacttctcgaatttgataaggagctatctgtgtttaaagatcgcctctacgaactggatatttccttccctccatcatatccatatagcgaagacgcccgtcagggagagcagtatatgaacactagatgtcctgcttggtgcgatcgcattctgatgtctccaagcgccaaggagctcgtgttgcgtgtcagtgtgtgctgccctagtccaggtcacagggggatgtggtcggctggatccgggctggctcagccttggtag

SEQ ID NO: 157169 - DNA, 1239 bp, Artificial Sequence
  derived and/or modified sequence
atggctggaaaggccgcagccccaggcactgctgtcctcctggtcaccgctaacgtcggctctttatttgatgaccccgagaacctccagaagaattggttgcgggaattctatcaggttgttcatacacataagccccactttatggccctccattgtcaggagttcggtggcaagaactacgaggccagcatgagccacgttgacaaatttgtcaaagaattactgagctccgacgccatgaaagaatacaaccgcgcacgcgtgtacctcgatgagaactacaaatcccaggagcactttaccgccttagggtccttctattttttacatgaatccctgaagaatatttatcagttcgactttaaagccaaaaagtataggaaggtagccggaaaagagatctattcggacaccctcgagtccacaccaatgctcgagaaagaaaagttccctcaggattatttccccgagtgcaagtggtcccgcaaaggctttatcagaacaagatggtgtatcgcggactgcgcttttgacctcgtcaacatacacctgttccacgacgcctcaaacttggttgcatgggaaacatccccttccgtttacagcggaataagacataaggcattaggatacgtgctcgatcgaattatcgatcagcggtttgagaaggtcagttatttcgtcttcggcgacttcaatttccgcctggattccaaatccgtggtcgaaactctatgcaccaaagccacgatgcagactgtgcgggctgcagacactaacgaagtggtaaaactgatcttccgcgagtcggataacgatagaaaggtaatgcttcagctcgaaaagaaactctttgactactttaaccaggaggtgttccgagacaataatgggaccgctctgctggagtttgacaaagagttatcggtgtttaaggaccggctatacgagctggacatctccttccccccttcttacccatacagtgaggatgccagacaaggtgagcagtacatgaacacccggtgtcccgcatggtgtgacaggatcctcatgagtccttctgcaaaagaactagtgctgaggtccgagagtgaagagaaggtggttacctacgaccacatcggcccaaatgtctgcatgggcgaccataagccagtgtttctggctttcaggatcatgccaggtgcgggtaagcctcacgctcatgttcacaaatgttgcgtagtacagtag

SEQ ID NO: 157170 - DNA, 558 bp, Artificial Sequence
  derived and/or modified sequence
atggccggaaaagctgccgctcctgggacggccgtgctcttagtgacagctaacgtagggtccttatttgatgatccagagaatctccagaaaaattggctgcgagaattttatcaggttgtccatactcacaagcctcactttatggccctgcattgccaagagttcggaggaaagaactatgaggcatcaatgagccacgtcgataaattcgtaaaggaactcttgagttcagacgcaatgaaggaatacaatcgggcaagggtttacctcgacgagaactataagtcccaggagcacttcaccgcattagggagtttctatttcttgcacgaatccttgaagaatatataccagtttgacttcaaggccaaaaagtacagaaaagtggcaggcaaggagatctactctgataccctagaaagcacccctatgctcgagaaagaaaagtttccgcaagattatttcccggagcggcacgtgccccacaccagcctggaggccctgttgatactccacgaggatccgcagctcccagacccccacctacccctgtag

SEQ ID NO: 157171 - DNA, 1068 bp, Artificial Sequence
  derived and/or modified sequence
atggccggaaaggctgctgctcccggtacagcagttctgctcgtgactgcaaatgtgggtagcttattcgatgacccggagaacctgcagaagaattggctcagagaattctaccaagtcgtgcacacacacaagccccattttatggcattgcactgccaggaattcgggggtaaaaactatgaagccagcatgagccacgtagacaagtttgttaaggaactcctgtcaagtgacgcaatgaaagagtataatagggctagagtgtatctggatgagaactataagtcgcaagaacatttcactgcgctgggcagtttctatttcctgcatgaatccctgaagaacatatatcagtttgacttcaaggctaagaagtacagaaaagttgccggaaaggaaatctattcagataccctggaatcgacacctatgcttgagaaggagaagttcccccaggattactttcccgaatgtaaatggagtcggaagggatttattagaacccgatggtgtatcgctgattgtgcattcgacctcgtcaacattcaccttttccatgatgcctctaacctggtcgcctgggagacttccccgtcagtctatagtggaattcgccacaaagccctggggtatgtgctggacaggatcatcgaccaaagattcgagaaagtgagttactttgtcttcggcgatttcaatttcagactagactccaagagtgtggtggagttattagaattcgataaagaactctcggttttcaaggacaggttgtacgaactagatatctcgttccctccatcctacccctatagcgaggacgccaggcagggtgaacaatacatgaatactaggtgccccgcatggtgtgataggatattaatgtccccatctgccaaagagttggtgctacggtcagagtccgaagagaaagttgtaacttacgaccatatcggcccaaacgtttgcatgggcgatcacaagccagtcttcttggcatttaggattatgcctggggcaggaaaacctcatgctcacgttcataaatgttgcgtggtacaatag

SEQ ID NO: 157172 - DNA, 990 bp, Artificial Sequence
  derived and/or modified sequence
atgaaggagtataacagggctagagtgtacctggatgagaactacaagagtcaggaacactttacagccctgggttctttctattttttgcatgagtcactgaagaacatctatcaattcgacttcaaagctaaaaagtatcgcaaggtggctggtaaagagatatactcagatacattagagtcaacgcctatgctcgagaaagaaaaattccccctgctgccgagagtgcagatggtcaaaaagcggctccatccggacgaggtgatcgcggattgtgctttcgacctggtgaacattcacctgtttcacgacgcctccaatttagtggcatgggaaacaagccccagcgtatactcggggatccggcacaaagcattaggttacgtcttagataggataatcgatcagcggttcgagaaggtctcttactttgtgttcggggatttcaactttcgtcttgattctaaaagtgtggtggagaccctctgtacgaaggccactatgcagactgtgcgtgctgccgacactaacgaggttgtcaaactcatctttcgagagagtgataatgatagaaaagtcatgctgcaactggagaaaaaactgttcgattactttaatcaggaggtgttccgagataataacggcactgcgttgctcgagtttgataaggagctctcagtatttaaggatcgcctgtacgagctggacatcagcttccctccttcctacccttattccgaagacgctcggcaaggcgaacagtacatgaacactagatgccccgcatggtgtgaccgtatcctcatgagtccctcagccaaggagcttgtcttgcggtcggagagtgaagaaaaagtcgttacctacgaccacattggaccaaacgtgtgcatgggcgatcataaaccagtattcctagcctttcggattatgccaggcgcaggcaagccccacgcacatgtccacaagtgctgtgtagtgcagtag

SEQ ID NO: 157173 - DNA, 546 bp, Artificial Sequence
  derived and/or modified sequence
gccgcagcaccgggaacagcggtactgctggtaactgctaatgtgggctcactgttcgatgaccctgaaaacttacagaagaattggcttcgagaattctatcaagtagtccacacccacaagccccactttatggcactgcattgtcaggaattcggtggaaaaaactacgaggctagtatgagccacgtcgataagttcgttaaggaactgctctcctccgacgccatgaaagaatataatagggccagagtctatctggacgagaattataagtctcaggagcacttcactgccctgggctctttctatttcctgcacgaatccctgaaaaacatctatcaatttgactttaaggctaagaagtataggaaggtagccggaaaagagatctactcagacactctggaaagcaccccaatgctggaaaaggagaaattcccgcaggattacttccctgagcggcatgttccccacacgtcactagaggccttactgatcctgcatgaggatcctcagctcccagatcctcacctcccactttag

SEQ ID NO: 157174 - DNA, 837 bp, Artificial Sequence
  derived and/or modified sequence
tgacagaagaactggctgagagagttctaccaggtggtgcacacccacaagccccacttcatggccctgcactgccaggagttcggcggcaagaactacgaggccagcatgagccacgtggacaagttcgtgaaggagctgctgagcagcgacgccatgaaggagtacaacagagccagagtgtacctggacgagaactacaagagccaggagcacttcaccgccctgggcagcttctacttcctgcacgagagcctgaagaacatctaccagttcgacttcaaggccaagaagtacagaaaggtggccggcaaggagatctacagcgacaccctggagagcacccccatgctggagaaggagaagttcccccaggactacttccccgagtgcaagtggagcagaaagggcttcatcagaaccagatggtgcatcgccgactgcgccttcgacctggtgaacatccacctgttccacgacgccagcaacctggtggcctgggagaccagccccagcgtgtacagcggcatcagacacaaggccctgggctacgtgctggacagaatcatcgaccagagattcgagaaggtgagctacttcgtgttcggcgacttcaacttcagactggacagcaagagcgtggtggagctgctggagttcgacaaggagctgagcgtgttcaaggacagactgtacgagctggacatcagcttcccccccagctacccctacagcgaggacgccagacagggcgagcagtacatgaacaccagatgccccgcctggtgcgacagaatcctgatgagccccagcgccaaggagctggtgctgagatag

SEQ ID NO: 157175 - DNA, 1164 bp, Artificial Sequence
  derived and/or modified sequence
atggccggcaaggccgccgcccccggcaccgccgtgctgctggtgaccgccaacgtgggcagcctgttcgacgaccccgagaacctgcagaagaactggctgagagagttctaccaggtggtgcacacccacaagccccacttcatggccctgcactgccaggagttcggcggcaagaactacgaggccagcatgagccacgtggacaagttcgtgaaggagctgctgagcagcgacgccatgaaggagtacaacagagccagagtgtacctggacgagaactacaagagccaggagcacttcaccgccctgggcagcttctacttcctgcacgagagcctgaagaacatctaccagttcgacttcaaggccaagaagtacagaaaggtggccggcaaggagatctacagcgacaccctggagagcacccccatgctggagaaggagaagttcccccaggactacttccccgagtgcaagtggagcagaaagggcttcatcagaaccagatggtgcatcgccgactgcgccttcgacctggtgaacatccacctgttccacgacgccagcaacctggtggcctgggagaccagccccagcgtgtacagcggcatcagacacaaggccctgggctacgtgctggacagaatcatcgaccagagattcgagaaggtgagctacttcgtgttcggcgacttcaacttcagactggacagcaagagcgtggtggagaccctgtgcaccaaggccaccatgcagaccgtgagagccgccgacaccaacgaggtggtgaagctgatcttcagagagagcgacaacgacagaaaggtgatgctgcagctggagaagaagctgttcgactacttcaaccaggaggtgttcagagacaacaacggcaccgccctgctggagttcgacaaggagctgagcgtgttcaaggacagactgtacgagctggacatcagcttcccccccagctacccctacagcgaggacgccagacagggcgagcagtacatgaacaccagatgccccgcctggtgcgacagaatcctgatgagccccagcgccaaggagctggtgctgagagtgagcgtgtgctgccccagccccggccacagaggcatgtggagcgccggcagcggcctggcccagccctggtag

SEQ ID NO: 157176 - DNA, 1239 bp, Artificial Sequence
  derived and/or modified sequence
atggccggcaaggccgccgcccccggcaccgccgtgctgctggtgaccgccaacgtgggcagcctgttcgacgaccccgagaacctgcagaagaactggctgagagagttctaccaggtggtgcacacccacaagccccacttcatggccctgcactgccaggagttcggcggcaagaactacgaggccagcatgagccacgtggacaagttcgtgaaggagctgctgagcagcgacgccatgaaggagtacaacagagccagagtgtacctggacgagaactacaagagccaggagcacttcaccgccctgggcagcttctacttcctgcacgagagcctgaagaacatctaccagttcgacttcaaggccaagaagtacagaaaggtggccggcaaggagatctacagcgacaccctggagagcacccccatgctggagaaggagaagttcccccaggactacttccccgagtgcaagtggagcagaaagggcttcatcagaaccagatggtgcatcgccgactgcgccttcgacctggtgaacatccacctgttccacgacgccagcaacctggtggcctgggagaccagccccagcgtgtacagcggcatcagacacaaggccctgggctacgtgctggacagaatcatcgaccagagattcgagaaggtgagctacttcgtgttcggcgacttcaacttcagactggacagcaagagcgtggtggagaccctgtgcaccaaggccaccatgcagaccgtgagagccgccgacaccaacgaggtggtgaagctgatcttcagagagagcgacaacgacagaaaggtgatgctgcagctggagaagaagctgttcgactacttcaaccaggaggtgttcagagacaacaacggcaccgccctgctggagttcgacaaggagctgagcgtgttcaaggacagactgtacgagctggacatcagcttcccccccagctacccctacagcgaggacgccagacagggcgagcagtacatgaacaccagatgccccgcctggtgcgacagaatcctgatgagccccagcgccaaggagctggtgctgagaagcgagagcgaggagaaggtggtgacctacgaccacatcggccccaacgtgtgcatgggcgaccacaagcccgtgttcctggccttcagaatcatgcccggcgccggcaagccccacgcccacgtgcacaagtgctgcgtggtgcagtag

SEQ ID NO: 157177 - DNA, 558 bp, Artificial Sequence
  derived and/or modified sequence
atggccggcaaggccgccgcccccggcaccgccgtgctgctggtgaccgccaacgtgggcagcctgttcgacgaccccgagaacctgcagaagaactggctgagagagttctaccaggtggtgcacacccacaagccccacttcatggccctgcactgccaggagttcggcggcaagaactacgaggccagcatgagccacgtggacaagttcgtgaaggagctgctgagcagcgacgccatgaaggagtacaacagagccagagtgtacctggacgagaactacaagagccaggagcacttcaccgccctgggcagcttctacttcctgcacgagagcctgaagaacatctaccagttcgacttcaaggccaagaagtacagaaaggtggccggcaaggagatctacagcgacaccctggagagcacccccatgctggagaaggagaagttcccccaggactacttccccgagagacacgtgccccacaccagcctggaggccctgctgatcctgcacgaggacccccagctgcccgacccccacctgcccctgtag

SEQ ID NO: 157178 - DNA, 1068 bp, Artificial Sequence
  derived and/or modified sequence
atggccggcaaggccgccgcccccggcaccgccgtgctgctggtgaccgccaacgtgggcagcctgttcgacgaccccgagaacctgcagaagaactggctgagagagttctaccaggtggtgcacacccacaagccccacttcatggccctgcactgccaggagttcggcggcaagaactacgaggccagcatgagccacgtggacaagttcgtgaaggagctgctgagcagcgacgccatgaaggagtacaacagagccagagtgtacctggacgagaactacaagagccaggagcacttcaccgccctgggcagcttctacttcctgcacgagagcctgaagaacatctaccagttcgacttcaaggccaagaagtacagaaaggtggccggcaaggagatctacagcgacaccctggagagcacccccatgctggagaaggagaagttcccccaggactacttccccgagtgcaagtggagcagaaagggcttcatcagaaccagatggtgcatcgccgactgcgccttcgacctggtgaacatccacctgttccacgacgccagcaacctggtggcctgggagaccagccccagcgtgtacagcggcatcagacacaaggccctgggctacgtgctggacagaatcatcgaccagagattcgagaaggtgagctacttcgtgttcggcgacttcaacttcagactggacagcaagagcgtggtggagctgctggagttcgacaaggagctgagcgtgttcaaggacagactgtacgagctggacatcagcttcccccccagctacccctacagcgaggacgccagacagggcgagcagtacatgaacaccagatgccccgcctggtgcgacagaatcctgatgagccccagcgccaaggagctggtgctgagaagcgagagcgaggagaaggtggtgacctacgaccacatcggccccaacgtgtgcatgggcgaccacaagcccgtgttcctggccttcagaatcatgcccggcgccggcaagccccacgcccacgtgcacaagtgctgcgtggtgcagtag

SEQ ID NO: 157179 - DNA, 990 bp, Artificial Sequence
  derived and/or modified sequence
atgaaggagtacaacagagccagagtgtacctggacgagaactacaagagccaggagcacttcaccgccctgggcagcttctacttcctgcacgagagcctgaagaacatctaccagttcgacttcaaggccaagaagtacagaaaggtggccggcaaggagatctacagcgacaccctggagagcacccccatgctggagaaggagaagttccccctgctgcccagagtgcagatggtgaagaagagactgcaccccgacgaggtgatcgccgactgcgccttcgacctggtgaacatccacctgttccacgacgccagcaacctggtggcctgggagaccagccccagcgtgtacagcggcatcagacacaaggccctgggctacgtgctggacagaatcatcgaccagagattcgagaaggtgagctacttcgtgttcggcgacttcaacttcagactggacagcaagagcgtggtggagaccctgtgcaccaaggccaccatgcagaccgtgagagccgccgacaccaacgaggtggtgaagctgatcttcagagagagcgacaacgacagaaaggtgatgctgcagctggagaagaagctgttcgactacttcaaccaggaggtgttcagagacaacaacggcaccgccctgctggagttcgacaaggagctgagcgtgttcaaggacagactgtacgagctggacatcagcttcccccccagctacccctacagcgaggacgccagacagggcgagcagtacatgaacaccagatgccccgcctggtgcgacagaatcctgatgagccccagcgccaaggagctggtgctgagaagcgagagcgaggagaaggtggtgacctacgaccacatcggccccaacgtgtgcatgggcgaccacaagcccgtgttcctggccttcagaatcatgcccggcgccggcaagccccacgcccacgtgcacaagtgctgcgtggtgcagtag

SEQ ID NO: 157180 - DNA, 546 bp, Artificial Sequence
  derived and/or modified sequence
gccgccgcccccggcaccgccgtgctgctggtgaccgccaacgtgggcagcctgttcgacgaccccgagaacctgcagaagaactggctgagagagttctaccaggtggtgcacacccacaagccccacttcatggccctgcactgccaggagttcggcggcaagaactacgaggccagcatgagccacgtggacaagttcgtgaaggagctgctgagcagcgacgccatgaaggagtacaacagagccagagtgtacctggacgagaactacaagagccaggagcacttcaccgccctgggcagcttctacttcctgcacgagagcctgaagaacatctaccagttcgacttcaaggccaagaagtacagaaaggtggccggcaaggagatctacagcgacaccctggagagcacccccatgctggagaaggagaagttcccccaggactacttccccgagagacacgtgccccacaccagcctggaggccctgctgatcctgcacgaggacccccagctgcccgacccccacctgcccctgtag

SEQ ID NO: 157181 - protein, 221 aa, Artificial Sequence
  derived and/or modified sequence
MVPCWNHGNITRSKAEELLSRTGKDGSFLVRASESISRAYALCVLYRNCVYTYRILPNEDDKFTVQASEGVSMRFFTKLDQLIEFYKKENMGLVTHLQYPVPLEEEDTGDDPEEDTESVVSPPELPPRNIPLTASSCEAKEVPFSNENPRATETSRPSLSETLFQRLQSMDTSGLPEEHLKAIQDYLSTQLAQDSEFVKTGSSSLPHLKKLTTLLCKELYG

SEQ ID NO: 157182 - DNA, 2433 bp, Artificial Sequence
  derived and/or modified sequence
aaacgcgaaggcttctgccagctgctgcaacagatgaaaaacaaacacagcgaacagcccgagccggacatgattacaatctttataggcacctggaatatgggtaacgccccccccccaaagaagatcacaagctggtttttgagcaaggggcaaggcaaaacgcgagacgacagcgcagattacatccctcatgatatttacgtgatcggcacacaggaggacccgctttccgagaaggagtggctcgaaatccttaaacacagccttcaggaaataaccagtgtcacattcaagactgtcgcaatccataccttgtggaatatcagaatcgtagtgttagcaaagccagagcacgaaaatcggatttctcacatctgtactgataacgtgaaaaccggcatcgctaacactcttggcaacaaaggggctgtgggcgtgagttttatgtttaacggcaccagccttgggtttgtgaatagccacctcacctcaggttctgagaaaaaattgagacgaaatcaaaattacatgaacattctcagattcctggcccttggcgataagaaattgagtccatttaacatcactcacaggtttacccacctcttttggttcggcgacctgaactaccgggtggatctgcctacatgggaggccgagaccattatacaaaaaatcaaacagcagcaatatgcggatctgctatcacacgaccaactcttaaccgaaagacgcgaacagaaggttttcttacactttgaagaagaagagataacttttgcgccaacctaccggtttgagaggttaactagagacaaatatgcgtacacgaagcagaaggcaactggcatgaagtacaatctgccgagttggtgtgacagggttctgtggaaatcgtatcctctggtccatgtcgtgtgccagagctatggatccaccagcgatataatgacctcagatcattcacctgtcttcgctactttcgaagctggcgttacctctcagtttgtctctaaaaatggccctgggaccgtggattcacagggacagatcgaatttttgaggtgctacgctaccctgaagacaaagtcacagacaaagttttacctcgaatttcattcttcatgcctggagtctttcgtcaagtcccaagagggggaaaacgaggaggggtcagaaggagaattggtggttaagttcggcgaaactctgcctaagctgaagcctatcatatctgacccagagtatctcctcgatcagcacatcctgatatcaatcaaaagctctgactctgatgagagctatggggagggctgcatcgctctgagactggaagccaccgaaactcagcttcctatatatacgcccctaacacaccacggagagcttacagggcacttccagggggagatcaaactgcagacatctcaggggaaaaccagagaaaaactctatgatttcgttaaaacagagcgcgacgagtcctcggggccgaaaacactcaaaagcctgacaagccatgaccctatgaaacagtgggaggtgacaagccgtgctcctccgtgctccgggtcttccataacagaaataataaatcccaactacatgggggtagggccctttggcccacctatgcccttgcatgtgaagcaaacgctgtctccagaccagcaacctactgcttggtcctacgatcagccacccaaagattcgcctttaggcccatgccgcggcgaatcccctcccacacctccaggtcagccgcccatttctcccaagaagtttttgcctagcaccgcaaaccgtggattgccacctcggacccaagaaagcagacccagcgacctcggcaagaatgccggtgatacattaccgcaggaggatttgcccttgactaagcctgagatgtttgaaaatcctctgtacggttcactcagttcgttccccaagcccgccccaagaaaggatcaggaaagtcccaagatgcccagaaaagagccgcccccctgtcccgagccaggtatcttgagccccagcatcgtgctgacaaaggcacaggaggcggatcgaggcgagggcccaggaaagcaagtccctgccccccggctcaggtcatttacatgctcctccagcgcggagggccgcgccgccggaggcgataagtcacagggcaaacctaagactcccgtctcctcccaggctcccgtccccgctaaaaggccaatcaaaccatccagatcggagattaaccagcagacacctcctaccccaacaccccgccccccattgccagttaaaagccccgcagtgttgcacctgcaacacagcaaagggagagactatcgggataacacagaactgccacaccacggaaaacaccgaccggaagagggaccgcccggcccactggggaggacagctatgcagtag

SEQ ID NO: 157183 - DNA, 666 bp, Artificial Sequence
  derived and/or modified sequence
atggtcccctgttggaaccacggcaatataacccggtctaaggcggaagaacttttgtcgagaacgggcaaagacggaagctttctggtcagagcctcagagagcataagccgtgcctacgctctctgtgtactgtacaggaattgtgtctatacctaccgcatcctcccaaacgaggatgataagtttacagtgcaggcctctgaaggcgtgtccatgcgctttttcaccaaactcgaccagctgatcgaattttacaaaaaagagaatatgggcctggtgacacacctgcagtatcccgtccccctcgaggaggaggatacaggtgacgaccccgaggaggatactgagagtgtggtctctcccccggaactgccaccgagaaacattcccctgaccgcctcttcatgcgaggctaaggaagtgcctttctcgaacgagaaccctagagctaccgaaacttccagaccctccctttccgagaccctattccagcggctgcagtcaatggacacatccggtctcccagaggagcatttaaaagccattcaggactacctttcaacacaactagctcaggactccgagtttgttaagaccggcagctccagtctgcctcacctgaaaaaattgaccaccctgctgtgtaaggagctgtatggatag

SEQ ID NO: 157184 - DNA, 2433 bp, Artificial Sequence
  derived and/or modified sequence
aagcgagaaggcttctgtcagttgctccagcagatgaaaaacaagcactccgaacagcccgagccggatatgataaccatatttatcggcacttggaatatggggaacgcacctcctccaaagaaaatcacttcgtggttcttgtctaaaggacaaggcaagacccgggacgattccgcagactatatcccacatgacatatatgtgataggtactcaggaggaccccctcagcgaaaaagaatggctcgaaatcctcaagcacagccttcaagaaatcaccagcgtgaccttcaaaactgtagctatccatacgctgtggaacataaggatcgtggtgttggctaaacctgaacatgaaaatcgcatctctcatatctgcactgacaacgtgaaaacaggtattgcaaacacactgggcaacaagggcgccgtgggcgtgtcttttatgttcaacggtacatccctgggctttgtcaactcccacctgaccagtggatcagagaagaaactgcggcgaaatcaaaattacatgaacattctccgctttctggcgctaggcgacaaaaaactgtcccccttcaacataactcaccgattcacccacctgttctggttcggcgatctcaactatcgggtcgaccttcctacctgggaagccgagaccataatccaaaagatcaagcaacaacagtacgctgacttgttgtcccacgatcagttgcttaccgagcgtagggaacagaaagttttccttcacttcgaggaggaagagattacatttgccccaacttatagattcgagcgcctgactcgagataaatacgcttacaccaagcaaaaagccacaggaatgaagtacaacctcccgagctggtgtgacagagtgttgtggaagtcctatcccctggtgcacgtagtctgccagtcctacggatcaacatccgatatcatgacttcagatcacagcccggttttcgcaacattcgaagctggagtcacatctcagtttgtttcaaaaaatggacctggcacagtggactcacagggtcagatagagttcctcaggtgctatgccacattgaaaactaagagccagacaaagttttatctggagttccactctagctgtctagaatcgttcgtcaagtcccaggagggggaaaatgaggaggggagcgaaggggaactggtcgtgaaatttggtgagaccctgcctaagctcaagcctattatatctgatccagaatacctgctcgaccagcacattctgatctctattaagagttctgatagcgacgaaagctacggagaaggttgtatagccctcagacttgaggccacagaaacgcagttacccatctacacaccgctgacacatcatggcgagctcaccggccatttccaaggagagattaaactgcaaacctcgcagggtaagactagagagaagctgtacgatttcgtgaagaccgaaagagacgaaagctctggtcctaagacgttaaaaagcctgacatcacatgatcctatgaaacagtgggaagtcacctcccgggcccctccgtgttctggctcctccataaccgaaattatcaatccaaattatatgggggtgggtcctttcggccctcccatgccacttcatgtaaaacagaccctgtctccagaccagcagcccaccgcctggagctacgatcagccacccaaggattcccccctgggcccatgtcgcggcgagtcacccccgacgccccccggacagccccctatttcacccaagaagttcctgccaagcacagctaaccgggggctgcctccacggactcaagagtctcgcccttcagatctaggcaagaatgctggagacactttgccgcaggaagacctaccacttacgaagccagaaatgtttgaaaaccccctctacggcagcctgtcatcatttcccaaacctgctcctagaaaggatcaggagagcccgaagatgccccgcaaagagccccctccctgtcctgaaccaggaattctgagtccttctattgtcttgacaaaagcccaggaagccgatagaggagagggccctggtaagcaggtgccagcccccagacttcggtcttttacctgctcctcaagtgcagaagggagagctgccggaggtgataaatcacaaggaaaacccaagaccccagtgagcagccaggcacccgtccccgccaaaagaccaatcaagccaagtcgctcggagattaaccagcagacaccaccgaccccaacccctcgacctcccctgcctgtgaaatcaccagcagtgctgcaccttcagcattccaaaggacgggattatcgggacaacaccgaattgccacaccacggcaagcaccggcccgaagaaggcccgcctggtccgctcggaaggaccgccatgcagtag

SEQ ID NO: 157185 - DNA, 2433 bp, Artificial Sequence
  derived and/or modified sequence
aagcgggagggtttttgtcagttgctgcagcagatgaagaataagcacagcgaacagcccgagcctgacatgatcactattttcatcggtacatggaatatggggaatgcacccccccccaagaaaattactagttggtttctctcaaagggtcaagggaaaactagggacgactctgcagactacatcccccacgacatatacgtgatcggcacccaggaagatccattgagtgagaaagagtggcttgagattctgaagcatagcctgcaggagatcacctctgtgaccttcaagaccgtagcaatccacaccctgtggaacatccgtatagtggtgctcgccaagcctgagcatgaaaataggatcagccacatatgtacagataatgtgaagacagggatagctaacaccttggggaacaaaggagcagttggggtgagctttatgtttaatgggacctccttggggttcgtgaattcacatctaacctcaggatccgagaagaagctgcgacgcaaccagaattacatgaacatccttcggtttctggcccttggcgataaaaagctgtccccattcaacattacacatagattcacccatctgttttggttcggtgacttgaactaccgtgtggacctgcccacatgggaggctgagaccattattcagaaaatcaagcaacagcagtacgccgatctgctttctcatgatcaactactaacagaaaggagagagcaaaaagtgttcctccattttgaggaggaggagatcacattcgctcccacataccgctttgagagactcacccgtgataaatacgcatacacaaagcagaaggccacaggtatgaaatacaacctgccttcctggtgcgaccgggtcctctggaagagttatcccctcgttcacgtcgtatgccaatcatacggaagcacaagcgacatcatgacgtcagaccactcccctgtgtttgcaaccttcgaagcaggggtaacgtcacagtttgtgtccaagaatggccctgggaccgtggattctcagggccagatcgaattcctgcggtgctacgctaccctgaagactaaaagccaaaccaaattctacctagagtttcactcctcctgcctggagtcctttgttaagagtcaggagggcgaaaacgaagagggcagcgaaggggaattagtcgtgaaattcggcgagacactgccaaaactgaaaccgataatatccgatcccgagtatttgctagatcagcacattctaatcagcatcaagtcgagtgactccgatgaatcctatggggaaggatgcatagcactgaggctggaggccacagaaacccagcttcccatctatacacctctcacacaccatggtgagctgacgggccattttcagggagagattaaactgcaaaccagccagggaaaaactagagaaaagctatatgactttgttaagacggagcgggacgaatccagcggtcctaagaccctcaagtccctgacctctcacgatcctatgaaacaatgggaggtaacctcccgggcacctccttgcagcgggtcttccatcactgagattataaaccccaactacatgggtgttggtccattcggccctccaatgccactgcacgttaagcagacactgagtcctgaccagcagcctacagcctggagttacgaccaacctcctaaggactcaccattgggcccctgccgcggagaatcgccgcccacgccccccggccagcccccgatttcacctaagaaattcctgccttctacggctaatagagggctaccacctcggacccaggagtctaggccatccgacctgggtaagaacgctggcgacactctcccccaggaggacttaccactcactaagccagaaatgttcgagaatcctctgtatggctctttgagttcctttccaaaaccggcaccacgtaaagaccaagaatctcccaagatgcccagaaaagagcccccaccgtgtccagaaccaggcattctgagcccttctattgtgctgactaaagcgcaggaggccgataggggtgaaggaccggggaaacaagtccctgccccccgcctgagatcatttacctgctcctcttccgccgaaggccgtgctgccggcggagacaaatctcaaggtaaaccaaagacccctgtcagttctcaggcccccgttccggctaagaggccaatcaagcctagccgctctgaaattaatcagcagactccacccacacctacccccaggccacctctcccagttaagagtcctgctgtactccacttacaacattcaaagggcagggactatcgggataacactgagctcccacatcacggaaagcacagacctgaagaagggccacctgggccactcggccgcaccgccatgcagtag

SEQ ID NO: 157186 - DNA, 2826 bp, Artificial Sequence
  derived and/or modified sequence
agaccccaggtgccaggggaagctaatcctatcaacatggtgtccaaactctcacagcttacatccctgttatcctctatcgaggataaggtgaaagcactcctccatgagggcccagaaagcccacaccggccaagtttgatccctcctgttactttcgaggtcaaggccgagagcctggggatccctcaaaagatgcagctgaaggtggacgtagaatcaggaaagctgattataaagaagtccaaagacggctctgaggataaattttattcgcacaagaagatcctgcagttgataaagtctcagaaattcctgaataaactggtgatcttggtagagaccgaaaaggaaaagattttgcggaaagagtatgtgtttgccgattctaagaagcgggaaggattctgccagctcctccagcagatgaaaaataagcacagtgaacagcccgaacccgacatgatcactatcttcattggaacttggaatatgggtaatgcacccccacccaaaaaaattacgtcgtggttcctttctaaaggccagggaaagacccgagacgattccgcagactatatcccccatgatatatacgtcatcgggacgcaggaggaccctttatccgagaaggagtggctcgaaatactcaaacattcgttgcaggagattacttcagtgacttttaagaccgtggctatccataccttgtggaatataagaatcgtcgtgcttgccaagccagaacacgaaaaccgcatctcccacatctgcactgataacgtgaagacgggcattgccaatacattaggtaacaaaggtgccgttggcgtgagcttcatgtttaacggcacctctctgggctttgtgaacagccacctgacgtctggctcagaaaagaagctcagacgcaatcagaattacatgaacatcctcaggttcttggccctaggagacaagaaactgtctccgtttaatattactcaccgattcacccaccttttttggttcggcgatctgaattaccgggttgatcttcccacctgggaagccgagactattatccagaaaataaagcaacagcagtatgcggatttactttcccatgaccagctcttgactgaacggcgtgagcagaaagtgtttctccacttcgaagaggaggaaattaccttcgcaccgacgtaccgttttgaacgactcacgcgtgataaatatgcctataccaagcagaaggctacaggaatgaaatataacttgccctcttggtgtgaccgggtcctttggaaatcctaccccctggtccatgttgtgtgccaaagctacggctccacaagcgacattatgaccagcgaccactctccagtgttcgcgaccttcgaggccggcgtgacttcccagttcgtgtccaaaaacggcccaggaaccgttgatagccagggccaaatagagtttctccgttgttacgccactttgaagacaaaatctcagacaaagttttacctagaatttcactcaagctgcctcgagtcttttgtaaagagtcaagagggcgagaatgaggaaggctccgagggggagctggtcgtgaaatttggggaaactcttcccaaattgaaacccatcatctcggatccagagtacttgctcgaccagcatatcctgatttcaattaaatcatcagactctgatgagtcgtacggcgaaggatgtattgccttaaggctcgaggccacagagacccaactacccatttacacccctctgacacatcacggcgagctgacaggtcactttcagggcgaaattaagttgcagacttcacaaggcaaaacccgggagaaactttacgactttgtcaaaaccgagcgcgacgagtcaagcgggcccaagacattgaaaagcttgacctcccacgaccccatgaagcagtgggaagttacttcaagggcaccaccttgctcaggatcttccatcaccgaaattatcaaccctaactatatgggtgttggcccatttggcccaccgatgcctctgcatgtcaagcagaccctctccccagaccagcaacctacagcttggagttacgatcagcctcctaaggattcccctttaggaccgtgtcgcggtgagtcccctcccacccctccaggccagcctccgataagtcccaaaaaatttctgccctcaacagccaatcgcggtttaccaccacggacccaggaaagccgccctagtgatctgggtaaaaatgcaggcgacacactcccgcaggaggacctccctctcaccaaaccagaaatgtttgagaatccgctatacggatccctgagctctttcccaaagcccgcacccagaaaggaccaggaatctcccaagatgccaagaaaagagccccccccgtgtcctgagcccgggattttgagcccttcgattgtgctgactaaagcacaggaagcagatcgcggagaaggcccaggcaagcaggtgcctgctcctaggttgaggtccttcacatgttctagctctgctgagggaagggctgccgggggcgacaagtctcaaggaaagcctaaaacaccagtatccagccaagcgcccgtccccgcgaagcgccctataaaaccatctcgctctgagattaatcaacagaccccccctactcctaccccaagaccacctctgccagttaagagtcccgccgttctgcacttgcagcacagtaaaggccgggactaccgcgacaacacggagttgccccaccacggcaaacatcgccctgaggaggggcccccaggccctctgggccggactgccatgcagtag

SEQ ID NO: 157187 - DNA, 2826 bp, Artificial Sequence
  derived and/or modified sequence
ccccctcaggtgccaggagaagccaatccgattaatatggtgagcaagctctctcagcttacaagtctccttagttctatagaagacaaggtaaaggctcttctgcatgagggtcctgagagcccacatcgaccgtccctcattccaccagtcaccttcgaggtcaaagcagagtcactggggatccctcagaaaatgcagctgaaagtggatgtggagtccggcaaactaataatcaaaaaatcaaaagatggaagtgaggacaaattctactcccacaagaaaattttacaactgattaagtcacagaagttccttaacaagctggtaatacttgttgagactgaaaaggagaaaatactgcggaaggagtacgtgtttgcagacagcaaaaaacgagaaggcttttgtcaactactgcagcaaatgaagaataagcacagcgaacaacctgagccagatatgataaccatctttatcggcacatggaacatgggcaacgctccgccgccaaagaaaatcacctcttggttcctgagcaaggggcagggcaagactagagacgattctgccgactacattccacacgatatttatgtcattggaactcaggaagacccacttagcgagaaggaatggcttgagattttaaaacacagcctccaggaaattacatccgtgacgttcaaaaccgtcgctatccacaccttgtggaatattagaatcgtggtcttggctaagccggagcatgagaacaggatatcgcatatctgtacagataacgtcaaaaccggcatcgctaacaccctggggaacaagggcgccgtgggcgtgtcatttatgtttaacgggacttctttgggatttgtcaactcacacctgacttcaggctctgaaaagaaactgaggaggaatcagaattacatgaatatcctcagatttctcgccctgggagataagaaactatccccttttaacatcactcatcggttcacgcacctcttctggttcggcgatctgaactaccgcgtcgacctgcctacatgggaagctgagactattatccagaaaatcaaacagcagcaatacgctgacctcctcagtcacgatcagctattgaccgaacgccgggagcagaaggtcttcctgcactttgaggaagaggagataacatttgcacccacctacaggttcgagaggctgacaagggacaaatacgcatataccaagcagaaggcgacaggtatgaaatataatcttcccagttggtgcgaccgggtgctctggaagagctacccgctggtgcacgttgtctgccagtcatatggctccacctccgatataatgaccagtgaccattcgccagtgttcgccacttttgaggcaggagttacctcacagttcgtgagcaagaacggaccaggaacagtggactctcaaggccaaattgaattcctaagatgctacgccactctgaagactaagagtcagaccaaattctatctggagttccatagctcctgcctggaatccttcgtgaagagtcaggagggggagaatgaagagggatctgagggcgaactcgtggtgaagtttggcgaaaccctgcctaagttgaaacccataatctcagatcctgaatatcttcttgatcagcacattttgatttctattaaatcatcggactcggatgaaagttacggcgaaggatgcatcgctctgaggctcgaagcgactgaaacacagctgcccatatatacaccactaacccatcacggtgaactgacaggtcacttccagggggaaatcaaactccagacatctcagggcaaaacacgcgagaaactctatgatttcgtcaaaacggagcgcgatgaaagctccggtccaaaaactctcaagtccctcacatctcacgatcccatgaagcagtgggaagtgaccagccgagccccgccctgctctggttctagtatcactgaaatcattaatccgaactatatgggcgtggggccgtttggtccaccgatgcctctgcacgtgaaacaaaccctttcccccgaccagcagccaaccgcctggtcctatgatcagccacctaaggacagtccgcttgggccatgtcggggcgagtcgccacccacccctccaggccagccacccatatcccctaagaaattcctacccagcacggcgaacagagggctcccacctcgcacacaagagtctcgccccagcgacctagggaagaatgcaggggacacgctaccgcaggaagatctgccccttaccaagcccgaaatgttcgagaatccgctgtatggatccctgagctccttcccgaagccagccccccgaaaggaccaggagagccctaagatgccgcggaaagagcccccgccctgtcctgaacccggcattctctctccttcaatcgtgctcacgaaggcacaggaagcagacagaggagaagggccaggcaagcaggtccccgccccccgtctgcggagcttcacttgctcctcaagcgcagaaggccgagccgcaggcggtgacaagagccaaggaaagcccaagactcctgttagtagtcaagcaccagtgccagcaaagcgaccaattaaaccaagcagatctgaaattaaccagcagacaccccccactcctactcctcgaccacctctcccagtgaagagcccagcggtgttgcatcttcaacattctaaaggacgcgactacagagacaacaccgagctgccccaccatgggaagcacagacccgaggaagggcctcctgggcccttggggaggacagctatgcaatag

SEQ ID NO: 157188 - DNA, 3628 bp, Artificial Sequence
  derived and/or modified sequence
aagagagaaggcttctgccagctcctgcagcagatgaagaacaagcactcagagcagccggagcccgacatgatcaccatcttcatcggcacctggaacatgggtaacgccccccctcccaagaagatcacgtcctggtttctctccaaggggcagggaaagacgcgggacgactctgcggactacatcccccatgacatttacgtgatcggcacccaagaggaccccctgagtgagaaggagtggctggagatcctcaaacactccctgcaagaaatcaccagtgtgacttttaaaacagtcgccatccacacgctctggaacatccgcatcgtggtgctggccaagcctgagcacgagaaccggatcagccacatctgtactgacaacgtgaagacaggcattgcaaacacactggggaacaagggagccgtgggggtgtcgttcatgttcaatggaacctccttagggttcgtcaacagccacttgacttcaggaagtgaaaagaaactcaggcgaaaccaaaactatatgaacattctccggttcctggccctgggcgacaagaagctgagtccctttaacatcactcaccgcttcacgcacctcttctggtttggggatcttaactaccgtgtggatctgcctacctgggaggcagaaaccatcatccagaaaatcaagcagcagcagtacgcagacctcctgtcccacgaccagctgctcacagagaggagggagcagaaggtcttcctacacttcgaggaggaagaaatcacgtttgccccaacctaccgttttgagagactgactcgggacaaatacgcctacaccaagcagaaagcgacagggatgaagtacaacttgccttcctggtgtgaccgagtcctctggaagtcttatcccctggtgcacgtggtgtgtcagtcttatggcagtaccagcgacatcatgacgagtgaccacagccctgtctttgccacatttgaggcaggagtcacttcccagtttgtctccaagaacggtcccgggactgttgacagccaaggacagattgagtttctcaggtgctatgccacattgaagaccaagtcccagaccaaattctacctggagttccactcgagctgcttggagagttttgtcaagagtcaggaaggagaaaatgaagaaggaagtgagggggagctggtggtgaagtttggtgagactcttccaaagctgaagcccattatctctgaccctgagtacctgctagaccagcacatcctcatcagcatcaagtcctctgacagcgacgaatcctatggcgagggctgcattgcccttcggttagaggccacagaaacgcagctgcccatctacacgcctctcacccaccatggggagttgacaggccacttccagggggagatcaagctgcagacctctcagggcaagacgagggagaagctctatgactttgtgaagacggagcgtgatgaatccagtgggccaaagaccctgaagagcctcaccagccacgaccccatgaagcagtgggaagtcactagcagggcccctccgtgcagtggctccagcatcactgaaatcatcaaccccaactacatgggagtggggccctttgggccaccaatgcccctgcacgtgaagcagaccttgtcccctgaccagcagcccacagcctggagctacgaccagccgcccaaggactccccgctggggccctgcaggggagaaagtcctccgacacctcccggccagccgcccatatcacccaagaagtttttaccctcaacagcaaaccggggtctccctcccaggacacaggagtcaaggcccagtgacctggggaagaacgcaggggacacgctgcctcaggaggacctgccgctgacgaagcccgagatgtttgagaaccccctgtatgggtccctgagttccttccctaagcctgctcccaggaaggaccaggaatcccccaaaatgccgcggaaggaacccccgccctgcccggaacccggcatcttgtcgcccagcatcgtgctcaccaaagcccaggaggctgatcgcggcgaggggcccggcaagcaggtgcccgcgccccggctgcgctccttcacgtgctcatcctctgccgagggcagggcggccggcggggacaagagccaagggaagcccaagaccccggtcagctcccaggccccggtgccggccaagaggcccatcaagccttccagatcggaaatcaaccagcagaccccgcccaccccgacgccgcggccgccgctgccagtcaagagcccggcggtgctgcacctccagcactccaagggccgcgactaccgcgacaacaccgagctcccgcatcacggcaagcaccggccggaggaggggccaccagggcctctaggcaggactgccatgcagtgaagccctcagtgagctgccactgagtcgggagcccagaggaacggcgtgaagccactggaccctctcccgggacctcctgctggctcctcctgcccagcttcctatgcaaggctttgtgttttcaggaaagggcctagcttctgtgtggcccacagagttcactgcctgtgagacttagcaccaagtgctgaggctggaagaaaaacgcacaccagacgggcaacaaacagtctgggtccccagctcgctcttggtacttgggaccccagtgcctcgttgagggcgccattctgaagaaaggaactgcagcgccgatttgagggtggagatatagataataataatattaataataataatggccacatggatcgaacactcatgatgtgccaagtgctgtgctaagtgctttacgaacattcgtcatatcaggatgacctcgagagctgaggctctagccacctaaaaccacgtgcccaaacccaccagtttaaaacggtgtgtgttcggaggggtgaaagcattaagaagcccagtgccctcctggagtgagacaagggctcggccttaaggagctgaagagtctgggtagcttgtttagggtacaagaagcctgttctgtccagcttcagtgacacaagctgctttagctaaagtcccgcgggttccggcatggctaggctgagagcagggatctacctggcttctcagttctttggttggaaggagcaggaaatcagctcctattctccagtggagagatctggcctcagcttgggctagagatgccaaggcctgtgccaggttccctgtgccctcctcgaggtgggcagccatcaccagccacagttaagccaagccccccaacatgtattccatcgtgctggtagaagagtctttgctgttgctcccgaaagccgtgctctccagcctggctgccagggagggtgggcctcttggttccaggctcttgaaatagtgcagccttttcttcctatctctgtggctttcagctctgcttccttggttattaggagaatagatgggtgatgtctttccttatgttgctttttcaacatagcagaattaatgtagggagctaaatccagtggtgtgtgtgaatgcagaagggaatgcaccccacattcccatgatggaagtctgcgtaaccaataaattgtgcctttctcactca

SEQ ID NO: 157189 - DNA, 1174 bp, Artificial Sequence
  derived and/or modified sequence
ctagggcatggcatcccacgtgggtgtcagcacggccgcagaagaaccacttctctggcccacccatgcctgctaggccatgcttcttcagaagtggccacaactctcctgacgtctccagagccggtcattccacccagggggacttcagctgccactggacacttcaattgtacgctgcgaccagttgccaggaaggagagggctggcaagagagccgcggcagccgtggcagggtgtaggggacggtggacggccagggcccccccctctctctctttctctctctctctcttgcttggtttctgtaatgaggaagttctccgcagctcagtttcctttccctcactgagcgcctgaaacaggaagtcagtcagttaagctggtggcagcagccgaggccaccaagaggcaacgggcggcaggttgcagtggaggggcctccgctcccctcggtggtgtgtgggtcctgggggtgcctgccggcccggccgaggaggcccacgcccaccatggtcccctgctggaaccatggcaacatcacccgctccaaggcggaggagctgctttccaggacaggcaaggacgggagcttcctcgtgcgtgccagcgagtccatctcccgggcatacgcgctctgcgtgctgtatcggaattgcgtttacacttacagaattctgcccaatgaagatgataaattcactgttcaggcatccgaaggcgtctccatgaggttcttcaccaagctggaccagctcatcgagttttacaagaaggaaaacatggggctggtgacccatctgcaataccctgtgccgctggaggaagaggacacaggcgacgaccctgaggaggacacagaaagtgtcgtgtctccacccgagctgcccccaagaaacatcccgctgactgccagctcctgtgaggccaaggaggttcctttttcaaacgagaatccccgagcgaccgagaccagccggccgagcctctccgagacattgttccagcgactgcaaagcatggacaccagtgggcttccagaagagcatcttaaggccatccaagattatttaagcactcagctcgcccaggactctgaatttgtgaagacagggtccagcagtcttcctcacctgaagaaactgaccacactgctctgcaaggagctctatgg

SEQ ID NO: 157190 - DNA, 3622 bp, Artificial Sequence
  derived and/or modified sequence
aagagagaaggcttctgccagctcctgcagcagatgaagaacaagcactcagagcagccggagcccgacatgatcaccatcttcatcggcacctggaacatgggtaacgccccccctcccaagaagatcacgtcctggtttctctccaaggggcagggaaagacgcgggacgactctgcggactacatcccccatgacatttacgtgatcggcacccaagaggaccccctgagtgagaaggagtggctggagatcctcaaacactccctgcaagaaatcaccagtgtgacttttaaaacagtcgccatccacacgctctggaacatccgcatcgtggtgctggccaagcctgagcacgagaaccggatcagccacatctgtactgacaacgtgaagacaggcattgcaaacacactggggaacaagggagccgtgggggtgtcgttcatgttcaatggaacctccttagggttcgtcaacagccacttgacttcaggaagtgaaaagaaactcaggcgaaaccaaaactatatgaacattctccggttcctggccctgggcgacaagaagctgagtccctttaacatcactcaccgcttcacgcacctcttctggtttggggatcttaactaccgtgtggatctgcctacctgggaggcagaaaccatcatccagaaaatcaagcagcagcagtacgcagacctcctgtcccacgaccagctgctcacagagaggagggagcagaaggtcttcctacacttcgaggaggaagaaatcacgtttgccccaacctaccgttttgagagactgactcgggacaaatacgcctacaccaagcagaaagcgacagggatgaagtacaacttgccttcctggtgtgaccgagtcctctggaagtcttatcccctggtgcacgtggtgtgtcagtcttatggcagtaccagcgacatcatgacgagtgaccacagccctgtctttgccacatttgaggcaggagtcacttcccagtttgtctccaagaacggtcccgggactgttgacagccaaggacagattgagtttctcaggtgctatgccacattgaagaccaagtcccagaccaaattctacctggagttccactcgagctgcttggagagttttgtcaagagtcaggaaggagaaaatgaagaaggaagtgagggggagctggtggtgaagtttggtgagactcttccaaagctgaagcccattatctctgaccctgagtacctgctagaccagcacatcctcatcagcatcaagtcctctgacagcgacgaatcctatggcgagggctgcattgcccttcggttagaggccacagaaacgcagctgcccatctacacgcctctcacccaccatggggagttgacaggccacttccagggggagatcaagctgcagacctctcagggcaagacgagggagaagctctatgactttgtgaagacggagcgtgatgaatccagtgggccaaagaccctgaagagcctcaccagccacgaccccatgaagcagtgggaagtcactagcagggcccctccgtgcagtggctccagcatcactgaaatcatcaaccccaactacatgggagtggggccctttgggccaccaatgcccctgcacgtgaagcagaccttgtcccctgaccagcagcccacagcctggagctacgaccagccgcccaaggactccccgctggggccctgcaggggagaaagtcctccgacacctcccggccagccgcccatatcacccaagaagtttttaccctcaacagcaaaccggggtctccctcccaggacacaggagtcaaggcccagtgacctggggaagaacgcaggggacacgctgcctcaggaggacctgccgctgacgaagcccgagatgtttgagaaccccctgtatgggtccctgagttccttccctaagcctgctcccaggaaggaccaggaatcccccaaaatgccgcggaaggaacccccgccctgcccggaacccggcatcttgtcgcccagcatcgtgctcaccaaagcccaggaggctgatcgcggcgaggggcccggcaagcaggtgcccgcgccccggctgcgctccttcacgtgctcatcctctgccgagggcagggcggccggcggggacaagagccaagggaagcccaagaccccggtcagctcccaggccccggtgccggccaagaggcccatcaagccttccagatcggaaatcaaccagcagaccccgcccaccccgacgccgcggccgccgctgccagtcaagagcccggcggtgctgcacctccagcactccaagggccgcgactaccgcgacaacaccgagctcccgcatcacggcaagcaccggccggaggaggggccaccagggcctctaggcaggactgccatgcagtgaagccctcagtgagctgccactgagtcgggagcccagaggaacggcgtgaagccactggaccctctcccgggacctcctgctggctcctcctgcccagcttcctatgcaaggctttgtgttttcaggaaagggcctagcttctgtgtggcccacagagttcactgcctgtgagacttagcaccaagtgctgaggctggaagaaaaacgcacaccagacgggcaacaaacagtctgggtccccagctcgctcttggtacttgggaccccagtgcctcgttgagggcgccattctgaagaaaggaactgcagcgccgatttgagggtggagatatagataataataatattaataataataatggccacatggatcgaacactcatgatgtgccaagtgctgtgctaagtgctttacgaacattcgtcatatcaggatgacctcgagagctgaggctctagccacctaaaaccacgtgcccaaacccaccagtttaaaacggtgtgtgttcggaggggtgaaagcattaagaagcccagtgccctcctggagtgagacaagggctcggccttaaggagctgaagagtctgggtagcttgtttagggtacaagaagcctgttctgtccagcttcagtgacacaagctgctttagctaaagtcccgcgggttccggcatggctaggctgagagcagggatctacctggcttctcagttctttggttggaaggagcaggaaatcagctcctattctccagtggagagatctggcctcagcttgggctagagatgccaaggcctgtgccaggttccctgtgccctcctcgaggtgggcagccatcaccagccacagttaagccaagccccccaacatgtattccatcgtgctggtagaagagtctttgctgttgctcccgaaagccgtgctctccagcctggctgccagggagggtgggcctcttggttccaggctcttgaaatagtgcagccttttcttcctatctctgtggctttcagctctgcttccttggttattaggagaatagatgggtgatgtctttccttatgttgctttttcaacatagcagaattaatgtagggagctaaatccagtggtgtgtgtgaatgcagaagggaatgcaccccacattcccatgatggaagtctgcgtaaccaataaattgtgcctttct

SEQ ID NO: 157191 - DNA, 4020 bp, Artificial Sequence
  derived and/or modified sequence
cgacctcaggttcctggtgaggccaatcccatcaacatggtgtccaagctcagccaactgacaagcctgttgtcgtccattgaagacaaggtcaaggccttgctgcacgagggtcctgagtctccgcaccggccctcccttatccctccagtcacctttgaggtgaaggcagagtctctggggattcctcagaaaatgcagctcaaagtcgacgttgagtctgggaaactgatcattaagaagtccaaggatggttctgaggacaagttctacagccacaagaaaatcctgcagctcattaagtcacagaaatttctgaataagttggtgatcttggtggaaacagagaaggagaagatcctgcggaaggaatatgtttttgctgactccaaaaagagagaaggcttctgccagctcctgcagcagatgaagaacaagcactcagagcagccggagcccgacatgatcaccatcttcatcggcacctggaacatgggtaacgccccccctcccaagaagatcacgtcctggtttctctccaaggggcagggaaagacgcgggacgactctgcggactacatcccccatgacatttacgtgatcggcacccaagaggaccccctgagtgagaaggagtggctggagatcctcaaacactccctgcaagaaatcaccagtgtgacttttaaaacagtcgccatccacacgctctggaacatccgcatcgtggtgctggccaagcctgagcacgagaaccggatcagccacatctgtactgacaacgtgaagacaggcattgcaaacacactggggaacaagggagccgtgggggtgtcgttcatgttcaatggaacctccttagggttcgtcaacagccacttgacttcaggaagtgaaaagaaactcaggcgaaaccaaaactatatgaacattctccggttcctggccctgggcgacaagaagctgagtccctttaacatcactcaccgcttcacgcacctcttctggtttggggatcttaactaccgtgtggatctgcctacctgggaggcagaaaccatcatccagaaaatcaagcagcagcagtacgcagacctcctgtcccacgaccagctgctcacagagaggagggagcagaaggtcttcctacacttcgaggaggaagaaatcacgtttgccccaacctaccgttttgagagactgactcgggacaaatacgcctacaccaagcagaaagcgacagggatgaagtacaacttgccttcctggtgtgaccgagtcctctggaagtcttatcccctggtgcacgtggtgtgtcagtcttatggcagtaccagcgacatcatgacgagtgaccacagccctgtctttgccacatttgaggcaggagtcacttcccagtttgtctccaagaacggtcccgggactgttgacagccaaggacagattgagtttctcaggtgctatgccacattgaagaccaagtcccagaccaaattctacctggagttccactcgagctgcttggagagttttgtcaagagtcaggaaggagaaaatgaagaaggaagtgagggggagctggtggtgaagtttggtgagactcttccaaagctgaagcccattatctctgaccctgagtacctgctagaccagcacatcctcatcagcatcaagtcctctgacagcgacgaatcctatggcgagggctgcattgcccttcggttagaggccacagaaacgcagctgcccatctacacgcctctcacccaccatggggagttgacaggccacttccagggggagatcaagctgcagacctctcagggcaagacgagggagaagctctatgactttgtgaagacggagcgtgatgaatccagtgggccaaagaccctgaagagcctcaccagccacgaccccatgaagcagtgggaagtcactagcagggcccctccgtgcagtggctccagcatcactgaaatcatcaaccccaactacatgggagtggggccctttgggccaccaatgcccctgcacgtgaagcagaccttgtcccctgaccagcagcccacagcctggagctacgaccagccgcccaaggactccccgctggggccctgcaggggagaaagtcctccgacacctcccggccagccgcccatatcacccaagaagtttttaccctcaacagcaaaccggggtctccctcccaggacacaggagtcaaggcccagtgacctggggaagaacgcaggggacacgctgcctcaggaggacctgccgctgacgaagcccgagatgtttgagaaccccctgtatgggtccctgagttccttccctaagcctgctcccaggaaggaccaggaatcccccaaaatgccgcggaaggaacccccgccctgcccggaacccggcatcttgtcgcccagcatcgtgctcaccaaagcccaggaggctgatcgcggcgaggggcccggcaagcaggtgcccgcgccccggctgcgctccttcacgtgctcatcctctgccgagggcagggcggccggcggggacaagagccaagggaagcccaagaccccggtcagctcccaggccccggtgccggccaagaggcccatcaagccttccagatcggaaatcaaccagcagaccccgcccaccccgacgccgcggccgccgctgccagtcaagagcccggcggtgctgcacctccagcactccaagggccgcgactaccgcgacaacaccgagctcccgcatcacggcaagcaccggccggaggaggggccaccagggcctctaggcaggactgccatgcagtgaagccctcagtgagctgccactgagtcgggagcccagaggaacggcgtgaagccactggaccctctcccgggacctcctgctggctcctcctgcccagcttcctatgcaaggctttgtgttttcaggaaagggcctagcttctgtgtggcccacagagttcactgcctgtgagacttagcaccaagtgctgaggctggaagaaaaacgcacaccagacgggcaacaaacagtctgggtccccagctcgctcttggtacttgggaccccagtgcctcgttgagggcgccattctgaagaaaggaactgcagcgccgatttgagggtggagatatagataataataatattaataataataatggccacatggatcgaacactcatgatgtgccaagtgctgtgctaagtgctttacgaacattcgtcatatcaggatgacctcgagagctgaggctctagccacctaaaaccacgtgcccaaacccaccagtttaaaacggtgtgtgttcggaggggtgaaagcattaagaagcccagtgccctcctggagtgagacaagggctcggccttaaggagctgaagagtctgggtagcttgtttagggtacaagaagcctgttctgtccagcttcagtgacacaagctgctttagctaaagtcccgcgggttccggcatggctaggctgagagcagggatctacctggcttctcagttctttggttggaaggagcaggaaatcagctcctattctccagtggagagatctggcctcagcttgggctagagatgccaaggcctgtgccaggttccctgtgccctcctcgaggtgggcagccatcaccagccacagttaagccaagccccccaacatgtattccatcgtgctggtagaagagtctttgctgttgctcccgaaagccgtgctctccagcctggctgccagggagggtgggcctcttggttccaggctcttgaaatagtgcagccttttcttcctatctctgtggctttcagctctgcttccttggttattaggagaatagatgggtgatgtctttccttatgttgctttttcaacatagcagaattaatgtagggagctaaatccagtggtgtgtgtgaatgcagaagggaatgcaccccacattcccatgatggaagtctgcgtaaccaataaattgtgcctttctcactc

SEQ ID NO: 157192 - DNA, 4021 bp, Artificial Sequence
  derived and/or modified sequence
cctcctcaggttcctggtgaggccaatcccatcaacatggtgtccaagctcagccaactgacaagcctgttgtcgtccattgaagacaaggtcaaggccttgctgcacgagggtcctgagtctccgcaccggccctcccttatccctccagtcacctttgaggtgaaggcagagtctctggggattcctcagaaaatgcagctcaaagtcgacgttgagtctgggaaactgatcattaagaagtccaaggatggttctgaggacaagttctacagccacaagaaaatcctgcagctcattaagtcacagaaatttctgaataagttggtgatcttggtggaaacagagaaggagaagatcctgcggaaggaatatgtttttgctgactccaaaaagagagaaggcttctgccagctcctgcagcagatgaagaacaagcactcagagcagccggagcccgacatgatcaccatcttcatcggcacctggaacatgggtaacgccccccctcccaagaagatcacgtcctggtttctctccaaggggcagggaaagacgcgggacgactctgcggactacatcccccatgacatttacgtgatcggcacccaagaggaccccctgagtgagaaggagtggctggagatcctcaaacactccctgcaagaaatcaccagtgtgacttttaaaacagtcgccatccacacgctctggaacatccgcatcgtggtgctggccaagcctgagcacgagaaccggatcagccacatctgtactgacaacgtgaagacaggcattgcaaacacactggggaacaagggagccgtgggggtgtcgttcatgttcaatggaacctccttagggttcgtcaacagccacttgacttcaggaagtgaaaagaaactcaggcgaaaccaaaactatatgaacattctccggttcctggccctgggcgacaagaagctgagtccctttaacatcactcaccgcttcacgcacctcttctggtttggggatcttaactaccgtgtggatctgcctacctgggaggcagaaaccatcatccagaaaatcaagcagcagcagtacgcagacctcctgtcccacgaccagctgctcacagagaggagggagcagaaggtcttcctacacttcgaggaggaagaaatcacgtttgccccaacctaccgttttgagagactgactcgggacaaatacgcctacaccaagcagaaagcgacagggatgaagtacaacttgccttcctggtgtgaccgagtcctctggaagtcttatcccctggtgcacgtggtgtgtcagtcttatggcagtaccagcgacatcatgacgagtgaccacagccctgtctttgccacatttgaggcaggagtcacttcccagtttgtctccaagaacggtcccgggactgttgacagccaaggacagattgagtttctcaggtgctatgccacattgaagaccaagtcccagaccaaattctacctggagttccactcgagctgcttggagagttttgtcaagagtcaggaaggagaaaatgaagaaggaagtgagggggagctggtggtgaagtttggtgagactcttccaaagctgaagcccattatctctgaccctgagtacctgctagaccagcacatcctcatcagcatcaagtcctctgacagcgacgaatcctatggcgagggctgcattgcccttcggttagaggccacagaaacgcagctgcccatctacacgcctctcacccaccatggggagttgacaggccacttccagggggagatcaagctgcagacctctcagggcaagacgagggagaagctctatgactttgtgaagacggagcgtgatgaatccagtgggccaaagaccctgaagagcctcaccagccacgaccccatgaagcagtgggaagtcactagcagggcccctccgtgcagtggctccagcatcactgaaatcatcaaccccaactacatgggagtggggccctttgggccaccaatgcccctgcacgtgaagcagaccttgtcccctgaccagcagcccacagcctggagctacgaccagccgcccaaggactccccgctggggccctgcaggggagaaagtcctccgacacctcccggccagccgcccatatcacccaagaagtttttaccctcaacagcaaaccggggtctccctcccaggacacaggagtcaaggcccagtgacctggggaagaacgcaggggacacgctgcctcaggaggacctgccgctgacgaagcccgagatgtttgagaaccccctgtatgggtccctgagttccttccctaagcctgctcccaggaaggaccaggaatcccccaaaatgccgcggaaggaacccccgccctgcccggaacccggcatcttgtcgcccagcatcgtgctcaccaaagcccaggaggctgatcgcggcgaggggcccggcaagcaggtgcccgcgccccggctgcgctccttcacgtgctcatcctctgccgagggcagggcggccggcggggacaagagccaagggaagcccaagaccccggtcagctcccaggccccggtgccggccaagaggcccatcaagccttccagatcggaaatcaaccagcagaccccgcccaccccgacgccgcggccgccgctgccagtcaagagcccggcggtgctgcacctccagcactccaagggccgcgactaccgcgacaacaccgagctcccgcatcacggcaagcaccggccggaggaggggccaccagggcctctaggcaggactgccatgcagtgaagccctcagtgagctgccactgagtcgggagcccagaggaacggcgtgaagccactggaccctctcccgggacctcctgctggctcctcctgcccagcttcctatgcaaggctttgtgttttcaggaaagggcctagcttctgtgtggcccacagagttcactgcctgtgagacttagcaccaagtgctgaggctggaagaaaaacgcacaccagacgggcaacaaacagtctgggtccccagctcgctcttggtacttgggaccccagtgcctcgttgagggcgccattctgaagaaaggaactgcagcgccgatttgagggtggagatatagataataataatattaataataataatggccacatggatcgaacactcatgatgtgccaagtgctgtgctaagtgctttacgaacattcgtcatatcaggatgacctcgagagctgaggctctagccacctaaaaccacgtgcccaaacccaccagtttaaaacggtgtgtgttcggaggggtgaaagcattaagaagcccagtgccctcctggagtgagacaagggctcggccttaaggagctgaagagtctgggtagcttgtttagggtacaagaagcctgttctgtccagcttcagtgacacaagctgctttagctaaagtcccgcgggttccggcatggctaggctgagagcagggatctacctggcttctcagttctttggttggaaggagcaggaaatcagctcctattctccagtggagagatctggcctcagcttgggctagagatgccaaggcctgtgccaggttccctgtgccctcctcgaggtgggcagccatcaccagccacagttaagccaagccccccaacatgtattccatcgtgctggtagaagagtctttgctgttgctcccgaaagccgtgctctccagcctggctgccagggagggtgggcctcttggttccaggctcttgaaatagtgcagccttttcttcctatctctgtggctttcagctctgcttccttggttattaggagaatagatgggtgatgtctttccttatgttgctttttcaacatagcagaattaatgtagggagctaaatccagtggtgtgtgtgaatgcagaagggaatgcaccccacattcccatgatggaagtctgcgtaaccaataaattgtgcctttctcactca

SEQ ID NO: 157193 - DNA, 2433 bp, Artificial Sequence
  derived and/or modified sequence
aagcgggagggcttctgccagctgctgcagcagatgaagaacaagcacagcgagcagcctgagccagacatgatcaccatcttcatcggcacctggaacatgggaaatgcccccccacccaagaagatcacctcctggttcctgagcaagggccagggcaagaccagagatgattctgctgactacatcccccatgacatctacgtgattggcacccaggaggaccccctgtctgagaaggagtggctggagatcctgaagcacagcctgcaggagatcacctctgtgaccttcaagacagtggccatccacaccctgtggaacatcagaattgtggtgctggccaagccagagcacgagaaccgcatcagccacatctgcacagacaacgtgaagacaggaattgccaacaccctgggcaacaagggagctgtgggcgtgtccttcatgttcaacggcaccagcctgggctttgtgaacagccacctgaccagcggcagcgagaagaagctgcggaggaaccagaactacatgaacatcctgcgcttcctggccctgggggacaagaagctgagccccttcaacatcacccaccgcttcacccacctgttctggtttggagacctgaactacagagtggacctgcccacctgggaggccgagaccatcatccagaagatcaagcagcagcagtatgctgacctgctgagccatgaccagctgctgacagaaagaagagagcagaaggtgttcctgcactttgaggaggaggagatcacctttgcccccacctacagatttgagcggctgacccgggacaagtatgcctacaccaagcagaaggccaccggcatgaagtacaacctgcccagctggtgtgacagagtgctgtggaagagctaccccctggtgcacgtggtgtgccagagctatggcagcaccagtgacatcatgaccagtgaccacagccctgtgtttgccacctttgaagctggggtgaccagccagtttgtgtccaagaatggacctggcaccgtggacagccagggccagatcgagttcctgcgctgctacgccaccctgaagaccaagagccagaccaagttctacctggagttccacagcagctgcctggagagctttgtgaagagccaggagggggagaatgaggagggcagcgagggggagctggtggtgaagtttggagagaccctgcccaagctgaagcccatcatcagtgaccctgagtacctgctggaccagcacatcctgatcagcatcaagagcagtgacagtgatgagagctatggagagggctgcatcgccctgcggctggaggccacagagacccagctgcccatctacacccccctgacccaccacggggagctgaccggccacttccagggcgagatcaagctgcagaccagccagggcaagacccgggagaagctgtatgactttgtgaagacagaaagagatgagagcagcggccccaagaccctgaagagcctgaccagccatgaccccatgaagcagtgggaggtgaccagccgggccccaccctgcagcggcagcagcatcacagagatcatcaaccccaactacatgggcgtgggccccttcggcccccccatgcccctgcacgtgaagcagaccctgagcccagaccagcagcccacagcctggagctatgaccagccccccaaggacagccccctgggcccctgccgcggggagagcccccccaccccacctggccagccccccatcagccccaagaagttcctgcccagcacagccaacagaggcctgccccccaggacccaggagagccggcccagcgacctgggcaagaatgctggggacaccctgccccaggaggacctgcccctgaccaagccagagatgtttgagaaccccctgtatggcagcctgagcagcttccccaagccagcccccaggaaggaccaggagagccccaagatgcccaggaaggagcccccaccctgcccagagcccggcatcctgagccccagcatcgtgctgaccaaggcccaggaggccgacagaggagagggccctgggaagcaggtgcctgccccccggctgcggagcttcacctgcagcagcagcgctgagggccgggccgccggcggggacaagagccagggcaagcccaagacccctgtgagcagccaggcccctgtgcctgccaagaggcccatcaagcccagccgctctgagatcaaccagcagaccccacccacccccaccccccggccccccctgcctgtgaagagccctgctgtgctgcacctgcagcacagcaagggccgggactacagagacaacacagagctgccccaccacggcaagcacaggcctgaggagggccccccaggccccctgggccgcacagccatgcagtag

SEQ ID NO: 157194 - DNA, 666 bp, Artificial Sequence
  derived and/or modified sequence
atggtgccctgctggaaccacggcaacatcaccaggagcaaggccgaggagctgctgagcaggacaggcaaggatggcagcttcctggtgcgggccagcgagagcatcagccgggcctatgccctgtgtgtgctgtacagaaactgtgtgtacacctaccgcatcctgcccaatgaagatgacaagttcaccgtgcaggccagcgagggcgtgtccatgaggttcttcaccaagctggaccagctgattgagttctacaagaaggagaacatgggcctggtgacccacctgcagtaccctgtgcccctggaggaggaggacacaggagatgatcctgaggaggacacagagagcgtggtgagccccccagagctgccccccaggaacatccccctgacagccagcagctgtgaggccaaggaggtgcccttcagcaatgaaaacccccgggccacagagaccagccggcccagcctgtctgagaccctcttccagaggctgcagagcatggacaccagcggcctgcctgaggagcacctgaaggccatccaggactacctgagcacccagctggcccaggacagcgagtttgtgaagacaggcagcagcagcctgccccacctgaagaagctgaccaccctgctgtgcaaggagctgtatggatag

SEQ ID NO: 157195 - DNA, 2826 bp, Artificial Sequence
  derived and/or modified sequence
cggccccaggtgcctggagaggccaaccccatcaacatggtgtccaagctgagccagctgaccagcctgctgagcagcattgaggacaaggtgaaggccctgctgcacgagggccctgagagcccccaccggcccagcctcatcccccctgtgacctttgaggtgaaggccgagagcctgggcatcccccagaagatgcagctgaaggtggatgtggagagcggcaagctgatcatcaagaagagcaaggatggcagcgaggacaagttctacagccacaagaagatcctgcagctgatcaagagccagaagttcctgaacaagctggtgatcctggtggagacagagaaggagaagatcctgaggaaggagtatgtgtttgctgacagcaagaagcgggagggcttctgccagctgctgcagcagatgaagaacaagcacagcgagcagcctgagccagacatgatcaccatcttcatcggcacctggaacatgggaaatgcccccccacccaagaagatcacctcctggttcctgagcaagggccagggcaagaccagagatgacagcgctgactacatcccccatgacatctacgtgattggcacccaggaggaccccctgtctgagaaggagtggctggagatcctgaagcacagcctgcaggagatcacctctgtgaccttcaagacagtggccatccacaccctgtggaacatccgcatcgtggtgctggccaagccagagcatgaaaatcgcatcagccacatctgcacagacaacgtgaagacaggcatcgccaacaccctgggcaacaagggagctgtgggcgtgtccttcatgtttaatggcaccagcctgggctttgtgaacagccacctgaccagcggcagcgagaagaagctgcggaggaaccagaactacatgaacatcctgcgcttcctggccctgggggacaagaagctgagccccttcaacatcacccaccgcttcacccacctgttctggtttggagacctgaactacagagtggacctgcccacctgggaggccgagaccatcatccagaagatcaagcagcagcagtatgctgacctgctgagccatgaccagctgctgacagagcggcgggagcagaaggtgttcctgcactttgaggaggaggagatcacctttgcccccacctacagatttgagcggctgacccgggacaagtatgcctacaccaagcagaaggccaccggcatgaagtacaacctgcccagctggtgtgacagagtgctgtggaagagctaccccctggtgcacgtggtgtgccagagctatggcagcaccagtgacatcatgaccagtgaccacagccctgtgtttgccacctttgaggccggcgtgaccagccagtttgtgtccaagaatggacctggcaccgtggacagccagggccagatcgagttcctgcgctgctacgccaccctgaagaccaagagccagaccaagttctacctggagttccacagcagctgcctggagagctttgtgaagagccaggagggagaaaatgaggagggcagcgagggggagctggtggtgaagtttggagagaccctgcccaagctgaagcccatcatcagtgaccctgagtacctgctggaccagcacatcctgatcagcatcaagagcagtgacagtgatgagagctatggagagggctgcatcgccctgcggctggaggccacagagacccagctgcccatctacacccccctgacccaccacggggagctgaccggccacttccagggcgagatcaagctgcagaccagccagggcaagacccgggagaagctgtatgactttgtgaagacagaaagagatgagagcagcggccccaagaccctgaagagcctgaccagccatgaccccatgaagcagtgggaggtgaccagccgggccccaccctgcagcggcagcagcatcacagagatcatcaaccccaactacatgggcgtgggcccctttggaccacccatgcccctgcacgtgaagcagaccctgagcccagaccagcagcccacagcctggagctatgaccagccccccaaggacagccccctgggcccctgccgcggggagagcccccccaccccacctggccagccccccatcagccccaagaagttcctgcccagcacagccaacagaggcctgccccccaggacccaggagagccggcccagcgacctgggcaagaatgctggggacaccctgccccaggaggacctgcccctgaccaagccagagatgtttgagaaccccctgtatggcagcctgagcagcttccccaagccagcccccaggaaggaccaggagagccccaagatgcccaggaaggagcccccaccctgcccagagcccggcatcctgagccccagcatcgtgctgaccaaggcccaggaggccgacagaggagagggccctgggaagcaggtgcctgccccccggctgcgctccttcacctgcagcagcagcgctgagggccgggctgctggaggagacaagagccagggcaagcccaagacccctgtgagcagccaggcccctgtgcctgccaagaggcccatcaagcccagccgctctgagatcaaccagcagaccccacccacccccacccccaggcctcccctgcctgtgaagagccctgctgtgctgcacctgcagcacagcaagggccgggactacagagacaacacagagctgccccaccacggcaagcacaggcctgaggagggccccccaggccccctgggccgcacagccatgcagtag

SEQ ID NO: 157196 - DNA, 2826 bp, Artificial Sequence
  derived and/or modified sequence
cctccccaggtgcctggagaggccaaccccatcaacatggtgtccaagctgagccagctgaccagcctgctgagcagcattgaggacaaggtgaaggccctgctgcacgagggccctgagagcccccaccggcccagcctcatcccccctgtgacctttgaggtgaaggccgagagcctgggcatcccccagaagatgcagctgaaggtggatgtggagagcggcaagctgatcatcaagaagagcaaggatggcagcgaggacaagttctacagccacaagaagatcctgcagctgatcaagagccagaagttcctgaacaagctggtgatcctggtggagacagagaaggagaagatcctgaggaaggagtatgtgtttgctgacagcaagaagcgggagggcttctgccagctgctgcagcagatgaagaacaagcacagcgagcagcctgagccagacatgatcaccatcttcatcggcacctggaacatgggaaatgcccccccacccaagaagatcacctcctggttcctgagcaagggccagggcaagaccagagatgacagcgctgactacatcccccatgacatctacgtgattggcacccaggaggaccccctgtctgagaaggagtggctggagatcctgaagcacagcctgcaggagatcacctctgtgaccttcaagacagtggccatccacaccctgtggaacatccgcatcgtggtgctggccaagccagagcatgaaaatcgcatcagccacatctgcacagacaacgtgaagacaggcatcgccaacaccctgggcaacaagggagctgtgggcgtgtccttcatgtttaatggcaccagcctgggctttgtgaacagccacctgaccagcggcagcgagaagaagctgcggaggaaccagaactacatgaacatcctgcgcttcctggccctgggggacaagaagctgagccccttcaacatcacccaccgcttcacccacctgttctggtttggagacctgaactacagagtggacctgcccacctgggaggccgagaccatcatccagaagatcaagcagcagcagtatgctgacctgctgagccatgaccagctgctgacagagcggcgggagcagaaggtgttcctgcactttgaggaggaggagatcacctttgcccccacctacagatttgagcggctgacccgggacaagtatgcctacaccaagcagaaggccaccggcatgaagtacaacctgcccagctggtgtgacagagtgctgtggaagagctaccccctggtgcacgtggtgtgccagagctatggcagcaccagtgacatcatgaccagtgaccacagccctgtgtttgccacctttgaggccggcgtgaccagccagtttgtgtccaagaatggacctggcaccgtggacagccagggccagatcgagttcctgcgctgctacgccaccctgaagaccaagagccagaccaagttctacctggagttccacagcagctgcctggagagctttgtgaagagccaggagggagaaaatgaggagggcagcgagggggagctggtggtgaagtttggagagaccctgcccaagctgaagcccatcatcagtgaccctgagtacctgctggaccagcacatcctgatcagcatcaagagcagtgacagtgatgagagctatggagagggctgcatcgccctgcggctggaggccacagagacccagctgcccatctacacccccctgacccaccacggggagctgaccggccacttccagggcgagatcaagctgcagaccagccagggcaagacccgggagaagctgtatgactttgtgaagacagaaagagatgagagcagcggccccaagaccctgaagagcctgaccagccatgaccccatgaagcagtgggaggtgaccagccgggccccaccctgcagcggcagcagcatcacagagatcatcaaccccaactacatgggcgtgggcccctttggaccacccatgcccctgcacgtgaagcagaccctgagcccagaccagcagcccacagcctggagctatgaccagccccccaaggacagccccctgggcccctgccgcggggagagcccccccaccccacctggccagccccccatcagccccaagaagttcctgcccagcacagccaacagaggcctgccccccaggacccaggagagccggcccagcgacctgggcaagaatgctggggacaccctgccccaggaggacctgcccctgaccaagccagagatgtttgagaaccccctgtatggcagcctgagcagcttccccaagccagcccccaggaaggaccaggagagccccaagatgcccaggaaggagcccccaccctgcccagagcccggcatcctgagccccagcatcgtgctgaccaaggcccaggaggccgacagaggagagggccctgggaagcaggtgcctgccccccggctgcgctccttcacctgcagcagcagcgctgagggccgggctgctggaggagacaagagccagggcaagcccaagacccctgtgagcagccaggcccctgtgcctgccaagaggcccatcaagcccagccgctctgagatcaaccagcagaccccacccacccccacccccaggcctcccctgcctgtgaagagccctgctgtgctgcacctgcagcacagcaagggccgggactacagagacaacacagagctgccccaccacggcaagcacaggcctgaggagggccccccaggccccctgggccgcacagccatgcagtag

SEQ ID NO: 157197 - DNA, 2433 bp, Artificial Sequence
  derived and/or modified sequence
aagcgggagggcttctgccagctgctgcagcagatgaagaacaagcactccgaacagccagagcccgatatgataacaattttcatcgggacctggaacatgggtaatgcccccccccctaagaaaattacaagctggtttctatcaaagggtcagggcaagacccgagatgacagcgcagactacatccctcatgatatttatgttatcggcactcaagaagatccactgtcagaaaaagagtggctggaaatactcaaacacagtctccaggaaattacgtctgtgacctttaagacggtcgccattcacacactgtggaacatcagaatcgtcgtgctggccaaacccgagcacgaaaatagaatcagccatatttgtactgacaatgtaaaaactggcatcgccaacaccctgggaaataagggtgccgtgggcgttagctttatgtttaatggaacttctttggggttcgtgaactcacatctgacgtccggatccgaaaagaagctccgtcggaaccaaaactatatgaatatcctgcggtttctcgcactgggcgataagaagctctctcccttcaatattactcaccggttcacccaccttttctggtttggggatctcaactatagggtggacctgcccacatgggaagccgagaccattattcagaagatcaagcagcagcagtacgccgatctgctgagtcacgaccagctgttaacagagcggcgcgagcaaaaagtgttcctgcatttcgaggaggaagagattactttcgcccctacctatcgcttcgaacggctgacaagagacaagtatgcgtatacaaagcaaaaagcgactggaatgaaatacaatcttcccagttggtgtgatagggtgttgtggaagtcctatccgctggtgcacgtcgtctgtcaatcttatggctccacatccgatattatgacatccgatcatagtcctgtttttgccacctttgaggccggggtgacatcacagtttgtgtcaaaaaatgggcctggaacagtggatagtcagggtcagattgaattcctgaggtgttacgccacactgaaaaccaaatcacagactaagttctatctagagtttcactccagctgtctggaaagtttcgtcaagagccaggagggcgagaacgaggagggcagcgaaggcgagctggttgtgaaattcggggagaccctccccaaactaaagcctattatatctgaccctgagtacctactggaccagcatatccttatctctatcaaatctagcgactccgacgagagttacggcgagggctgtatcgcactgagacttgaggccaccgagactcagcttcccatttacaccccattaacccatcatggcgagctgaccggccacttccagggggagataaagctacagaccagtcaggggaagactcgcgaaaagctgtatgatttcgtaaagacagagcgcgacgagtcttccggccccaagacattgaaaagcctcacttcacacgaccctatgaagcagtgggaggttacgtctcgcgctcctccctgttccgggagctcaattacggaaatcattaatccgaactacatgggagtggggcctttcgggccgcccatgcccctgcacgtgaagcagactttaagccccgatcaacagcccacagcttggagttacgatcaacctccgaaggacagtcctctgggtccgtgtcgcggcgagagcccgcccacccctccaggtcaaccccctattagcccaaagaagtttctgccaagcacagccaaccgtggcctgccaccccgaacacaggagtcacggccttcagacctggggaaaaatgccggcgacaccttgcctcaggaagacctccccctgactaagcccgagatgttcgagaaccccttatacggaagtctgagctccttccccaagccagccccgcggaaagaccaggaatctcccaaaatgccaaggaaggaacccccgccatgtcctgagcctggaattttaagtccatctattgtcttgaccaaagcgcaggaagcggacaggggggagggccccggaaagcaggtgcccgccccgcggctgcgatccttcacctgttccagttctgccgagggaagggctgcggggggcgacaagtcccagggtaagccaaagacacctgtgtccagccaggcccccgttcccgccaagcgtccaatcaagccctccagaagtgaaattaatcagcagacccctcctacaccaaccccaaggccgcctctgcccgtcaagtccccagctgtgcttcacttacagcactctaaagggagagactacagagataatacagagctgccacaccatggaaaacaccgaccagaggaaggtccgcccggaccactgggtagaacagcaatgcagtag

SEQ ID NO: 157198 - DNA, 666 bp, Artificial Sequence
  derived and/or modified sequence
atggtgccctgctggaaccacggcaacatcacccggagcaaggccgaagagctcctctcacgcaccggcaaggacgggtcctttcttgtgcgggcttcggagagcatttcacgcgcatatgccctgtgcgtactctatcggaattgcgtgtacacgtaccggattcttccaaacgaggacgataaattcaccgtgcaagcttccgagggagtctcaatgcgttttttcacaaagctggaccagcttatagagttttacaaaaaagaaaacatgggactggtgacccatcttcagtatccagtgcctctggaggaggaggatacaggcgacgacccagaagaagataccgaaagtgtggtgtcacccccggaactcccaccccgcaacatccccctaacagcgagttcttgtgaagcgaaggaggtccctttttcaaatgagaacccccgcgcaaccgaaactagccgccctagtctttccgagaccttatttcagcgactgcagagcatggataccagcggtctacccgaggagcacctgaaagccatacaagattacctatcgacccagctggcccaggacagcgagttcgtgaagaccggcagcagctctctacctcaccttaagaagctgacgacattactctgtaaggagctgtatggctag

SEQ ID NO: 157199 - DNA, 2433 bp, Artificial Sequence
  derived and/or modified sequence
aagcgggagggcttctgccagctgctgcagcagatgaagaacaagcactctgaacagcccgagcctgatatgattacaatattcattgggacctggaatatgggcaatgccccacctcctaaaaaaatcacgtcatggttcctatctaaagggcaggggaaaaccagagacgattcagcagactatattccccatgacatctatgtcatcggtacacaggaggatcccctctctgagaaggagtggcttgagatcctgaaacactccctccaggaaattacctccgttacattcaagaccgtggcgattcatacactctggaatattcgaatcgtggtccttgccaagcccgaacatgagaatagaatttcccacatctgtaccgacaacgtgaaaacaggaatcgctaatacactgggcaataaaggtgcagtcggcgttagctttatgttcaacggaacgagtctgggtttcgtgaactcacatctaacatcagggtctgagaaaaagttgagaaggaaccaaaattatatgaacatacttcggtttctagcgcttggggataaaaagctcagtccctttaacatcacacacagatttacccacctcttttggttcggtgaccttaattacagagtcgaccttccgacgtgggaagcagagaccattatccagaagatcaagcagcagcagtacgctgatctcctcagccacgaccagctgctcactgaacggcgtgaacagaaagtgttcttacatttcgaggaagaggaaataacatttgcacccacgtaccgattcgagagattaacacgggacaaatatgcttacaccaaacagaaggcaactggaatgaaatacaatttaccgagctggtgcgatcgtgtgctttggaagtcataccccctcgtgcatgtcgtttgccagagctatgggagcacctcagacattatgacttccgatcacagccccgtgttcgcaaccttcgaggccggggtgactagtcagttcgtgtccaaaaacggacccggcacggtcgactcccagggacaaatagagttcttacgctgttacgctaccctgaagactaaatcccagaccaagttctatctcgagtttcacagcagttgtctcgagagcttcgttaagagccaggagggggaaaatgaggagggatccgagggcgagttagtggtcaagtttggcgagacattgcctaaattgaagcctatcattagtgaccctgagtaccttctggaccagcacatcctgatatcaatcaaatccagcgatagcgatgaaagctatggtgagggttgcattgcattgagactggaggcaaccgagacacagctgcctatttatactcccctgacccatcacggcgaactgacaggccacttccaaggtgagataaaactgcagacctcacagggtaagactagggaaaaactctacgatttcgttaagactgaacgcgatgaatcgtcggggccaaagacgttgaagtcccttactagccatgaccctatgaagcagtgggaggtgaccagtagggcacccccttgcagcggctcctccatcactgagatcataaatccaaactacatgggcgtcgggccattcgggcctccaatgcccctccacgtgaagcagaccctgagtcctgatcagcaacccactgcgtggtcatacgatcagcccccaaaagatagtccactcggtccttgcagaggcgagtcccctccaacccctcctggacagccccctataagtcctaagaagttcctcccctccaccgcaaacagaggacttcctcctaggacccaggaaagcaggccatcagacctcggtaagaacgctggagacacactcccccaggaggatctgcccttaactaagcctgagatgtttgagaatccactgtacggtagtttatcttctttccccaagcctgctcctagaaaagaccaggaatccccaaagatgcctcgtaaagaacctcccccttgtcccgagcctggaatactgtcaccatccattgtccttacgaaagcgcaggaagctgaccgcggcgaggggcctggtaagcaggtcccggccccccgactaagatcatttacctgctcttcttccgcagaggggcgggcggccgggggagacaagagtcaaggcaaacccaagacacccgtgtcttctcaagcaccagtgcccgctaagcgtcctattaagccctcccgctcagagataaatcagcagactcctccgactcccacacctcgaccaccactgcctgtgaagagcccggccgtcctgcatctacagcatagcaagggaagggattatagagacaataccgaactcccccaccacggcaagcacaggccagaagagggcccccccggaccccttggccgaactgctatgcaatag

SEQ ID NO: 157200 - DNA, 2433 bp, Artificial Sequence
  derived and/or modified sequence
aagcgggagggcttctgccagctgctgcagcagatgaagaacaagcattcggagcagcctgaaccagacatgattacaattttcatcggcacgtggaacatgggaaatgcccccccccccaaaaagataacttcttggttcctgtctaaaggacagggaaagaccagagatgacagcgccgactacatccctcatgatatctatgtcattggcactcaggaggatccacttagtgaaaaggaatggcttgagatcctcaaacattcacttcaagagatcacctcagtcaccttcaaaacagtggccattcacaccttatggaacatacggattgtggtattagctaagccggagcatgagaatagaattagtcatatctgcactgataacgtgaaaacaggcattgcaaataccttggggaataaaggtgctgtgggcgtttccttcatgtttaacggtacatctctcggttttgtgaattctcacctcacatctggatccgagaaaaaacttcgcaggaatcagaactacatgaacattttgcggttcctcgctctgggagataagaagctttccccattcaacatcactcatagattcacccatctgttctggtttggggatctgaactacagagtcgatctgcccacatgggaggccgagacgattattcagaagattaagcagcagcaatatgcagatctgctgagccacgatcagcttctcaccgagaggcgggagcagaaggtgttcttgcactttgaggaagaagaaatcacttttgctccgacttaccgcttcgaacggttgaccagggataagtacgcttatacaaagcagaaggccactggcatgaaatataatctccccagctggtgcgaccgagtgctctggaagagctacccacttgtccacgttgtctgccagtcttatggaagtacaagtgacattatgactagtgatcactccccagtgttcgcaactttcgaagccggagtcacgagccaatttgtaagcaagaatgggcctggtacggtagatagtcagggtcagatcgaatttctgcgttgctatgcaactctgaaaacaaagagtcagactaaattctatctggagttccattcgtcatgcctagaaagctttgtaaagagccaagaaggcgaaaacgaggagggctccgaaggggagttggtggtcaaatttggagagaccctgcctaaattaaagcccattatctccgacccagagtacctcctggaccagcacattcttatctctatcaaaagcagtgactctgacgaatcctacggtgaaggatgtattgcactgaggctggaagcaaccgagactcagctccctatctacaccccactgactcaccacggggaacttacagggcacttccagggcgagatcaagctgcagaccagccagggaaagactcgggaaaagctctatgacttcgtgaagacggaaagagacgagtcaagtggccccaagaccctgaagtcacttacctctcacgatccaatgaagcagtgggaggttactagtcgcgcacccccctgtagcggttcctcaatcactgagatcataaaccccaattacatgggtgtcggccccttcggccctcccatgcccttacacgtcaaacagactctctcccccgaccagcaacctacagcctggtcttatgatcaaccgccgaaagattctcccctcggtccatgccggggcgagtcccctcccaccccccccggccagccacctatatcccctaaaaagtttctcccgtccactgcaaacagggggctgccacctcgcacccaggagtctcgcccatccgacctaggaaagaatgctggtgacactctgccccaggaggacctccctctgaccaagcccgaaatgttcgagaaccccttgtacggctccttgtccagcttcccgaaaccggcaccccgaaaagatcaggaatcacccaagatgccaagaaaggaacccccgccctgtcccgaaccaggtattttgtccccatccattgtgctgacaaaagctcaagaggccgatcggggggagggtcccggtaaacaggtgccagccccccgacttagatcttttacttgtagttccagtgcggaaggacgcgccgccggcggggacaagtcccaaggaaaaccgaaaactcccgtgagctcacaagctccggtgcctgctaaaaggcctatcaagccttctcgctccgagatcaaccagcagacccccccgacacctactccgcgccctcctctcccagtgaagagtccagccgttctccatttgcagcactctaaaggccgcgattaccgggataataccgaactgccacatcacggaaagcaccgacccgaagaaggcccaccagggcccctggggaggaccgccatgcagtag

SEQ ID NO: 157201 - DNA, 2826 bp, Artificial Sequence
  derived and/or modified sequence
cggccccaggtgcccggcgaggccaaccccatcaacatggtgagcaagctgagccagctaacctcactgctaagttcaatcgaagacaaggttaaagcgctgttgcatgagggacccgagtccccccaccgcccttcccttataccacctgtcactttcgaggtcaaggccgagagccttggaatcccccagaaaatgcaattgaaggtggatgtggagagcggtaaactgatcattaaaaagtcgaaagatgggtccgaagacaaattctattctcataagaaaatcctgcagttaattaagagtcagaagtttctgaacaagcttgtgatcctggttgagaccgagaaggagaagatcttgaggaaggaatacgtatttgccgatagtaagaagcgcgaggggttttgtcaactattgcagcagatgaaaaacaaacattccgaacagccagagccagatatgattaccatctttatcgggacttggaacatggggaacgcacctccacccaaaaagatcactagctggtttctgtctaaggggcagggcaagactcgcgatgactccgcggattatattcctcacgacatctacgtgataggaactcaggaggaccctctttctgaaaaggaatggcttgagatcctcaagcatagcctgcaggagattacctcagtaactttcaagaccgtggcgattcacacactgtggaatatccgtattgtggtgcttgctaagccagaacacgaaaatcgcatcagccacatctgtacagataacgtgaagaccggaattgccaacaccctgggtaataaaggcgccgtcggagtgtccttcatgtttaatgggaccagcttagggttcgtgaatagccatctcacatccgggtcagaaaagaaactgagaaggaatcagaattacatgaatatattacgcttcctcgcactgggggacaaaaagctttcccccttcaacatcactcatcgcttcacccatctcttttggttcggggaccttaactatcgagtggatctccctacttgggaggctgaaactataattcaaaaaatcaagcagcaacaatatgcagacctattatcccacgatcaactgctgacagagcgcagagaacagaaggtattcctgcactttgaggaagaggaaataactttcgcgcccacctatcggtttgagaggctaaccagggacaagtatgcctatactaagcagaaggctaccgggatgaaatataatctgccatcctggtgtgatcgtgtactctggaagagttaccccctggtacatgtggtgtgccagagttacggatctacctcagacattatgacctctgatcattccccggtttttgcaaccttcgaggccggggtcacatctcagttcgtgtccaaaaacggccctggcactgttgacagtcaggggcagatcgagttcctccgatgctatgcaacactaaagactaagtcgcaaaccaaattctacctggaattccattctagctgtttagaatcatttgtgaaaagccaggagggagagaacgaggagggatcagaaggagaactggtggtgaagttcggcgaaactttgcccaagctgaagcccattatcagcgatccggagtacttgcttgatcagcacatcctcatctctatcaaaagcagcgactctgatgaatcttacggagagggctgcattgccttgcgtctggaggccaccgagacccagctgcccatttatactcccctgacccatcacggagaacttaccgggcactttcagggcgagattaagctgcagaccagccagggcaagacacgagaaaagctctatgactttgtgaagaccgagagggacgaatctagcgggcccaagacattgaaatcactgacatcgcatgatcctatgaagcagtgggaagtaacaagcagggctcccccatgtagcggcagctctatcacagaaattattaatccaaactatatgggggtaggtccttttggccctccaatgccactccacgtcaagcaaactctgagtcctgaccagcagcccaccgcctggagctacgatcagccacccaaggacagccccctgggcccatgcagaggcgagtctcccccaaccccacctggccagccacccatttccccaaaaaagttcctcccaagtactgccaatagggggcttcctcccagaacccaggagagccggcccagcgacctgggcaagaacgctggcgataccctgccacaggaggacttgcctctgacaaagcctgagatgttcgaaaatccgttgtacgggtcactctcttcattccctaagccggcgcctagaaaggatcaagagagccccaagatgccgagaaaagagcccccaccttgccctgagcccgggatcctgtccccgtcgattgtcttgacaaaagcccaggaggccgacagaggggaagggcccggtaagcaggtgcccgcacccaggttaaggagcttcacttgttcaagtagcgcggaaggccgcgccgccggaggggacaagtcccagggaaagcccaaaacacccgtgagctctcaggcaccagtgcccgccaaacggcccataaaaccctcacgctccgaaattaatcagcagacaccgcctacacctactcctcgcccacccctcccagtgaaatcacccgccgtgttgcacctgcagcactccaagggaagagactatagagacaataccgaattgccccaccacggaaagcaccgccccgaagaaggaccaccaggccccttgggccggactgctatgcagtag

SEQ ID NO: 157202 - DNA, 2826 bp, Artificial Sequence
  derived and/or modified sequence
cccccccaggtgcccggcgaggccaaccccatcaacatggtgagcaagctgtcccaactgacaagtcttttaagctcaatcgaagataaagtgaaagctcttctccacgaggggcccgaatcaccacatcgaccatccctgatcccccctgtgacttttgaagtgaaggctgagtcgctgggcatcccgcagaagatgcagttaaaggttgatgtggagtcaggtaagttgatcatcaaaaagagcaaagacgggtccgaggacaagttttactcccacaagaagattctgcagctaattaaatcccagaagttcctgaataaactagtcatcctcgtcgagactgagaaagaaaaaatcctcagaaaagaatatgtgttcgcagacagtaagaaacgggaaggattttgccagctgctccagcaaatgaagaacaagcactccgagcaaccagaaccagatatgattaccatctttattggcacctggaatatgggcaacgcccctcctccgaagaagatcactagttggtttttgtccaaaggccagggcaagactcgcgacgacagcgccgattacattcctcatgatatatatgtgatcgggacacaggaagaccccctaagcgaaaaggagtggctggagattcttaaacacagtctgcaggagattactagcgtgacatttaaaacagttgctattcacaccctgtggaacatcaggatcgtcgtcttagcaaagccagagcacgaaaaccgtataagccatatttgtactgacaacgtgaaaacaggaatagccaatacattgggcaacaagggagccgtcggggtgtcattcatgttcaacggcacgtctctcggttttgttaatagccacttgacctcgggatctgagaaaaagctgcgcagaaatcagaattacatgaacatactgaggtttctcgcacttggtgacaagaagctttcccctttcaacattacacatagattcacacatctcttctggttcggcgacctcaattatagggtggacctgccgacgtgggaggcagagactattatccaaaagatcaaacaacaacagtatgcagatctgcttagtcacgatcagctactaactgaacggagggagcagaaggtttttctccactttgaagaggaggaaattacatttgccccaacatatcggtttgagcgtctgacgcgggacaagtatgcttacaccaaacagaaggccaccggtatgaagtacaacctcccgtcatggtgtgatcgcgtgctctggaaatcttatcctcttgtgcacgtggtctgtcaaagttacggatcaacaagcgacatcatgacatcagaccacagtcctgtgttcgccacgtttgaagcgggggttacatcgcaatttgtatctaagaatgggcccggtaccgtagattcacagggacagattgaattcttaagatgctacgccacccttaagacaaaatctcagacaaaattttacctggagttccacagttcttgcctggagtccttcgtgaagagtcaagagggtgagaatgaagaaggctccgaaggggagctggtcgtcaagtttggcgagacgcttcctaagcttaagcctattatctcagatcctgagtatctgctggatcagcacatcttaatttcgatcaaaagtagcgactcggacgaatcttatggcgaaggatgcattgccctgagactcgaggctaccgagactcagttacctatctacacgcctctgactcatcacggtgagctgacagggcacttccagggagaaattaaattgcagacatcacagggcaagaccagagaaaagttatacgattttgtcaaaacagagagagatgagtcaagtggccctaagacactgaagtctctaacatcacacgaccctatgaaacagtgggaagtaacatccagggctcccccctgctcaggttcaagcattaccgagatcatcaacccaaactacatgggcgtgggtccgttcgggccacccatgccgctacatgtgaagcagacgttgagtcccgaccagcagccgacagcttggagttacgaccaacctcccaaagacagccctctgggcccctgccggggcgaatcccctcccacaccccccgggcagccaccgatctcacccaagaaatttctgccaagtacagctaataggggtctgcccccaagaactcaagagagcaggcccagtgatttaggcaagaatgctggagacacactgccccaagaagacctaccattgacaaaaccagagatgtttgaaaaccccctgtatggctccttatccagctttcccaaacccgcacccaggaaggaccaagaatcccctaagatgccccggaaggaacccccaccgtgtccggaacccgggatcctctcaccttcaattgtgctcacaaaggctcaggaagccgaccgcggcgagggcccaggcaagcaagtacccgctcctagactgcggtctttcacatgtagctccagcgctgagggccgagctgctgggggggacaaatcacagggaaaacccaaaactcctgtttcgagtcaagcccccgtgccagccaagagacctataaaacctagtaggtctgagatcaatcaacaaacaccaccaacgcctaccccccggccacctctccctgtcaagtcccctgccgtgcttcacctgcagcattctaaaggtcgggactacagggataacaccgagctgccccaccacggaaaacatcgaccagaggagggcccccctggccccctggggcgaactgcaatgcagtag

SEQ ID NO: 157203 - DNA, 2433 bp, Artificial Sequence
  derived and/or modified sequence
aagcgcgaaggcttctgccagctcctccagcagatgaagaacaagcattcagagcagcccgagccggacatgatcaccattttcatcggcacatggaacatggggaacgccccacctcccaagaaaatcaccagctggtttctgagtaagggacagggtaaaaccagagatgattccgctgattacatacctcacgatatctatgtaatcggcacccaagaggacccactgtcggagaaagagtggctcgaaatattgaagcattctctccaagagatcacgtccgtgaccttcaagactgtggccatccatacactatggaacatcagaatcgtggtgctggccaaacccgaacacgaaaaccggatctctcacatttgcaccgataacgtaaagaccggcatcgcaaatacactcggaaataagggcgcagtcggcgttagcttcatgttcaatggaaccagccttggattcgttaacagtcacctgacatccggctccgaaaaaaagctgaggcgcaaccaaaattacatgaacattctgagattcctggccttaggcgataaaaaactttctccgttcaacatcacacaccgttttactcatcttttttggtttggtgatctgaactaccgggtggacctccctacctgggaagccgaaacaatcattcagaagataaagcagcagcaatatgccgacctcctttctcacgatcagctgctcacagagaggagggagcagaaggtcttccttcattttgaggaggaggaaataaccttcgcaccaacataccggttcgagcggcttactcgggacaaatacgcctatacgaagcagaaagccacagggatgaaatataatctgccaagctggtgtgaccgcgtcctgtggaaatcgtatccactggttcacgtagtttgccagagttatggatctacttcagacattatgacctccgaccactccccggtatttgctacattcgaagctggggtgaccagccagtttgtgagcaagaatggaccaggaaccgttgattcccagggtcagattgaattcctgaggtgctatgctaccctgaagacaaagagtcagactaaattttatttggaattccactcctcctgtttggagtcatttgtcaagtctcaggaaggcgaaaacgaggaaggcagcgagggggagttagtggtaaagtttggcgagactcttccgaagctcaaacccattatcagcgacccggagtatcttttggaccaacatatcctcatttctattaaaagctccgatagtgatgaaagctacggcgaggggtgcatagcactgcgattggaggcgaccgaaactcagctcccgatctataccccccttacccaccacggcgaactgactggccactttcagggcgagattaaactgcagacctctcagggaaagacccgcgagaagctctacgactttgtcaaaacagaacgggatgagtctagcggtccaaagacactgaagtccctgacctcacatgaccctatgaagcagtgggaggtcacttctagggcacccccttgtagcggaagctccattactgaaatcatcaaccccaactacatgggggttggccctttcggcccaccgatgcctcttcatgtgaagcagaccctgagccccgatcagcagcctaccgcctggagctatgaccagcctcccaaagatagtccactcgggccatgccgcggagaatcgccgccaacacccccaggacagccacccatctcacctaagaagttcctgccatctacagcaaaccgcggattaccacctcggacacaggaatccagaccctccgacctggggaagaacgctggagacactctcccgcaagaagaccttcccctgactaagccggagatgttcgaaaaccccctgtacggctccctaagttcatttccaaagccagccccacgtaaagatcaggaatctcctaaaatgcccaggaaggagccccctccgtgtcccgagcccggaattctgagtccctctatagtgctgaccaaggcccaggaggccgatagaggtgaagggccaggaaagcaagtcccagcaccccgtcttcgaagctttacatgttcatccagtgcggaagggagggccgcaggtggcgacaaatctcagggaaaaccaaaaaccccggtctcatcgcaggcaccagtgcccgctaaacgacctatcaaaccatctaggagcgagattaaccaacagaccccacccacgccaaccccgaggcctccactgccggtgaaatccccggcagtactgcacctgcaacatagcaagggtcgcgactacagagacaacactgaactcccacaccacgggaaacatcgacccgaggaaggcccacccggaccattaggcagaactgcaatgcaatag

SEQ ID NO: 157204 - DNA, 666 bp, Artificial Sequence
  derived and/or modified sequence
atggtaccatgttggaatcatgggaatattacccggtcaaaagccgaggaacttctctcacgaaccggtaaggatggctcctttctggtgagagctagcgagtccatcagccgggcatatgcgctatgcgtgttatatcgcaactgtgtctatacatatagaatcctgcctaatgaggatgacaagttcactgtgcaggccagtgagggagtgagcatgagattcttcacaaagctggaccagctcattgaattttataaaaaagagaatatggggctagttactcatctgcagtaccccgttccactggaagaagaggacaccggggatgacccagaggaagataccgagtctgttgttagcccccctgagctgccgccacggaatatcccacttaccgcctccagctgtgaggccaaggaggttcccttcagcaatgaaaaccccagggcaactgagacttctcggccttcactcagcgaaaccctgttccagcggctgcagtctatggacaccagcggattgcctgaagagcacctcaaggccattcaggattacctctctacacagttggctcaagactctgagttcgtgaagacaggttccagtagtctcccccatctgaaaaaattgacgacactgctttgcaaggagttgtacggttag

SEQ ID NO: 157205 - DNA, 2433 bp, Artificial Sequence
  derived and/or modified sequence
aaacgggagggattttgccagctgcttcagcagatgaagaacaaacatagtgagcaacccgaaccggatatgataactatctttattggcacctggaatatgggaaacgctcctccacccaaaaaaatcactagctggttccttagtaaaggacaggggaagacccgagatgactccgcggattatatcccccacgatatctatgttattggaacccaggaagatcccctttcagagaaggaatggctggagattcttaagcattcactccaagaaatcacaagtgtgacgtttaaaacggtggccatacacactctgtggaatattcggatcgtggtactcgccaagcctgaacatgagaatcggataagccatatctgcacagataatgtgaagacaggaatcgcaaatacattgggaaacaagggcgctgtgggtgttagctttatgttcaatgggacatccttggggtttgtgaattcccacctgacaagtgggtcggagaaaaagttgcgtaggaaccagaattacatgaacatcctgcgctttctggcgttgggggacaagaagctgagccctttcaacatcactcaccgtttcacgcacctgttctggttcggcgacctgaactatagagtggatctcccgacctgggaagccgaaaccataatacagaaaataaagcagcagcagtatgcagatttgctcagtcatgatcagcttctgaccgaacgcagggagcagaaagtatttctgcacttcgaagaagaggagattaccttcgctccaacttatcggttcgaacgtttgaccagagacaagtatgcatacaccaagcaaaaggccactgggatgaaatacaacctgccatcatggtgtgatagggtgctgtggaagagctacccccttgtgcatgtggtgtgtcagagctatggctcaaccagcgacataatgacctcggatcattcacccgtgttcgccacttttgaagctggagttacgagccagtttgtaagcaagaatggtcctggtacagtggattcccagggccaaatcgagttcctgaggtgctatgcaacccttaagaccaaatctcagactaaattctaccttgaatttcattcgtcttgtctggagtctttcgttaaaagccaggagggcgaaaacgaggaaggctcagagggagaactggtagtgaaatttggggagacactgccaaaattgaagcccatcatcagcgatccagagtacctgctggatcagcatattttaatatccattaaaagttccgatagtgacgaatcgtacggagagggatgtatagccctgagactggaggcgaccgagacacagctgcctatctacactcccctgactcaccatggcgaactgactggacactttcagggcgagatcaagcttcagacctctcaagggaagacgcgcgagaagctttacgattttgtcaaaacagagagggacgaatcctccggccctaaaactctaaagtcactcacttcgcatgacccgatgaagcagtgggaggttacttcccgcgctccaccatgctcaggatcgagtatcactgagattatcaaccctaactatatgggagtggggccatttggaccccctatgccactgcatgttaaacagaccctcagtccagatcagcaaccaaccgcgtggagttatgaccagccacctaaagatagtccccttggaccttgcagaggagagtcgcctcctacaccccctggacagccgccaatctctccgaaaaagtttctcccgagcaccgcgaaccgcggtctccctccaaggacccaggaatcaagaccttcagacttggggaagaacgccggagacacgctgcctcaagaggacctgccccttaccaaacctgagatgttcgagaatcctttgtatggcagcctgtctagcttcccgaaaccagcaccacgaaaggaccaagagagtcctaagatgccaagaaaagaaccacctccctgccccgagccaggtatcctttcgcccagcattgtactcacaaaggcacaggaggcagatcgtggcgaagggccaggcaagcaggtaccagcccctcggttgcggtccttcacatgctctagctcagccgaggggagagcagctggtggcgataagagtcagggtaagcctaagacccctgtttcatctcaggctcctgtacctgctaagcgacccatcaagccctcacgaagtgagattaaccaacagaccccccctacgcctacaccgagaccacctctgccagtgaagagtccagcagttctgcacctccagcattcaaaaggtcgagattatagggacaacactgaacttcctcaccacggtaaacatcgcccagaggaggggccacctggacccttagggagaacggccatgcagtag

SEQ ID NO: 157206 - DNA, 2433 bp, Artificial Sequence
  derived and/or modified sequence
aaacgggaaggattttgccaattactccagcagatgaagaataagcactcagagcagcctgagccagacatgataacgatcttcattgggacatggaacatgggtaatgccccaccccctaagaagatcaccagctggttcctgagcaaagggcaaggcaaaaccagggacgactctgcagattatattccccatgatatttacgtcatcggcacccaagaagatccactgtcagagaaggaatggctcgagatattaaaacactccctgcaggagattacttctgtgacatttaaaaccgtagccatacacactctttggaacatccgcatagttgtccttgcaaagcccgaacacgagaatcgcatctcccatatctgcaccgataatgtgaaaaccggtatagctaacactcttgggaataagggcgctgtgggggtctctttcatgttcaatggcaccagcttggggttcgttaacagccatttaacaagtgggagcgaaaaaaaattgagacggaatcagaattacatgaacatactgcgattcctcgccctgggcgataagaaacttagccctttcaacatcacccatcggtttactcacctgttctggttcggggatttgaactaccgagtcgatctgcctacctgggaggcggaaaccatcatacagaagatcaaacaacagcagtatgccgacttattatctcatgatcagctacttactgagcggcgagagcaaaaagtttttctgcactttgaggaggaggagatcacattcgcccctacataccgctttgaaaggcttacaagggacaaatacgcatataccaagcagaaggccaccggcatgaagtataatctgccgtcgtggtgtgacagagttttgtggaaatcttatcccctcgtccacgtggtatgtcagagttatggctcaacatccgatatcatgactagcgatcacagccctgtcttcgctacatttgaggcaggggtgacctcccagttcgtaagcaaaaacggacctggtacagtggattcgcaagggcagattgaatttttgaggtgttatgctacgttgaaaactaagagtcagacaaagttctatctggagtttcattcaagctgtttggagagtttcgtgaagagccaggagggagagaatgaggaaggaagtgagggggagctggtagtgaaattcggtgaaacgctgccaaagttaaagcccattatatctgaccctgaatacttgctcgaccagcatatattgatcagtatcaagtccagcgatagcgacgaatcttacggagaggggtgcattgctcttagactggaagcaacggagacccagcttcccatatatacgcctctgacccaccatggggagctgacgggacatttccaaggagagataaaactgcaaacaagccaggggaaaacgcgggaaaaactttatgattttgttaagaccgagcgtgatgaatcaagtgggccaaagactctcaagagccttaccagtcacgatccaatgaaacagtgggaggttaccagccgcgctcccccatgcagtgggtcaagcattactgagatcatcaatcccaattatatgggcgtggggccttttgggcctccaatgcctttgcacgtgaagcagactttgagtcctgatcagcagccaactgcatggagctacgaccagccacctaaggattcaccgctaggcccatgccgcggagagtcccctcccacgccacccggtcaaccacctatcagtcccaaaaaatttttacctagtaccgctaatcgcggactgcctccgagaacacaggaaagccgccctagcgacctcggcaagaacgcaggggacactctgccacaggaagatctccccctcactaagcctgaaatgtttgaaaatccactctatggaagtctttctagtttcccgaagcctgccccacgcaaggaccaggagagcccgaagatgccgcgtaaagagccgcctccatgtcctgaacccggaatcctctccccctctatcgtcctgacaaaggcccaggaggcggacaggggagagggccctggaaaacaggttcccgcaccgaggcttcgttctttcacctgcagcagctcagctgagggacgggcagcaggaggagacaaatctcagggcaaacctaagacacccgtgagcagccaggcccctgtcccagccaaaagaccaattaagccaagtcgctccgagattaaccaacaaactccaccaacccctactcctagaccacctctgcctgtgaagtctccagccgttctgcacctccagcattccaaagggagggattatagagataacaccgaattgcctcaccacgggaaacaccggccagaagaaggcccaccaggcccattaggcaggaccgccatgcagtag

SEQ ID NO: 157207 - DNA, 2826 bp, Artificial Sequence
  derived and/or modified sequence
cgtcctcaggtgccgggagaagccaaccctattaacatggtgtccaaactctctcaactgactagcctgctgagctcaattgaagataaagtgaaagctctgctgcacgaagggccagagtcccctcatcgtcccagccttatcccccctgtgacattcgaggtgaaggccgagtccctgggcatcccacagaaaatgcaactcaaagtggacgtcgaaagcggcaagctgatcattaagaagtctaaggacggatctgaggataaattttacagccacaaaaagatactgcagttaatcaagtcacagaagttccttaacaaacttgtgattttggttgagacagagaaggaaaagatcctgcggaaagagtacgtgttcgcagactcgaaaaaacgcgagggcttctgccagctgctgcaacaaatgaagaataaacacagtgagcaaccagagcctgacatgatcacaatttttatcggcacctggaacatgggaaacgcaccgcctccaaaaaagatcacatcctggttcctgagtaagggacaaggtaaaacgcgggatgattctgccgattacataccccacgacatttacgtgattggtacccaagaagacccactgtccgaaaaagagtggttggagatactcaagcactcattacaagaaattacttccgtgacctttaaaaccgtcgccattcacaccctgtggaatattaggattgtggtcttggcaaagcctgagcacgaaaacaggatatcacacatctgtactgacaacgtgaagacgggtatcgccaacaccctaggcaataagggcgctgttggcgtgtcattcatgttcaacggtacctctctcggattcgtgaactcacacctgacatctggctctgagaaaaaactgcgaaggaatcagaattatatgaatattctgcgctttctcgcactcggagataaaaagcttagcccctttaacatcacgcacaggttcacccacctcttctggtttggagatctgaattaccgagtcgatctgccgacctgggaggccgaaactatcatccaaaaaattaagcaacagcagtatgccgacctcttgtcacatgatcagctgctaaccgaacgtagggaacaaaaagtgtttctacactttgaggaggaggagataaccttcgctccaacatatcgtttcgagaggctgacccgagataagtatgcctataccaaacagaaggccacgggcatgaagtataatcttccctcgtggtgcgatagggtgctttggaagtcctaccccttggtacacgtggtatgtcaaagctacggctccacttccgacatcatgacgtcagaccatagtcccgtctttgctacatttgaggcgggagtgacctcccagtttgtgagcaaaaacggcccaggaactgtcgatagccagggacagatcgagtttctccgatgttatgctaccctgaagacaaaatcccaaactaaattctatttggagttccactccagctgcctcgagagctttgtgaagtctcaggagggcgagaatgaggagggaagcgagggggaactggtagtgaagtttggcgaaacacttcccaagctcaagcctataatatctgatcccgaatacctgttggaccagcatatacttatttctattaagagttccgatagcgatgaatcttacggagaaggctgcatcgccctgcgcttagaagcgaccgagacccaactaccaatatatacgccactgacccaccacggggaactaaccggccacttccagggcgagataaagttgcaaactagccagggcaagacacgagaaaagctttatgactttgtgaaaaccgagagagatgagtcgtccggtcctaagactctgaagtccctgacttcacacgatcccatgaagcagtgggaggttacctccagggccccaccttgttctgggtccagcatcacagagattattaatcctaactatatgggggtcgggccttttggccctcccatgccgctccacgtaaaacaaaccctatctcccgaccaacagcccactgcctggagttacgatcagccgcctaaggattctcctctgggaccatgtcggggagaatccccacccactccaccagggcaaccacccatttcacccaaaaagtttttaccttctaccgctaaccgcggtctccctcccaggacacaggaatctcggccaagcgatctgggcaaaaacgccggagacacactgccgcaagaggacctccctctgactaagccagagatgttcgagaacccgctgtatgggtcactctcttctttccccaaacccgctccgcgtaaagaccaggaaagccccaaaatgcccaggaaggaacctccaccctgtcctgaaccaggaatcctgtccccgagtattgtactcaccaaggctcaggaagccgatcgaggagagggcccaggaaagcaggtcccagctcctcggttgcggtctttcacctgctcctcgtctgccgaagggagggcggctggcggtgataaatcccagggtaagcccaagactcccgtcagctcccaggcgccagtgcctgcaaagcggcctattaagccatcacgcagcgagatcaaccaacagacaccccctactccgacgccgaggcctcccctgcctgtgaagtcccccgcagttctccacctgcagcactccaaaggtagggactaccgagacaacaccgagctgcctcaccatggaaaacataggccagaggaggggccacccggacctttggggaggactgcgatgcagtag

SEQ ID NO: 157208 - DNA, 2826 bp, Artificial Sequence
  derived and/or modified sequence
ccaccacaggtcccaggcgaagccaatcccatcaatatggtaagcaaactgtcccagcttacctctcttttgtcgtcgatcgaggacaaagtcaaagcacttctgcatgaaggcccagagtccccccaccgacctagcctgattccacccgttacctttgaagtgaaggctgaaagtctcggaatcccccagaagatgcaactaaaggtggatgtggagtctggcaagctaattattaaaaaaagtaaagatggttctgaggataaattctatagccacaagaagatactccagctgataaagagccagaaatttctgaacaaactggtcattctagtagagaccgagaaagaaaagattctcagaaaagaatacgtatttgctgacagcaagaagcgcgaaggcttctgccagctgcttcagcagatgaaaaataaacatagcgaacagcctgagccggatatgattacaatctttattggtacgtggaacatgggtaacgcccctccacccaaaaagatcacctcatggttcctgtcgaaaggacaggggaagacgagagatgattccgctgactatatcccccacgacatctatgtgatcggcacccaggaagacccgttgagcgagaaagagtggctggaaatcctcaagcacagcctgcaagagataacttctgtaactttcaaaaccgtggcgattcacaccctttggaatatccgaatcgtcgtgctagccaaacctgagcacgaaaaccgcatcagccacatatgtacggacaatgtgaagacagggattgctaataccctgggcaataagggtgctgtgggtgtatcatttatgtttaacgggaccagcctgggctttgtcaattcacacctgacctctgggagcgagaaaaaacttaggaggaaccagaactacatgaacatactgcgtttcctggcacttggtgataagaagctctcaccgtttaacataacgcatcgattcacccaccttttttggttcggggatttaaactatcgggtcgatctgccaacctgggaggctgaaacaatcatccagaaaatcaagcagcagcagtatgctgatcttttatctcatgatcaactcctgacagagagaagggagcagaaggttttcctgcatttcgaggaggaggagatcacattcgctcctacctacaggttcgagagactgacacgagacaaatatgcctacactaagcagaaagccaccggaatgaaatacaacctgccttcctggtgcgatagggtattatggaagagctaccctctggtgcatgtggtatgccagtcttacgggtccacgagcgacatcatgacatccgatcattcgccagttttcgctacatttgaggctggggtgaccagccagttcgtgagcaagaacgggccaggtacagtggattcccagggccagattgaatttcttaggtgttacgctaccttgaaaactaagtctcaaactaaattctatttagagttccatagttcttgccttgaatccttcgtcaagagtcaagagggtgagaacgaggagggatcagaaggcgaactagttgtcaagtttggcgagacactcccaaagctgaagcctatcatatccgacccagaatatctcctggatcaacatatattaatttccatcaagtccagtgactcagacgaatcttacggtgagggctgcatcgctctaaggctggaggctaccgagacccagctgccgatttacactcctcttacacaccacggcgagctgactggccacttccagggtgagatcaagttgcagacatctcagggcaagacccgcgagaagttgtacgattttgtgaagaccgaaagggatgaaagttccggcccaaagacactaaagtccctgactagtcacgatcccatgaaacaatgggaagtcacttccagagccccaccctgctccggtagcagtattacagaaataatcaaccctaactacatgggggttgggcctttcgggccaccaatgcctctccacgtgaagcagactctcagccccgaccagcaaccaacggcctggagctacgaccagccgcctaaagatagccccctcggaccatgccggggtgaatcgccacccaccccacctggacagccccctataagccctaagaaatttctgccctccacagccaatcgaggtttgcctccacgcactcaagagagccgcccatccgatctcgggaagaacgccggagacacactgccgcaggaagaccttcctctgacaaagccagaaatgttcgagaaccccctgtacggctcccttagtagctttcccaaacccgcacccaggaaagaccaggagtcaccaaaaatgccaaggaaggaacctccaccgtgccccgagcccggaatcctctccccctccatagttctcacgaaggcccaggaagctgaccggggagaaggccctggaaaacaggtgccagcgcctcggttacgttcattcacatgttccagcagtgcagaagggagggccgcaggcggagataagagtcagggaaaacccaagaccccagtgtcttcgcaggccccagtgccagccaagcgtccgattaaaccatctcgatctgagatcaaccagcagacccctcccacacccacaccgagaccgccactgcccgtcaagtccccggctgtgctgcacctgcagcacagcaaaggccgagactaccgtgacaacacagaactgccgcaccatggcaagcaccgccctgaggaaggtccccctggacctctgggccgtaccgccatgcagtag

SEQ ID NO: 157209 - DNA, 2433 bp, Artificial Sequence
  derived and/or modified sequence
aagagagagggcttctgccagctgctgcagcagatgaagaacaagcacagcgagcagcccgagcccgacatgatcaccatcttcatcggcacctggaacatgggcaacgcccccccccccaagaagatcaccagctggttcctgagcaagggccagggcaagaccagagacgacagcgccgactacatcccccacgacatctacgtgatcggcacccaggaggaccccctgagcgagaaggagtggctggagatcctgaagcacagcctgcaggagatcaccagcgtgaccttcaagaccgtggccatccacaccctgtggaacatcagaatcgtggtgctggccaagcccgagcacgagaacagaatcagccacatctgcaccgacaacgtgaagaccggcatcgccaacaccctgggcaacaagggcgccgtgggcgtgagcttcatgttcaacggcaccagcctgggcttcgtgaacagccacctgaccagcggcagcgagaagaagctgagaagaaaccagaactacatgaacatcctgagattcctggccctgggcgacaagaagctgagccccttcaacatcacccacagattcacccacctgttctggttcggcgacctgaactacagagtggacctgcccacctgggaggccgagaccatcatccagaagatcaagcagcagcagtacgccgacctgctgagccacgaccagctgctgaccgagagaagagagcagaaggtgttcctgcacttcgaggaggaggagatcaccttcgcccccacctacagattcgagagactgaccagagacaagtacgcctacaccaagcagaaggccaccggcatgaagtacaacctgcccagctggtgcgacagagtgctgtggaagagctaccccctggtgcacgtggtgtgccagagctacggcagcaccagcgacatcatgaccagcgaccacagccccgtgttcgccaccttcgaggccggcgtgaccagccagttcgtgagcaagaacggccccggcaccgtggacagccagggccagatcgagttcctgagatgctacgccaccctgaagaccaagagccagaccaagttctacctggagttccacagcagctgcctggagagcttcgtgaagagccaggagggcgagaacgaggagggcagcgagggcgagctggtggtgaagttcggcgagaccctgcccaagctgaagcccatcatcagcgaccccgagtacctgctggaccagcacatcctgatcagcatcaagagcagcgacagcgacgagagctacggcgagggctgcatcgccctgagactggaggccaccgagacccagctgcccatctacacccccctgacccaccacggcgagctgaccggccacttccagggcgagatcaagctgcagaccagccagggcaagaccagagagaagctgtacgacttcgtgaagaccgagagagacgagagcagcggccccaagaccctgaagagcctgaccagccacgaccccatgaagcagtgggaggtgaccagcagagcccccccctgcagcggcagcagcatcaccgagatcatcaaccccaactacatgggcgtgggccccttcggcccccccatgcccctgcacgtgaagcagaccctgagccccgaccagcagcccaccgcctggagctacgaccagccccccaaggacagccccctgggcccctgcagaggcgagagcccccccaccccccccggccagccccccatcagccccaagaagttcctgcccagcaccgccaacagaggcctgccccccagaacccaggagagcagacccagcgacctgggcaagaacgccggcgacaccctgccccaggaggacctgcccctgaccaagcccgagatgttcgagaaccccctgtacggcagcctgagcagcttccccaagcccgcccccagaaaggaccaggagagccccaagatgcccagaaaggagccccccccctgccccgagcccggcatcctgagccccagcatcgtgctgaccaaggcccaggaggccgacagaggcgagggccccggcaagcaggtgcccgcccccagactgagaagcttcacctgcagcagcagcgccgagggcagagccgccggcggcgacaagagccagggcaagcccaagacccccgtgagcagccaggcccccgtgcccgccaagagacccatcaagcccagcagaagcgagatcaaccagcagaccccccccacccccacccccagaccccccctgcccgtgaagagccccgccgtgctgcacctgcagcacagcaagggcagagactacagagacaacaccgagctgccccaccacggcaagcacagacccgaggagggcccccccggccccctgggcagaaccgccatgcagtag

SEQ ID NO: 157210 - DNA, 666 bp, Artificial Sequence
  derived and/or modified sequence
atggtgccctgctggaaccacggcaacatcaccagaagcaaggccgaggagctgctgagcagaaccggcaaggacggcagcttcctggtgagagccagcgagagcatcagcagagcctacgccctgtgcgtgctgtacagaaactgcgtgtacacctacagaatcctgcccaacgaggacgacaagttcaccgtgcaggccagcgagggcgtgagcatgagattcttcaccaagctggaccagctgatcgagttctacaagaaggagaacatgggcctggtgacccacctgcagtaccccgtgcccctggaggaggaggacaccggcgacgaccccgaggaggacaccgagagcgtggtgagcccccccgagctgccccccagaaacatccccctgaccgccagcagctgcgaggccaaggaggtgcccttcagcaacgagaaccccagagccaccgagaccagcagacccagcctgagcgagaccctgttccagagactgcagagcatggacaccagcggcctgcccgaggagcacctgaaggccatccaggactacctgagcacccagctggcccaggacagcgagttcgtgaagaccggcagcagcagcctgccccacctgaagaagctgaccaccctgctgtgcaaggagctgtacggctag

SEQ ID NO: 157211 - DNA, 2826 bp, Artificial Sequence
  derived and/or modified sequence
agaccccaggtgcccggcgaggccaaccccatcaacatggtgagcaagctgagccagctgaccagcctgctgagcagcatcgaggacaaggtgaaggccctgctgcacgagggccccgagagcccccacagacccagcctgatcccccccgtgaccttcgaggtgaaggccgagagcctgggcatcccccagaagatgcagctgaaggtggacgtggagagcggcaagctgatcatcaagaagagcaaggacggcagcgaggacaagttctacagccacaagaagatcctgcagctgatcaagagccagaagttcctgaacaagctggtgatcctggtggagaccgagaaggagaagatcctgagaaaggagtacgtgttcgccgacagcaagaagagagagggcttctgccagctgctgcagcagatgaagaacaagcacagcgagcagcccgagcccgacatgatcaccatcttcatcggcacctggaacatgggcaacgcccccccccccaagaagatcaccagctggttcctgagcaagggccagggcaagaccagagacgacagcgccgactacatcccccacgacatctacgtgatcggcacccaggaggaccccctgagcgagaaggagtggctggagatcctgaagcacagcctgcaggagatcaccagcgtgaccttcaagaccgtggccatccacaccctgtggaacatcagaatcgtggtgctggccaagcccgagcacgagaacagaatcagccacatctgcaccgacaacgtgaagaccggcatcgccaacaccctgggcaacaagggcgccgtgggcgtgagcttcatgttcaacggcaccagcctgggcttcgtgaacagccacctgaccagcggcagcgagaagaagctgagaagaaaccagaactacatgaacatcctgagattcctggccctgggcgacaagaagctgagccccttcaacatcacccacagattcacccacctgttctggttcggcgacctgaactacagagtggacctgcccacctgggaggccgagaccatcatccagaagatcaagcagcagcagtacgccgacctgctgagccacgaccagctgctgaccgagagaagagagcagaaggtgttcctgcacttcgaggaggaggagatcaccttcgcccccacctacagattcgagagactgaccagagacaagtacgcctacaccaagcagaaggccaccggcatgaagtacaacctgcccagctggtgcgacagagtgctgtggaagagctaccccctggtgcacgtggtgtgccagagctacggcagcaccagcgacatcatgaccagcgaccacagccccgtgttcgccaccttcgaggccggcgtgaccagccagttcgtgagcaagaacggccccggcaccgtggacagccagggccagatcgagttcctgagatgctacgccaccctgaagaccaagagccagaccaagttctacctggagttccacagcagctgcctggagagcttcgtgaagagccaggagggcgagaacgaggagggcagcgagggcgagctggtggtgaagttcggcgagaccctgcccaagctgaagcccatcatcagcgaccccgagtacctgctggaccagcacatcctgatcagcatcaagagcagcgacagcgacgagagctacggcgagggctgcatcgccctgagactggaggccaccgagacccagctgcccatctacacccccctgacccaccacggcgagctgaccggccacttccagggcgagatcaagctgcagaccagccagggcaagaccagagagaagctgtacgacttcgtgaagaccgagagagacgagagcagcggccccaagaccctgaagagcctgaccagccacgaccccatgaagcagtgggaggtgaccagcagagcccccccctgcagcggcagcagcatcaccgagatcatcaaccccaactacatgggcgtgggccccttcggcccccccatgcccctgcacgtgaagcagaccctgagccccgaccagcagcccaccgcctggagctacgaccagccccccaaggacagccccctgggcccctgcagaggcgagagcccccccaccccccccggccagccccccatcagccccaagaagttcctgcccagcaccgccaacagaggcctgccccccagaacccaggagagcagacccagcgacctgggcaagaacgccggcgacaccctgccccaggaggacctgcccctgaccaagcccgagatgttcgagaaccccctgtacggcagcctgagcagcttccccaagcccgcccccagaaaggaccaggagagccccaagatgcccagaaaggagccccccccctgccccgagcccggcatcctgagccccagcatcgtgctgaccaaggcccaggaggccgacagaggcgagggccccggcaagcaggtgcccgcccccagactgagaagcttcacctgcagcagcagcgccgagggcagagccgccggcggcgacaagagccagggcaagcccaagacccccgtgagcagccaggcccccgtgcccgccaagagacccatcaagcccagcagaagcgagatcaaccagcagaccccccccacccccacccccagaccccccctgcccgtgaagagccccgccgtgctgcacctgcagcacagcaagggcagagactacagagacaacaccgagctgccccaccacggcaagcacagacccgaggagggcccccccggccccctgggcagaaccgccatgcagtag

SEQ ID NO: 157212 - DNA, 2826 bp, Artificial Sequence
  derived and/or modified sequence
cccccccaggtgcccggcgaggccaaccccatcaacatggtgagcaagctgagccagctgaccagcctgctgagcagcatcgaggacaaggtgaaggccctgctgcacgagggccccgagagcccccacagacccagcctgatcccccccgtgaccttcgaggtgaaggccgagagcctgggcatcccccagaagatgcagctgaaggtggacgtggagagcggcaagctgatcatcaagaagagcaaggacggcagcgaggacaagttctacagccacaagaagatcctgcagctgatcaagagccagaagttcctgaacaagctggtgatcctggtggagaccgagaaggagaagatcctgagaaaggagtacgtgttcgccgacagcaagaagagagagggcttctgccagctgctgcagcagatgaagaacaagcacagcgagcagcccgagcccgacatgatcaccatcttcatcggcacctggaacatgggcaacgcccccccccccaagaagatcaccagctggttcctgagcaagggccagggcaagaccagagacgacagcgccgactacatcccccacgacatctacgtgatcggcacccaggaggaccccctgagcgagaaggagtggctggagatcctgaagcacagcctgcaggagatcaccagcgtgaccttcaagaccgtggccatccacaccctgtggaacatcagaatcgtggtgctggccaagcccgagcacgagaacagaatcagccacatctgcaccgacaacgtgaagaccggcatcgccaacaccctgggcaacaagggcgccgtgggcgtgagcttcatgttcaacggcaccagcctgggcttcgtgaacagccacctgaccagcggcagcgagaagaagctgagaagaaaccagaactacatgaacatcctgagattcctggccctgggcgacaagaagctgagccccttcaacatcacccacagattcacccacctgttctggttcggcgacctgaactacagagtggacctgcccacctgggaggccgagaccatcatccagaagatcaagcagcagcagtacgccgacctgctgagccacgaccagctgctgaccgagagaagagagcagaaggtgttcctgcacttcgaggaggaggagatcaccttcgcccccacctacagattcgagagactgaccagagacaagtacgcctacaccaagcagaaggccaccggcatgaagtacaacctgcccagctggtgcgacagagtgctgtggaagagctaccccctggtgcacgtggtgtgccagagctacggcagcaccagcgacatcatgaccagcgaccacagccccgtgttcgccaccttcgaggccggcgtgaccagccagttcgtgagcaagaacggccccggcaccgtggacagccagggccagatcgagttcctgagatgctacgccaccctgaagaccaagagccagaccaagttctacctggagttccacagcagctgcctggagagcttcgtgaagagccaggagggcgagaacgaggagggcagcgagggcgagctggtggtgaagttcggcgagaccctgcccaagctgaagcccatcatcagcgaccccgagtacctgctggaccagcacatcctgatcagcatcaagagcagcgacagcgacgagagctacggcgagggctgcatcgccctgagactggaggccaccgagacccagctgcccatctacacccccctgacccaccacggcgagctgaccggccacttccagggcgagatcaagctgcagaccagccagggcaagaccagagagaagctgtacgacttcgtgaagaccgagagagacgagagcagcggccccaagaccctgaagagcctgaccagccacgaccccatgaagcagtgggaggtgaccagcagagcccccccctgcagcggcagcagcatcaccgagatcatcaaccccaactacatgggcgtgggccccttcggcccccccatgcccctgcacgtgaagcagaccctgagccccgaccagcagcccaccgcctggagctacgaccagccccccaaggacagccccctgggcccctgcagaggcgagagcccccccaccccccccggccagccccccatcagccccaagaagttcctgcccagcaccgccaacagaggcctgccccccagaacccaggagagcagacccagcgacctgggcaagaacgccggcgacaccctgccccaggaggacctgcccctgaccaagcccgagatgttcgagaaccccctgtacggcagcctgagcagcttccccaagcccgcccccagaaaggaccaggagagccccaagatgcccagaaaggagccccccccctgccccgagcccggcatcctgagccccagcatcgtgctgaccaaggcccaggaggccgacagaggcgagggccccggcaagcaggtgcccgcccccagactgagaagcttcacctgcagcagcagcgccgagggcagagccgccggcggcgacaagagccagggcaagcccaagacccccgtgagcagccaggcccccgtgcccgccaagagacccatcaagcccagcagaagcgagatcaaccagcagaccccccccacccccacccccagaccccccctgcccgtgaagagccccgccgtgctgcacctgcagcacagcaagggcagagactacagagacaacaccgagctgccccaccacggcaagcacagacccgaggagggcccccccggccccctgggcagaaccgccatgcagtag

SEQ ID NO: 157213 - protein, 277 aa, Artificial Sequence
  derived and/or modified sequence
MPRLHDHFWSCSCAHSARRRGPPRASAAGLAAKVGEMINVSVSGPSLLAAHGAPDADPAPRGRSAAMSGPEPGSPYPNTWHHRLLQRSLVLFSVGVVLALVLNLLQIQRNVTLFPEEVIATIFSSAWWVPPCCGTAAAVVGLLYPCIDSHLGEPHKFKREWASVMRCIAVFVGINHASAKLDFANNVQLSLTLAALSLGLWWTFDRSRSGLGLGITIAFLATLITQFLVYNGVYQYTSPDFLYIRSWLPCIFFSGGVTVGNIGRQLAMGVPEKPHSD

SEQ ID NO: 157214 - DNA, 834 bp, Artificial Sequence
  derived and/or modified sequence
atgccacgtcttcacgaccatttttggagctgcagctgcgctcatagtgctcgtcgtaggggacccccgcgtgcgtcggctgctggactggctgccaaggtgggcgaaatgatcaatgtctctgtcagcggcccatcactcctggcagctcacggggcaccagatgcagatccagctccaagggggcggtctgccgccatgagtgggcccgaacccggatctccttatccaaacacttggcaccaccgattactccagagatccctagtgttattcagcgttggcgtggtcttagccctcgtgctgaatctccttcaaatacagagaaacgtaaccctgttccctgaggaagtgattgctactatcttcagcagcgcttggtgggtgccaccatgttgcggcaccgctgccgctgtggtggggctgctgtacccatgcattgattctcacctgggcgagccacacaaatttaagagggagtgggccagcgtcatgcgctgtattgcagttttcgtgggcatcaaccatgcatccgccaagttagacttcgcaaacaatgttcagctctccctcaccttggccgcccttagcctcgggttatggtggacttttgatcgttcaaggtccggcctgggtctgggcattaccattgcattcctcgccactctgattacacagttcttagtgtataatggcgtgtatcaatacacctcgcccgactttctctacatcagatcatggctcccctgtattttcttcagcggcggcgtgacagtgggcaatatcggacggcagctggcaatgggcgtgccagaaaagccccactctgactag

SEQ ID NO: 157215 - DNA, 3010 bp, Artificial Sequence
  derived and/or modified sequence
cacgcccctgggcggtgcgcgcgggcggtgggtaggccgggcaggctcacgtgatgcgggccccgcggcccgccatataaacccgcgcgcccgccaggcgctgcggccgtcccgggccgtgactcctcctttcccccgccccgcctccgttcggagagccggcgggcgggcgcctctcggccaggaagcgcctcttggacgcgtgtgaccgatgcccagattgcacgaccacttctggagctgctcctgtgcgcacagcgcgaggcgccgaggccccccgcgagccagcgccgcggggctggcggccaaggttggggagatgatcaacgtttccgtgtccgggccctccctgctggcggcccacggtgccccggacgctgaccccgcgcccaggggccgcagtgctgcgatgagcggccccgagcccggcagcccctaccccaacacctggcatcatcgcctgttgcagaggagcctcgtgctcttctcggttggggtggtcctagccctggtgctcaacctgctgcagatccagaggaatgtcactctcttccccgaggaggtgatcgccaccatcttttcctccgcctggtgggtccctccctgctgcgggacagcagctgctgttgttggcctactgtacccctgtatcgacagtcacctcggagaaccccacaaatttaagagagaatgggccagtgtcatgcgctgcatagcagtttttgttggcattaaccacgccagtgctaaattggattttgccaataatgtccagctgtccttgactttagcagccctatctttgggcctttggtggacatttgatcgttccagaagtggccttgggctggggatcaccatagcttttctagctacgctgatcacgcagtttctcgtgtataatggtgtctatcagtatacatccccagatttcctctatattcgttcttggctcccttgtatatttttctcaggaggcgtcacggtggggaacataggacgacagttagctatgggtgttcctgaaaagccccatagtgattgagtcttcaaaaccaccgattctgagagcaaggaagattttggaagaaaatctgactgtggattatgacaaagattatcttttttcttaagtaatctatttagatcgggctgactgtacaaatgactcctggaaaaaactcttcacctagtctagaatagggaggtggagaatgatgacttaccctgaagtcttcccttgactgcccgcactggcgcctgtctgtgccctggagcattctgcccaggctacgtgggttcaggcaggtggcagcttcccaagtattcgatttcattcatgtgattaaaacaagttgccatatttcaaagccttgaactaagactcaattaccaacccgcagttttgtgtcagtgcccaaaggaggtaggttgatggtgcttaacaaacatgaagtatggtgtaataggaataatatttatccaaaagatttttaaaaatagggctgtgtttaaaaaaaaaaacaaaacaagaaaagcagcagtgattatagagaggtcacactctaagtggggtcgcggcgtggccacgcttcacggtcacgctcgtccgtcctgcagtggcgtgtttacatggtcacacgtgtgtgtatcaccagtgggtcaactgcttgtcattcctcccgtggcagtttgtgtagacaatcttactgagcaaaaggcaatgaaaagtcttggttcccacactgcgatatattggaattttcacctcagtttatgaagtttatttcgaaatccatagtcatctaagaatgaatacctgtctgccatgtatttcaatcttagtgagccaaaattgtttgtttgttactacagaatagagatgactgttttttgccacagccctatggaatttgcaatctgtgattgccttgtaaaaaggagagtgcatatggcactgcattaaacgtgtggtgtttctagtcaatgatattggtgagcacaatgtattcatttaatggcatagaccataccagacctaatttgcaagtattgggtcttaaacttcaagtgcaatgtatatgaaaaccaatctgagccttgtatctcttaaatatttattttttttaacgtgtgagatgttcgagagaaggttctccattcatttcagtgctgcctggaggaaactcggcaatgatttctttcagttgtgaagttcctttcgtgttacaccctccactgaaccctcaaccttcgaaatactccagttttgtgggtttggtcatttttacttataaatttacctttttgtattttgcaatttacatgtgtttggtttgttttaaattctgtgaaagtggcttgattaaaagactccttttaaatggaagccaccagtcagcagaatggaagcttagaggaacttgcctgtgagcgctggtctttgtgtttggttttgtgatgtaacgatctttgctggggttttttgctttgttttgagggaaatgtcttggagtaaattttaagttcctggagttaatttgttttacaggaattttgttttttaaaaaaataggatcattctgaactttggaatgacccccttatatattttctgaaaatgaaaacagttacatgaaaaaaatttccaatgaagatgtcagcattttatgaaaaaccagaagttattagatgaaagcagcgagtgaatctttaaaacagacttgatcacgcacacacaataagtctttctctccgaaaccggaagtaaatctatatctgttagaaataatgtagccaaaagaatgtaaatttgaggatttttttgccaatagtttatagaaaatatatgaaccaaagtgatttgagtttgtaaaaatgtaaaatagtatgaacaaaatttgcactctaccagatttgaacatctagtgaggttcacattcatactaagttttcaacattgtgttctttttgcattcattttttacttttattaaaggttcaaaaccaa

SEQ ID NO: 157216 - DNA, 834 bp, Artificial Sequence
  derived and/or modified sequence
atgccccggctgcatgaccacttctggagctgcagctgtgcccacagcgccaggagaagaggccccccccgggccagcgctgctggcctggccgccaaggtgggggagatgatcaacgtgtctgtgtctggccccagcctgctggccgcccatggagccccagatgctgaccctgccccccggggccgctctgctgccatgagcggccctgagcccggcagcccctaccccaacacctggcaccaccggctgctgcagaggagcctggtgctcttctctgtgggcgtggtgctggccctggtgctgaacctgctgcagatccagagaaatgtgaccctcttccctgaggaggtgattgccaccatcttcagcagcgcctggtgggtgcccccctgctgcggcacagctgctgctgtggtgggcctgctgtacccctgcatcgacagccacctgggggagccccacaagttcaagcgggagtgggcctctgtgatgcgctgcatcgctgtgtttgtgggcatcaaccacgccagcgccaagctggactttgccaacaacgtgcagctgagcctgaccctggccgccctgagcctgggcctgtggtggacctttgacaggagccgcagcggcctgggcctgggcatcaccatcgccttcctggccaccctcatcacccagttcctggtgtacaatggagtgtaccagtacaccagcccagacttcctgtacatccgctcctggctgccctgcatcttcttcagcggcggcgtgacagtgggcaacatcggccggcagctggccatgggcgtgcctgagaagccccacagcgactag

SEQ ID NO: 157217 - DNA, 834 bp, Artificial Sequence
  derived and/or modified sequence
atgccccggctgcacgaccacttctggagctgcagctgcgcccactctgcacggcggaggggcccccctcgggcgtcagccgctggtctggctgcgaaggtgggcgaaatgatcaacgttagcgtatctgggccttccctgctagccgcccatggggctcccgacgccgaccctgcccctcgaggccgctccgccgctatgtctgggccagaaccaggctccccttatccgaacacctggcaccatcgtttgctccaaaggtccctggtgcttttttcggttggggtggtcttggcgctggtgttaaacctcctacagatacaaaggaacgtaacactgttcccagaggaggtcatagctacaatcttctcaagcgcctggtgggtccctccctgttgtggaacggcagccgccgtcgtcggtttgctatacccttgcatcgattcacacttgggggaaccacataaattcaagagggagtgggcgtctgtaatgcgctgtatcgcagtctttgtagggataaatcacgcatctgccaagctggatttcgccaacaatgtgcagttgtccctaactctggcagcattatccctgggcttgtggtggacattcgaccgcagccgctccgggctcgggctggggatcactatagcattcctggcaacattgattacgcagtttctagtctataacggagtttatcagtataccagccccgatttcctgtacataaggtcctggctcccctgcattttctttagcggaggcgtgaccgtgggtaacataggaaggcagctggctatgggtgtgccagaaaagcctcacagcgattag

SEQ ID NO: 157218 - DNA, 834 bp, Artificial Sequence
  derived and/or modified sequence
atgcccagattgcatgaccacttctggagctgctcatgtgcccacagtgctcgcaggcgcggtccccctcgcgcttctgccgcagggcttgcagctaaggtgggcgagatgatcaatgtatccgttagcggtccctctcttctggccgctcacggagcccctgacgctgatccagcccctcgcggaaggagcgctgccatgagcgggccagaacctggaagcccatacccgaatacctggcaccatcgtctgttgcagagaagcctcgttctcttcagcgttggcgtggtccttgccctggttctcaacctgctgcaaatacaaaggaacgtcacgctgttcccagaggaggtgatcgctacaatcttttcttccgcgtggtgggtcccaccatgctgtgggacggccgcagctgtggtgggcctcctctacccatgcatcgattcacatctcggggagccacataaattcaagagagaatgggcatccgttatgcgttgtatcgctgtcttcgtgggcatcaaccacgcctcagccaaactggactttgctaataatgtccagctgagcttaactctggcggctctaagcctcggcttatggtggacctttgacagaagtcgcagtgggcttggactcggcattaccatcgcgtttttggcaaccctcattactcagttcctcgtttacaacggagtttaccagtatacctccccagattttctatacattcgaagctggctcccttgcatcttcttctctggtggagtgacagttggtaatattgggagacagctggctatgggcgtcccagagaaaccacattcggattag

SEQ ID NO: 157219 - DNA, 834 bp, Artificial Sequence
  derived and/or modified sequence
atgcccagactgcacgaccacttctggagctgcagctgcgcccacagcgccagaagaagaggcccccccagagccagcgccgccggcctggccgccaaggtgggcgagatgatcaacgtgagcgtgagcggccccagcctgctggccgcccacggcgcccccgacgccgaccccgcccccagaggcagaagcgccgccatgagcggccccgagcccggcagcccctaccccaacacctggcaccacagactgctgcagagaagcctggtgctgttcagcgtgggcgtggtgctggccctggtgctgaacctgctgcagatccagagaaacgtgaccctgttccccgaggaggtgatcgccaccatcttcagcagcgcctggtgggtgcccccctgctgcggcaccgccgccgccgtggtgggcctgctgtacccctgcatcgacagccacctgggcgagccccacaagttcaagagagagtgggccagcgtgatgagatgcatcgccgtgttcgtgggcatcaaccacgccagcgccaagctggacttcgccaacaacgtgcagctgagcctgaccctggccgccctgagcctgggcctgtggtggaccttcgacagaagcagaagcggcctgggcctgggcatcaccatcgccttcctggccaccctgatcacccagttcctggtgtacaacggcgtgtaccagtacaccagccccgacttcctgtacatcagaagctggctgccctgcatcttcttcagcggcggcgtgaccgtgggcaacatcggcagacagctggccatgggcgtgcccgagaagccccacagcgactag

SEQ ID NO: 157220 - protein, 131 aa, Artificial Sequence
  derived and/or modified sequence
MDPRLPAWALVLLGPALVFALGPAPTPEMREKLCGHHFVRALVRVCGGPRWSTEARRPATGGDRELLQWLERRHLLHGLVADSNLTLGPGLQPLPQTSHHHRHHRAAATNPARYCCLSGCTQQDLLTLCPY

SEQ ID NO: 157221 - DNA, 396 bp, Artificial Sequence
  derived and/or modified sequence
atggatcctcgcctgcctgcctgggctctggttctactcgggcctgccctggtcttcgcattgggacctgctcctacccctgaaatgcgcgagaaattatgcggtcaccactttgtgcgagctctggttagggtatgcggaggccctagatggtccactgaggcccggcgcccagctacggggggcgatcgggaactacttcagtggctggagagaagacacttgttacatggtctggtggctgactctaacctcactctcgggcccggcctgcagccactcccccaaacgagccaccatcacagacatcaccgagcggcagctaccaaccctgctcggtactgctgcctgtccgggtgcacacaacaggacctcctgactctctgcccgtactag

SEQ ID NO: 157222 - DNA, 740 bp, Artificial Sequence
  derived and/or modified sequence
ccaccatggacccccgtctgcccgcctgggcgctggtgctgctgggccctgccctggtgttcgcgttgggccccgcgcccaccccagagatgcgtgagaagttgtgcggccaccacttcgtacgcgcgctagtgcgcgtgtgcgggggcccccgctggtccaccgaagccaggaggcctgcgaccggaggcgaccgtgagttgctacagtggctggagagacgacatctgctccatgggctggtggccgacagtaatctcacgctgggacctggcctgcagcccctgccccagacctctcaccatcaccgccaccaccgtgcagctgccaccaaccctgcacgctactgctgcctcagtggctgtacccaacaagacctgctgaccctctgtccctactgattcctccttgggtgcagcctcagagtggcctgaggcccagagggtctggtctggtgagctcctgaggccacacagcaccataaagtctcgcatctacaggcctttgattacctcctgggatgggtgctcactatctaccccagaccaatgccacctgcagcctgtggagtcaactgcagaataaatcacaccctagccctggcttggaggatccccgctttcacagatgctggacactgacagccaaatgtcctcactccaggggagccccagacgctccgctccctgcatgtgtaacaccccttcttgctgtctcttagtaaataaacgacccaaagc

SEQ ID NO: 157223 - DNA, 396 bp, Artificial Sequence
  derived and/or modified sequence
atggacccccggctgcctgcctgggccctggtgctgctgggccctgccctggtgtttgccctgggccctgcccccaccccagagatgagggagaagctgtgtggccaccactttgtgcgggccctggtgcgggtgtgtggcggcccccgctggagcacagaggcccggcggcctgccaccggcggggaccgggagctgctgcagtggctggagcggcggcacctgctgcacggcctggtggccgacagcaacctgaccctgggccctggcctgcagcccctgccccagaccagccaccaccaccgccaccacagagctgctgccaccaacccagcccgctactgctgcctgagcggctgcacccagcaggacctgctgaccctgtgcccctactag

SEQ ID NO: 157224 - DNA, 396 bp, Artificial Sequence
  derived and/or modified sequence
atggacccccggctgcccgcctgggccctggtgctgctgggccccgctctggtctttgctcttggccctgcaccaacacccgagatgcgcgaaaagctgtgtggccaccattttgttagagccctggtgcgggtatgtggcggcccgcgctggtcgacggaagcccgtcggcctgctaccggaggtgacagagaactgctgcagtggttagaacgcagacacttactgcacgggctggtcgcagattccaatttgaccctgggtcccggcctgcagccgctgccacagacttcgcaccaccacagacaccacagggctgcagccactaacccggctcgttattgttgtctgagcggctgtacgcagcaagacttactgactctgtgtccctactag

SEQ ID NO: 157225 - DNA, 396 bp, Artificial Sequence
  derived and/or modified sequence
atggaccccaggttgcccgcatgggcactggtccttctgggtcccgcattggtgttcgcactggggcctgctccgaccccagagatgagagaaaagctgtgtggacaccattttgtacgggctctggttcgggtctgtgggggtccccgatggagtacagaggcacgacgccctgcgactggcggagacagggagctgctccagtggctcgagcgaaggcacctgctgcacgggttggtggcagactccaatttgacccttggtcctgggttgcaaccacttccccagacctctcatcaccaccgccaccaccgagctgcagccactaaccccgcacggtactgctgtctgtccgggtgcactcaacaggatctgctgactctgtgtccctattag

SEQ ID NO: 157226 - DNA, 396 bp, Artificial Sequence
  derived and/or modified sequence
atggaccccagactgcccgcctgggccctggtgctgctgggccccgccctggtgttcgccctgggccccgcccccacccccgagatgagagagaagctgtgcggccaccacttcgtgagagccctggtgagagtgtgcggcggccccagatggagcaccgaggccagaagacccgccaccggcggcgacagagagctgctgcagtggctggagagaagacacctgctgcacggcctggtggccgacagcaacctgaccctgggccccggcctgcagcccctgccccagaccagccaccaccacagacaccacagagccgccgccaccaaccccgccagatactgctgcctgagcggctgcacccagcaggacctgctgaccctgtgcccctactag

SEQ ID NO: 157227 - protein, 1242 aa, Artificial Sequence
  derived and/or modified sequence
MASPPESDGFSDVRKVGYLRKPKSMHKRFFVLRAASEAGGPARLEYYENEKKWRHKSSAPKRSIPLESCFNINKRADSKNKHLVALYTRDEHFAIAADSEAEQDSWYQALLQLHNRAKGHHDGAAALGAGGGGGSCSGSSGLGEAGEDLSYGDVPPGPAFKEVWQVILKPKGLGQTKNLIGIYRLCLTSKTISFVKLNSEAAAVVLQLMNIRRCGHSENFFFIEVGRSAVTGPGEFWMQVDDSVVAQNMHETILEAMRAMSDEFRPRSKSQSSSNCSNPISVPLRRHHLNNPPPSQVGLTRRSRTESITATSPASMVGGKPGSFRVRASSDGEGTMSRPASVDGSPVSPSTNRTHAHRHRGSARLHPPLNHSRSIPMPASRCSPSATSPVSLSSSSTSGHGSTSDCLFPRRSSASVSGSPSDGGFISSDEYGSSPCDFRSSFRSVTPDSLGHTPPARGEEELSNYICMGGKGPSTLTAPNGHYILSRGGNGHRCTPGTGLGTSPALAGDEAASAADLDNRFRKRTHSAGTSPTITHQKTPSQSSVASIEEYTEMMPAYPPGGGSGGRLPGHRHSAFVPTRSYPEEGLEMHPLERRGGHHRPDSSTLHTDDGYMPMSPGVAPVPSGRKGSGDYMPMSPKSVSAPQQIINPIRRHPQRVDPNGYMMMSPSGGCSPDIGGGPSSSSSSSNAVPSGTSYGKLWTNGVGGHHSHVLPHPKPPVESSGGKLLPCTGDYMNMSPVGDSNTSSPSDCYYGPEDPQHKPVLSYYSLPRSFKHTQRPGEPEEGARHQHLRLSTSSGRLLYAATADDSSSSTSSDSLGGGYCGARLEPSLPHPHHQVLQPHLPRKVDTAAQTNSRLARPTRLSLGDPKASTLPRAREQQQQQQPLLHPPEPKSPGEYVNIEFGSDQSGYLSGPVAFHSSPSVRCPSQLQPAPREEETGTEEYMKMDLGPGRRAAWQESTGVEMGRLGPAPPGAASICRPTRAVPSSRGDYMTMQMSCPRQSYVDTSPAAPVSYADMRTGIAAEEVSLPRATMAAASSSSAASASPTGPQGAAELAAHSSLLGGPQGPGGMSAFTRVNLSPNRNQSAKVIRADPQGCRRRHSSETFSSTPSATRVGNTVPFGAGAAVGGGGGSSSSSEDVKRHSSASFENVWLRPGELGGAPKEPAKLCGAAGGLENGLNYIDLDLVKDFKQCPQECTPEPQPPPPPPPHQPLGSGESSSTRRSSEDLSAYASISFQKQPEDRQ

SEQ ID NO: 157228 - DNA, 3729 bp, Artificial Sequence
  derived and/or modified sequence
atggccagcccccccgagagcgacggcttcagcgacgtgagaaaggtgggctacctgagaaagcccaagagcatgcacaagagattcttcgtgctgagagccgccagcgaggccggcggccccgccagactggagtactacgagaacgagaagaagtggagacacaagagcagcgcccccaagagaagcatccccctggagagctgcttcaacatcaacaagagagccgacagcaagaacaagcacctggtggccctgtacaccagagacgagcacttcgccatcgccgccgacagcgaggccgagcaggacagctggtaccaggccctgctgcagctgcacaacagagccaagggccaccacgacggcgccgccgccctgggcgccggcggcggcggcggcagctgcagcggcagcagcggcctgggcgaggccggcgaggacctgagctacggcgacgtgccccccggccccgccttcaaggaggtgtggcaggtgatcctgaagcccaagggcctgggccagaccaagaacctgatcggcatctacagactgtgcctgaccagcaagaccatcagcttcgtgaagctgaacagcgaggccgccgccgtggtgctgcagctgatgaacatcagaagatgcggccacagcgagaacttcttcttcatcgaggtgggcagaagcgccgtgaccggccccggcgagttctggatgcaggtggacgacagcgtggtggcccagaacatgcacgagaccatcctggaggccatgagagccatgagcgacgagttcagacccagaagcaagagccagagcagcagcaactgcagcaaccccatcagcgtgcccctgagaagacaccacctgaacaaccccccccccagccaggtgggcctgaccagaagaagcagaaccgagagcatcaccgccaccagccccgccagcatggtgggcggcaagcccggcagcttcagagtgagagccagcagcgacggcgagggcaccatgagcagacccgccagcgtggacggcagccccgtgagccccagcaccaacagaacccacgcccacagacacagaggcagcgccagactgcacccccccctgaaccacagcagaagcatccccatgcccgccagcagatgcagccccagcgccaccagccccgtgagcctgagcagcagcagcaccagcggccacggcagcaccagcgactgcctgttccccagaagaagcagcgccagcgtgagcggcagccccagcgacggcggcttcatcagcagcgacgagtacggcagcagcccctgcgacttcagaagcagcttcagaagcgtgacccccgacagcctgggccacaccccccccgccagaggcgaggaggagctgagcaactacatctgcatgggcggcaagggccccagcaccctgaccgcccccaacggccactacatcctgagcagaggcggcaacggccacagatgcacccccggcaccggcctgggcaccagccccgccctggccggcgacgaggccgccagcgccgccgacctggacaacagattcagaaagagaacccacagcgccggcaccagccccaccatcacccaccagaagacccccagccagagcagcgtggccagcatcgaggagtacaccgagatgatgcccgcctacccccccggcggcggcagcggcggcagactgcccggccacagacacagcgccttcgtgcccaccagaagctaccccgaggagggcctggagatgcaccccctggagagaagaggcggccaccacagacccgacagcagcaccctgcacaccgacgacggctacatgcccatgagccccggcgtggcccccgtgcccagcggcagaaagggcagcggcgactacatgcccatgagccccaagagcgtgagcgccccccagcagatcatcaaccccatcagaagacacccccagagagtggaccccaacggctacatgatgatgagccccagcggcggctgcagccccgacatcggcggcggccccagcagcagcagcagcagcagcaacgccgtgcccagcggcaccagctacggcaagctgtggaccaacggcgtgggcggccaccacagccacgtgctgccccaccccaagccccccgtggagagcagcggcggcaagctgctgccctgcaccggcgactacatgaacatgagccccgtgggcgacagcaacaccagcagccccagcgactgctactacggccccgaggacccccagcacaagcccgtgctgagctactacagcctgcccagaagcttcaagcacacccagagacccggcgagcccgaggagggcgccagacaccagcacctgagactgagcaccagcagcggcagactgctgtacgccgccaccgccgacgacagcagcagcagcaccagcagcgacagcctgggcggcggctactgcggcgccagactggagcccagcctgccccacccccaccaccaggtgctgcagccccacctgcccagaaaggtggacaccgccgcccagaccaacagcagactggccagacccaccagactgagcctgggcgaccccaaggccagcaccctgcccagagccagagagcagcagcagcagcagcagcccctgctgcacccccccgagcccaagagccccggcgagtacgtgaacatcgagttcggcagcgaccagagcggctacctgagcggccccgtggccttccacagcagccccagcgtgagatgccccagccagctgcagcccgcccccagagaggaggagaccggcaccgaggagtacatgaagatggacctgggccccggcagaagagccgcctggcaggagagcaccggcgtggagatgggcagactgggccccgccccccccggcgccgccagcatctgcagacccaccagagccgtgcccagcagcagaggcgactacatgaccatgcagatgagctgccccagacagagctacgtggacaccagccccgccgcccccgtgagctacgccgacatgagaaccggcatcgccgccgaggaggtgagcctgcccagagccaccatggccgccgccagcagcagcagcgccgccagcgccagccccaccggcccccagggcgccgccgagctggccgcccacagcagcctgctgggcggcccccagggccccggcggcatgagcgccttcaccagagtgaacctgagccccaacagaaaccagagcgccaaggtgatcagagccgacccccagggctgcagaagaagacacagcagcgagaccttcagcagcacccccagcgccaccagagtgggcaacaccgtgcccttcggcgccggcgccgccgtgggcggcggcggcggcagcagcagcagcagcgaggacgtgaagagacacagcagcgccagcttcgagaacgtgtggctgagacccggcgagctgggcggcgcccccaaggagcccgccaagctgtgcggcgccgccggcggcctggagaacggcctgaactacatcgacctggacctggtgaaggacttcaagcagtgcccccaggagtgcacccccgagccccagccccccccccccccccccccccaccagcccctgggcagcggcgagagcagcagcaccagaagaagcagcgaggacctgagcgcctacgccagcatcagcttccagaagcagcccgaggacagacagtag

SEQ ID NO: 157229 - DNA, 3729 bp, Artificial Sequence
  derived and/or modified sequence
atggcctccccccccgaatcagatggattctccgatgttcgcaaggtgggctatctcagaaagcctaagagtatgcataaaagatttttcgtgttgagggcagctagcgaagcaggcgggcctgcccgcctggaatactacgaaaatgagaaaaagtggcgacataaatcttcagctcctaagcggtctatcccattggagtcctgctttaacatcaacaagagggcagactccaagaacaagcatctagtagcgctgtacactcgagacgagcacttcgctatagccgcggactccgaggcagaacaggattcttggtatcaagccctgctgcagctgcataaccgggccaagggtcaccacgatggcgccgccgctcttggagccggtggtggcgggggctcatgtagcggatccagtgggctgggggaggccggggaggacctgtcatacggagacgtgcctcccgggcctgctttcaaggaggtatggcaggtgatactgaaacctaagggactcgggcaaacaaagaacctgatcgggatctacagactgtgtctgacgtccaagaccatctcattcgtcaagctgaattctgaggcagctgctgtagtgcttcagttgatgaacatccgtagatgtggccattctgaaaactttttctttatcgaagtgggccggagcgcggtaaccggcccaggcgagttttggatgcaagtcgacgacagtgtggtggctcagaacatgcacgagactattcttgaagcaatgagggcaatgagcgacgagttcagacctagatccaaaagccagagctcatcaaattgcagcaacccgattagtgtgcccctgcgtcggcaccacttgaataacccaccaccaagccaagtaggcctcacccggcggtcccgtaccgagtcaattactgccacctcacctgcctcaatggtgggagggaagcccggctcctttcgtgtccgtgcatcgtcagatggcgaagggacgatgtcacggcctgccagcgtcgacggtagtcctgtgtccccatcaaccaaccggacccacgcccacaggcaccggggaagcgctaggctgcatcccccgcttaaccacagccgatctatcccgatgcccgcaagtaggtgtagcccttccgccaccagtcccgtaagcctatccagttcttccacgtccggtcatgggtccacatccgattgcctgtttccaaggaggtcgtccgccagcgtttccggcagccctagcgacggtggattcatatcatccgacgagtatggctcctcaccctgtgatttcaggagttccttccgtagcgttacaccagacagtcttggccacacgcctccagctagaggcgaggaagagcttagtaattacatctgcatgggggggaaaggaccttctaccctgactgccccgaatggacactacattctgtccagaggcggaaatgggcacaggtgtacccctgggacaggtctgggaactagccctgcactggctggcgacgaggccgcctccgccgccgacctggacaacagattcaggaagagaacacactctgccggtaccagccccacaatcacccaccaaaagacccctagccagagtagcgtagcaagcatagaggagtataccgagatgatgccggcctaccctcccggaggaggttccggcggacgcttgccgggacaccggcatagcgccttcgtgccgacaagatcatatcctgaggaagggcttgaaatgcacccactggaaagacgaggcggccatcaccgaccggattcctcaaccctgcacaccgatgacggctacatgcctatgtcacctggcgttgcgcctgttccaagtggtcggaaggggtctggggattacatgcctatgtcaccaaagagcgtttcagcaccacagcagatcatcaatccaatccgacgccatcctcaacgggtggatcccaacggatacatgatgatgagccctagtggggggtgtagccccgatataggaggcgggcccagcagttcatcctcatcttctaacgcagtcccctcaggtacttcctacggaaaactgtggacaaatggcgttggggggcaccactcccatgtcttaccacacccaaagcctcctgttgagagcagtggtgggaaactgctgccttgcactggggactatatgaacatgtccccagtaggagattcaaatacttcctccccttccgactgctactatgggcccgaggatccgcagcataagccagtattatcgtactattccctgccacgatcgttcaagcacacacagaggccaggggagcccgaagaaggggcacgtcaccaacatttgcggttgtctacttccagcggccggttgctttatgcagccactgctgatgacagctcatcctcaacgtcctccgacagcctgggcggcggctattgtggcgccaggttagagccctctttgcctcatccccatcaccaggtcctgcaaccacatttacctcgaaaagtagacacggccgcccagactaatagtagactggcacgacccacccggctcagtctcggggatcccaaggcttccactctgccgagggctagggaacaacagcaacagcaacagcctctgctgcatccgcctgagccaaaaagccctggagagtatgtcaacatcgaatttgggagcgaccagtcgggctacctctctggccccgtcgcctttcacagcagccctagtgtgaggtgcccctcacaactccaaccagccccccgggaagaggaaactggtacggaggagtacatgaaaatggacctgggccctggccggagagctgcctggcaagagagtacaggagtggaaatgggaaggctaggacctgcaccacccggggccgccagcatctgtagacccacacgcgccgttccttcctcacgcggcgactacatgactatgcaaatgagctgccctagacagtcttatgtcgacacaagccctgcagctccagtgtcctatgcagatatgcgaaccggcatagctgccgaggaggtaagcctgcccagagctactatggcagccgcatcctccagtagtgcggcatctgctagtccaaccggacctcagggagctgcggagctggcagcccactccagtttgcttggtgggccccagggacccggtggcatgtcagctttcaccagagtgaatctatctcccaacagaaatcagagtgctaaagtgattagagccgatccccaggggtgtagacggagacacagctctgagaccttttccagcactcctagcgccactagagtgggtaacaccgtgcctttcggcgccggggctgctgtcggtggaggagggggaagttcctccagctcggaagatgttaagagacactccagtgcaagctttgagaatgtgtggttgagaccgggtgaactcgggggtgccccaaaagagcccgcaaaactttgtggtgccgctgggggcctcgagaatggacttaattatatcgacctcgacttggtgaaggattttaagcaatgtccccaagagtgcacgccagagcctcaacccccaccgcccccccctcctcatcaaccgctcggctctggcgaatcttctagcacgcgccgatccagtgaagatttaagcgcatatgcctcaattagtttccagaagcagcctgaggaccgccaatag

SEQ ID NO: 157230 - DNA, 3729 bp, Artificial Sequence
  derived and/or modified sequence
atggccagccccccagagagtgatggcttcagtgatgtgaggaaggtgggctacctgaggaagcccaagtccatgcacaagcgcttctttgtgctgcgggccgccagcgaggccggcggccctgcccggctggagtactatgaaaatgagaagaagtggaggcacaagagcagcgcccccaagaggagcatccccctggagagctgcttcaacatcaacaagagagctgacagcaagaacaagcacctggtggccctgtacaccagagatgagcactttgccatcgctgctgacagcgaggccgagcaggacagctggtaccaggccctgctgcagctgcacaacagagccaagggccaccatgatggagctgctgccctgggcgccggcggcggcggcggcagctgcagcggcagcagcggcctgggggaggccggggaggacctgtcctatggagatgtgcccccaggccctgccttcaaggaggtgtggcaggtgatcctgaagcccaagggcctgggccagaccaagaacctgattggcatctaccgcctgtgcctgaccagcaagaccatcagctttgtgaagctgaacagcgaggccgctgctgtggtgctgcagctgatgaacatccgccgctgtggccacagcgagaacttcttcttcatcgaggtgggccgctctgctgtgactggacctggagagttctggatgcaggtggatgattctgtggtggcccagaacatgcatgagaccatcctggaggccatgagggccatgtctgatgagttccggcccaggagcaagagccagagcagcagcaactgcagcaaccccatctctgtgcccctgcggcggcaccacctgaacaaccccccacccagccaggtgggcctgaccaggaggagcaggacagagagcatcacagccaccagccctgcctccatggtgggcggcaagccaggcagcttccgggtgcgggccagcagtgatggagagggcaccatgagcaggcctgcctctgtggatggcagccctgtgagccccagcaccaacagaactcatgcccaccgccaccggggcagcgcccggctgcacccccccctgaaccacagccgcagcatccccatgcctgccagccgctgcagccccagcgccaccagccctgtgtccctgagcagcagcagcaccagcggccacggcagcaccagtgactgcctcttcccccggcgcagcagcgcctctgtgtctggcagccccagtgatggcggcttcatcagcagtgatgaatatggcagcagcccctgtgacttccgcagcagcttccgctctgtgaccccagacagcctgggccacaccccaccagcccggggggaggaggagctgagcaactacatctgcatgggcggcaagggccccagcaccctgacagcccccaacggccactacatcctgagccggggcggcaatggccaccgctgcaccccaggcaccggcctgggcaccagccctgccctggccggagatgaagctgccagcgctgctgacctggacaaccgcttcaggaagaggacccacagcgctggcaccagccccaccatcacccaccagaagacccccagccagagctctgtggccagcattgaggagtacacagagatgatgcctgcctacccacctgggggcggcagcggcggccgcctgcccggccaccgccacagcgcctttgtgcccaccaggagctacccagaggagggcctggagatgcaccccctggagcggcggggcggccaccacaggccagacagcagcaccctgcacacagatgatggctacatgcccatgagccctggggtggcccctgtgcccagcggcaggaaaggaagtggggactacatgcccatgagccccaagtctgtgtctgccccccagcagatcatcaaccccatcagaagacacccccagagggtggaccccaacggctacatgatgatgagccccagcggcggctgcagcccagacattggaggcggccccagcagcagcagcagcagcagcaatgctgtgcccagcggcaccagctatggcaagctgtggaccaatggagtgggcggccaccacagccacgtgctgccccaccccaagccccctgtggagagcagcggcggcaagctgctgccctgcacaggagactacatgaacatgagccctgtgggggacagcaacaccagcagccccagcgactgctactacggccctgaggacccccagcacaagcctgtgctgagctactacagcctgcccaggagcttcaagcacacccagaggcctggagagcctgaggagggcgcccggcaccagcacctgcggctgagcaccagcagcggccgcctgctgtatgctgccacagcagatgacagcagcagcagcaccagcagtgacagcctgggcggcggctactgtggggcccggctggagcccagcctgccccacccccaccaccaggtgctgcagccccacctgcccaggaaggtggacacagctgcccagaccaacagccggctggcccggcccacccggctgagcctgggggaccccaaggccagcaccctgccccgggcccgggagcagcagcagcagcagcagcccctgctgcaccccccagagcccaagagccctggagaatatgtgaacattgaatttggaagtgaccagagcggctacctgagcggccctgtggccttccacagcagccccagcgtgcgctgccccagccagctgcagcctgccccccgggaggaggagaccggcacagaggagtacatgaagatggacctgggccctggccggcgggccgcctggcaggagagcactggagtggagatgggccgcctgggccctgcccctcctggggccgccagcatctgccggcccaccagggctgtgcccagcagcagaggagactacatgaccatgcagatgagctgcccccggcagagctatgtggacaccagccctgctgcccctgtgtcctatgctgacatgaggactggaattgctgctgaggaggtgtccctgccccgggccaccatggctgctgccagcagcagcagcgctgccagcgccagccccaccggcccccagggcgctgctgagctggccgcccacagcagcctgctgggcggcccccagggccctgggggcatgtctgccttcaccagggtgaacctgagccccaacagaaaccagagcgccaaggtgatccgggctgacccccagggctgcagaagaagacacagcagcgagaccttcagcagcaccccatctgccaccagggtgggcaacacagtgccctttggagctggagctgctgtgggcggcggcggcggcagcagcagcagcagtgaagatgtgaagaggcacagcagcgccagctttgaaaatgtgtggctgcggcctggagagctgggcggggcccccaaggagcccgccaagctgtgtggggccgccggcggcctggagaatggcctgaactacatcgacctggacctggtgaaggacttcaagcagtgcccccaggagtgcaccccagagccccagcccccacctcctcctccaccccaccagcccctgggcagcggggagagcagcagcacccggcgcagcagcgaggacctgagcgcctatgccagcatctccttccagaagcagccagaagatcggcagtag

SEQ ID NO: 157231 - DNA, 5981 bp, Artificial Sequence
  derived and/or modified sequence
cggcggcgcggtcggagggggccggcgcgcagagccagacgccgccgcttgttttggttggggctctcggcaactctccgaggaggaggaggaggagggaggaggggagaagtaactgcagcggcagcgcctcccgaggaacaggcgtcttccccgaacccttcccaaacctcccccatcccctctcgcccttgtcccctcccctcctccccagccgcctggagcgaggggcagggatgagtctgtccctccggccggtccccagctgcagtggctgcccggtatcgtttcgcatggaaaagccactttctccacccgccgagatgggcccggatgggggctgcagaggacgcgcccgcgggcggcggcagcagcagcagcagcagcagcagcaacagcaacagccgcagcgccgcggtctctgcgactgagctggtatttgggcggctggtggcggctgggacggttggggggtgggaggaggcgaaggaggagggagaaccccgtgcaacgttgggacttggcaacccgcctccccctgcccaaggatatttaatttgcctcgggaatcgctgcttccagaggggaactcaggagggaaggcgcgcgcgcgcgcgcgctcctggaggggcaccgcagggacccccgactgtcgcctccctgtgccggactccagccggggcgacgagagatgcatcttcgctccttcctggtggcggcggcggctgagaggagacttggctctcggaggatcggggctgccctcaccccggacgcactgcctccccgccgggcgtgaagcgcccgaaaactccggtcgggctctctcctgggctcagcagctgcgtcctccttcagctgcccctccccggcgcggggggcggcgtggatttcagagtcggggtttctgctgcctccagccctgtttgcatgtgccgggccgcggcgaggagcctccgccccccacccggttgtttttcggagcctccctctgctcagcgttggtggtggcggtggcagcatggcgagccctccggagagcgatggcttctcggacgtgcgcaaggtgggctacctgcgcaaacccaagagcatgcacaaacgcttcttcgtactgcgcgcggccagcgaggctgggggcccggcgcgcctcgagtactacgagaacgagaagaagtggcggcacaagtcgagcgcccccaaacgctcgatcccccttgagagctgcttcaacatcaacaagcgggctgactccaagaacaagcacctggtggctctctacacccgggacgagcactttgccatcgcggcggacagcgaggccgagcaagacagctggtaccaggctctcctacagctgcacaaccgtgctaagggccaccacgacggagctgcggccctcggggcgggaggtggtgggggcagctgcagcggcagctccggccttggtgaggctggggaggacttgagctacggtgacgtgcccccaggacccgcattcaaagaggtctggcaagtgatcctgaagcccaagggcctgggtcagacaaagaacctgattggtatctaccgcctttgcctgaccagcaagaccatcagcttcgtgaagctgaactcggaggcagcggccgtggtgctgcagctgatgaacatcaggcgctgtggccactcggaaaacttcttcttcatcgaggtgggccgttctgccgtgacggggcccggggagttctggatgcaggtggatgactctgtggtggcccagaacatgcacgagaccatcctggaggccatgcgggccatgagtgatgagttccgccctcgcagcaagagccagtcctcgtccaactgctctaaccccatcagcgtccccctgcgccggcaccatctcaacaatcccccgcccagccaggtggggctgacccgccgatcacgcactgagagcatcaccgccacctccccggccagcatggtgggcgggaagccaggctccttccgtgtccgcgcctccagtgacggcgaaggcaccatgtcccgcccagcctcggtggacggcagccctgtgagtcccagcaccaacagaacccacgcccaccggcatcggggcagcgcccggctgcaccccccgctcaaccacagccgctccatccccatgccggcttcccgctgctcgccttcggccaccagcccggtcagtctgtcgtccagtagcaccagtggccatggctccacctcggattgtctcttcccacggcgatctagtgcttcggtgtctggttcccccagcgatggcggtttcatctcctcggatgagtatggctccagtccctgcgatttccggagttccttccgcagtgtcactccggattccctgggccacaccccaccagcccgcggtgaggaggagctaagcaactatatctgcatgggtggcaaggggccctccaccctgaccgcccccaacggtcactacattttgtctcggggtggcaatggccaccgctgcaccccaggaacaggcttgggcacgagtccagccttggctggggatgaagcagccagtgctgcagatctggataatcggttccgaaagagaactcactcggcaggcacatcccctaccattacccaccagaagaccccgtcccagtcctcagtggcttccattgaggagtacacagagatgatgcctgcctacccaccaggaggtggcagtggaggccgactgccgggacacaggcactccgccttcgtgcccacccgctcctacccagaggagggtctggaaatgcaccccttggagcgtcggggggggcaccaccgcccagacagctccaccctccacacggatgatggctacatgcccatgtccccaggggtggccccagtgcccagtggccgaaagggcagtggagactatatgcccatgagccccaagagcgtatctgccccacagcagatcatcaatcccatcagacgccatccccagagagtggaccccaatggctacatgatgatgtcccccagcggtggctgctctcctgacattggaggtggccccagcagcagcagcagcagcagcaacgccgtcccttccgggaccagctatggaaagctgtggacaaacggggtagggggccaccactctcatgtcttgcctcaccccaaacccccagtggagagcagcggtggtaagctcttaccttgcacaggtgactacatgaacatgtcaccagtgggggactccaacaccagcagcccctccgactgctactacggccctgaggacccccagcacaagccagtcctctcctactactcattgccaagatcctttaagcacacccagcgccccggggagccggaggagggtgcccggcatcagcacctccgcctttccactagctctggtcgccttctctatgctgcaacagcagatgattcttcctcttccaccagcagcgacagcctgggtgggggatactgcggggctaggctggagcccagccttccacatccccaccatcaggttctgcagccccatctgcctcgaaaggtggacacagctgctcagaccaatagccgcctggcccggcccacgaggctgtccctgggggatcccaaggccagcaccttacctcgggcccgagagcagcagcagcagcagcagcccttgctgcaccctccagagcccaagagcccgggggaatatgtcaatattgaatttgggagtgatcagtctggctacttgtctggcccggtggctttccacagctcaccttctgtcaggtgtccatcccagctccagccagctcccagagaggaagagactggcactgaggagtacatgaagatggacctggggccgggccggagggcagcctggcaggagagcactggggtcgagatgggcagactgggccctgcacctcccggggctgctagcatttgcaggcctacccgggcagtgcccagcagccggggtgactacatgaccatgcagatgagttgtccccgtcagagctacgtggacacctcgccagctgcccctgtaagctatgctgacatgcgaacaggcattgctgcagaggaggtgagcctgcccagggccaccatggctgctgcctcctcatcctcagcagcctctgcttccccgactgggcctcaaggggcagcagagctggctgcccactcgtccctgctggggggcccacaaggacctgggggcatgagcgccttcacccgggtgaacctcagtcctaaccgcaaccagagtgccaaagtgatccgtgcagacccacaagggtgccggcggaggcatagctccgagactttctcctcaacacccagtgccacccgggtgggcaacacagtgccctttggagcgggggcagcagtagggggcggtggcggtagcagcagcagcagcgaggatgtgaaacgccacagctctgcttcctttgagaatgtgtggctgaggcctggggagcttgggggagcccccaaggagccagccaaactgtgtggggctgctgggggtttggagaatggtcttaactacatagacctggatttggtcaaggacttcaaacagtgccctcaggagtgcacccctgaaccgcagcctcccccacccccaccccctcatcaacccctgggcagcggtgagagcagctccacccgccgctcaagtgaggatttaagcgcctatgccagcatcagtttccagaagcagccagaggaccgtcagtagctcaactggacatcacagcagaatgaagacctaaatgacctcagcaaatcctcttctaactcatgggtacccagactctaaatatttcatgattcacaactaggacctcatatcttcctcatcagtagatggtacgatgcatccatttcagtttgtttactttatccaatcctcaggatttcattgactgaactgcacgttctatattgtgccaagcgaaaaaaaaaaatgcactgtgacaccagaataatgagtctgcataaacttcatcttcaaccttaaggacttagctggccacagtgagctgatgtgcccaccaccgtgtcatgagagaatgggtttactctcaatgcattttcaagatacatttcatctgctgctgaaactgtgtacgacaaagcatcattgtaaattatttcatacaaaactgttcacgttgggtggagagagtattaaatatttaacataggttttgatttatatgtgtaattttttaaatgaaaatgtaacttttcttacagcacatcttttttttggatgtgggatggaggtatacaatgttctgttgtaaagagtggagcaaatgcttaaaacaaggcttaaaagagtagaatagggtatgatccttgttttaagattgtaattcagaaaacataatataagaatcatagtgccatagatggttctcaattgtatagttatatttgctgatactatctcttgtcatataaacctgatgttgagctgagttccttataagaattaatcttaattttgtattttttcctgtaagacaataggccatgttaattaaactgaagaaggatatatttggctgggtgttttcaaatgtcagcttaaaattggtaattgaatggaagcaaaattataagaagaggaaattaaagtcttccattgcatgtattgtaaacagaaggagatgggtgattccttcaattcaaaagctctctttggaatgaacaatgtgggcgtttgtaaattctggaaatgtctttctattcataataaactagatactgttgatcttttcttctgtcccctccccccaccacttctgtaagtttcctgctctattcccaccatttttttctgtgcacacattatgatatatttcatttcctgcattgtcttgagaaagatggtaaggcaagtgagctgttgctaaccagaaattaaaattccagtaagtgtttttcattatgaccagggc

SEQ ID NO: 157232 - DNA, 3729 bp, Artificial Sequence
  derived and/or modified sequence
atggccagcccccccgagagcgacggcttcagcgacgtgcggaaggtcggctatctcagaaagcccaagtccatgcataaacgctttttcgtgctgagggctgcatccgaggcaggaggaccagcccgcctggagtattatgagaacgaaaagaaatggcgacacaagtcatccgctccaaagcgttctatacccctggaaagctgttttaacattaacaaaagggccgatagtaaaaacaaacacttagtagccctgtacacccgcgacgagcacttcgcgattgctgcagatagcgaagccgagcaggactcttggtaccaagctttactgcagctccataacagggctaaaggtcaccatgatggcgccgcagccctgggtgcgggggggggagggggctcctgcagtggtagctctgggctcggcgaggcgggagaggacctgtcctacggagacgtgccaccagggcctgcattcaaggaggtgtggcaggtaatcttgaaacccaaagggctgggtcagaccaagaacttgatcggaatttacagactgtgtttgacctccaagacaatatcattcgtgaagctgaacagcgaagccgccgcggtcgtcctgcagctcatgaatatccgacgctgtggtcactctgagaactttttctttattgaagtgggccggagcgccgtaacaggtcctggtgaattttggatgcaagtggacgactcagtcgtggcccaaaacatgcatgagaccatactggaggcgatgcgcgcgatgtctgatgaattcaggccaagatccaaaagtcagtctagctcaaattgcagtaatccaatcagtgttcccttgcggagacatcacttgaacaaccctccccccagtcaggtggggctgacccgtagatctcgtacggaaagtataaccgccacgagccccgcatcaatggtgggaggaaaacctgggagcttccgcgttcgggcttccagcgacggcgaggggacgatgagtcggcccgccagtgtagacggctctcccgtttcaccgagtactaatagaacccacgcacatcgacaccgggggagtgcccgcctgcatccacctctgaatcacagtagatccatcccaatgcctgcatctagatgctccccatctgcaacatctcctgtcagcctcagctcgtccagtacaagtggccatggcagtacatcagactgcttgttcccgcgacgatcttctgcgagcgtaagtggctctccttcagatggggggttcatctcctctgatgaatacggatcatccccatgtgattttcgtagcagttttaggtccgtcactcctgattccctgggtcatactcctccagcgcgtggcgaagaagaactgtctaactatatttgtatgggaggaaaggggccaagcactcttaccgctcctaatgggcactatattcttagtcggggcggtaatggccatcgctgtactcccggcaccggtctgggcacctccccggcgctcgccggagatgaggctgcctccgctgcagatctggataaccgcttccgcaagcggactcattctgcaggaacttccccaaccatcacccaccagaagaccccttcgcagtcttcagtcgcctcaattgaagaatacactgagatgatgcctgcctaccctcctggaggtggctctggcgggagactccctggacatagacacagcgcattcgtcccaacccggagttacccagaggagggcttagagatgcaccctctggaacgccggggcgggcaccacagaccagattcctctaccctgcacactgacgatggatacatgcctatgtcccctggagtcgcgccagtgccttcaggtaggaaaggctctggggactacatgcccatgtcaccaaagagtgttagcgcccctcagcagattataaatcctatcagacgccaccctcaacgggtggaccctaatggctatatgatgatgtctccatctggaggctgcagccctgacataggaggaggaccgtcctcgtcaagctcaagtagtaatgccgtgcccagtggaaccagctacgggaagctgtggactaatggtgtgggcggacaccattcccatgtgctgcctcacccaaagcctcctgtggaatccagcggggggaagcttttaccctgtaccggagattatatgaacatgagcccagtgggcgactccaatactagctctcccagcgactgttattatgggcctgaggatccacagcataagcctgttttgagctattactcattaccccggtcatttaagcacacacagcgccctggggagcccgaggagggagcacgccaccagcatttgagactgtccactagctccgggcggctgctttacgctgccactgctgatgattccagcagtagcacctcaagcgacagcttaggaggtggatattgcggggcaagacttgagcctagcttaccgcacccccatcaccaggtgctccagcctcatcttcctcgcaaagtggataccgccgcacagaccaactctaggctggcaaggccaacaagactaagtctgggtgaccccaaagcgtcaaccctacccagagcccgggaacaacaacagcagcagcaacccctgctccacccacccgagccaaagagtcccggcgaatatgtaaatatcgaatttgggagcgatcagtccggctacctctcgggaccagtcgctttccactcaagcccaagcgtcaggtgcccttctcagttgcagcccgcgccacgcgaggaggagaccggtacagaagagtacatgaaaatggacttaggacccggcaggcgggccgcttggcaggaatcaactggcgttgagatggggcgtcttggtcccgcccctcccggggcggcaagcatttgccgtccaactagagctgtgccatcgagcagaggggattatatgaccatgcaaatgtcttgcccgaggcaatcctatgtggacacctcgcccgcagcgccagtttcctacgctgacatgcgcactggaatcgcagccgaagaagtctctctccctagggcgaccatggccgccgcgtcatctagctctgccgcctccgcgtcccccactgggcctcagggcgctgcagaactcgccgcccactctagcctcttaggagggccccagggacccggtggaatgagcgccttcaccagggtgaacctcagcccaaaccgcaatcagtctgcgaaggtcatccgcgcagaccctcagggatgtcgccgcagacactcttcagagactttcagctcgactccttccgccaccagggtaggaaataccgtgcccttcggggcaggggcggctgtgggaggtgggggagggtcatcatccagtagcgaggacgtgaaaagacactcaagcgcatctttcgaaaatgtatggctgcggccaggtgaattaggcggcgcgcccaaagagcctgcaaagctctgtggcgcggctggcgggctggagaacgggctcaattacatcgacctggaccttgtgaaggactttaagcagtgtcctcaggagtgtactcccgagccccagccaccgcctccgccgccacctcatcagcctttgggttctggggaaagttcctcgacacgccggagctccgaggatttaagcgcttacgcctccataagcttccagaagcaacccgaggatcgacagtag

SEQ ID NO: 157233 - DNA, 3729 bp, Artificial Sequence
  derived and/or modified sequence
atggcgtcgccccctgagtctgacggcttctctgacgttcgcaaagtcgggtacttgaggaagccaaagtccatgcataagcggttcttcgttctgcgcgctgcctctgaagccggtggtcccgctcgactggagtattatgagaatgaaaagaaatggcgccataaatctagtgcccctaagaggagtatacccttagaaagttgctttaacatcaataaacgggcagacagcaagaacaaacacctggtagctctttatacgcgcgacgaacacttcgctattgcggctgattctgaggccgagcaggactcctggtaccaggcacttctccagctgcacaatcgggctaagggccatcacgacggagcggcagcgctgggggctggagggggaggaggctcatgcagcggatcatcagggctcggcgaagcgggagaagacttgagctatggcgatgtcccgcctggccctgcctttaaggaggtctggcaggttatcctgaaacccaagggattaggccagaccaagaatctcatcggtatctataggttgtgcctgacctcgaagacaattagttttgtgaagctcaactctgaggcagctgccgtggtgctgcagcttatgaatatcaggagatgcgggcacagcgaaaacttcttttttattgaggtcggcaggagtgcagtgaccgggccaggtgaattttggatgcaggtggacgactctgtggtggctcagaacatgcatgagaccattttagaggctatgcgagccatgtcagatgagttcagacccagatccaagagccagtcctcttccaactgctcaaacccgatttccgtaccattaagacgtcaccacttaaacaaccccccaccatcccaagtaggcctaacaagaagatctagaactgagtctattacagccaccagtcccgcttccatggtggggggaaagcctggctccttccgcgtgagggccagcagcgatggagaggggaccatgagtcgacccgcttcagtggatggcagtcccgtgtccccatctaccaacaggacccacgcgcatcggcataggggcagcgcacggctgcacccgccactgaaccactctaggtctattcctatgccggctagtagatgttctccctcagcaacctcaccggtttcactcagttcttcatccaccagcggacatgggtccacatccgactgcctgttcccacgcagatcctcggccagtgtcagcggaagtcctagcgacggtgggttcatttcttcagacgagtacggttcgtctccttgcgatttccggtcgagttttcgatcagttacaccagacagtttgggacacaccccccctgctcgcggtgaagaagagctcagtaattacatctgcatgggaggcaagggaccctccactttgaccgcgccaaatgggcattatatactgagtcgtggcggaaatgggcaccggtgtacccctggaactggactaggaaccagccctgctctggcaggtgatgaggcagcctcagccgcagacctcgacaataggtttcgcaaacgcacccatagcgccggaacctcccccaccatcacccaccaaaaaaccccatctcagtcgagtgttgccagcatagaagaatataccgagatgatgcccgcatatccgcctgggggaggatccggagggcgtttgcctggccacagacatagcgcattcgtccccaccagaagctaccctgaggaaggcctcgaaatgcatcctctggaacgcagagggggacaccataggccggatagctctaccctgcacaccgacgatggatatatgcccatgagtcccggagtagcacccgtcccttctggtaggaaaggttccggtgactatatgccgatgagcccgaagtctgtgagcgcccctcagcagataattaatcccattcgcagacacccgcagcgtgtcgatcccaacggatacatgatgatgtctcccagtgggggatgttcgccagatattggcggtggcccatcctcatcttctagtagtagtaatgcagttccatctggcacctcctatggcaagctctggaccaatggagtgggtggacaccactctcatgtcctgcctcacccgaagccccctgtcgaatcatcaggagggaaactgctcccgtgcacgggggactatatgaacatgtccccagtgggcgactcaaacactagctctccctcagactgctattacgggccagaagatccacagcacaaacctgtgttgtcctactacagtttgcccaggtccttcaaacacacccagaggcccggagaacccgaggagggagctcgtcatcaacatctgaggctatccacctcttccgggagactcctctacgctgccaccgcagatgactcctcatctagcacctcatcagactctcttgggggaggctattgcggcgcacggctggaaccttctcttccacacccacatcatcaggtgctccagccccacctgcctaggaaggtggataccgctgcgcagaccaatagtcgcctggccagacccactcggctgagcctaggcgatcctaaggcgagcacgttgcctcgggctagggagcaacaacagcagcagcagcctctgctacatccacccgaaccaaagtctcctggagaatatgtgaacattgaatttggatccgatcagtccgggtatctgagcggacccgtcgcttttcactcttcaccgagcgtgcgctgcccgtcccagctgcagccagctcccagagaagaagaaacaggtacggaagagtacatgaagatggacctcggtcctggacgtagagccgcatggcaggagtccacaggtgtggagatgggtaggcttgggcctgccccacccggagcggcatctatctgtaggcccacaagagccgtcccctctagcagaggcgactatatgactatgcagatgtcttgccctcgccagagttacgtggacacatctcccgctgccccagtctcctacgcggacatgcgaacgggcatcgccgctgaagaggtctccttaccacgcgctacgatggccgctgctagttcttccagcgccgcaagcgccagtcctaccggtccccagggagccgctgaactggccgcacactcaagtttactgggtggaccacaaggaccaggcggaatgtctgccttcaccagggtgaacctgtcgccaaatcgtaatcaaagcgctaaagtaattcgagcggatccccagggttgtagacggagacattctagcgaaacattcagctccacgccatccgccactagggtcgggaataccgttccgttcggcgcaggcgctgccgtagggggtggaggcggatcctcgtccagcagtgaggatgttaaacgtcactcctccgcgtctttcgaaaatgtgtggttaaggcccggtgagctgggcggagctcctaaggagcctgcaaaactctgtggtgcggctggcggtctggagaacggactgaactacatcgacctggatttagtgaaggattttaagcagtgtcctcaagaatgtacacccgaaccccagcctcccccaccacctccacctcaccagcctctggggtctggcgaaagctcttcaacacgcaggtcctctgaggacttaagcgcatatgccagcatctcttttcagaaacagccagaggatcgccagtag

SEQ ID NO: 157234 - protein, 620 aa, Artificial Sequence
  derived and/or modified sequence
MNNFILLEEQLIKKSQQKRRTSPSNFKVRFFVLTKASLAYFEDRHGKKRTLKGSIELSRIKCVEIVKSDISIPCHYKYPFQVVHDNYLLYVFAPDRESRQRWVLALKEETRNNNSLVPKYHPNFWMDGKWRCCSQLEKLATGCAQYDPTKNASKKPLPPTPEDNRRPLWEPEETVVIALYDYQTNDPQELALRRNEEYCLLDSSEIHWWRVQDRNGHEGYVPSSYLVEKSPNNLETYEWYNKSISRDKAEKLLLDTGKEGAFMVRDSRTAGTYTVSVFTKAVVSENNPCIKHYHIKETNDNPKRYYVAEKYVFDSIPLLINYHQHNGGGLVTRLRYPVCFGRQKAPVTAGLRYGKWVIDPSELTFVQEIGSGQFGLVHLGYWLNKDKVAIKTIREGAMSEEDFIEEAEVMMKLSHPKLVQLYGVCLEQAPICLVFEFMEHGCLSDYLRTQRGLFAAETLLGMCLDVCEGMAYLEEACVIHRDLAARNCLVGENQVIKVSDFGMTRFVLDDQYTSSTGTKFPVKWASPEVFSFSRYSSKSDVWSFGVLMWEVFSEGKIPYENRSNSEVVEDISTGFRLYKPRLASTHVYQIMNHCWKERPEDRPAFSRLLRQLAEIAESGL

SEQ ID NO: 157235 - DNA, 1863 bp, Artificial Sequence
  derived and/or modified sequence
atgaacaacttcatcctcctggaagaacagctcattaagaaatcacagcaaaagagaaggactagcccatccaacttcaaggtccggttcttcgtactgacaaaagcaagcctggcctatttcgaagatcgacacgggaaaaaaagaactctgaaggggtccattgagctctcgcgcatcaagtgcgtggaaatcgtaaagtccgatatctccattccgtgtcattacaaatacccgtttcaggttgtgcacgacaactacctactctatgtgtttgcccccgatcgtgagagcagacaacggtgggtgcttgccctcaaggaagaaactcgcaataacaattctctagtgcccaagtaccacccaaatttctggatggacggcaagtggcggtgttgttctcaattagagaaactggcaaccggttgcgcccagtacgatcccactaaaaacgcaagcaaaaagccactgcctccaaccccagaagataacaggagaccactttgggaaccagaagaaactgtggtcatcgccctgtatgattaccagactaacgatccgcaggagttggccctgcggcgcaacgaagagtattgtctcctcgactcctctgagatccactggtggcgggtgcaggatcgtaatggccatgagggatacgtgccatcctcctacctggtggaaaagtcacccaacaacctcgagacttatgaatggtataacaagtccatttcacgtgataaagccgagaaactccttctggacaccggaaaggagggcgcgttcatggtgagggacagtagaaccgccggaacctatacagtttctgtgttcactaaagccgtcgtgtcagaaaataatccctgcatcaagcactaccatatcaaagagaccaacgataacccaaagcgctactacgtggccgagaagtatgtgttcgattctatacctctcttgattaattatcatcaacacaacggtggagggctggttaccaggctgcgctaccccgtatgcttcggaagacagaaagcccccgtgacagcgggtcttcgctacgggaagtgggtgatcgatccatctgagctgacttttgtccaggaaattggatctggccagtttgggctggtacatctaggttactggctgaacaaggataaggtggcgataaaaacaattagggaaggagctatgagcgaggaagactttatagaagaggccgaggtaatgatgaaactgagtcacccaaaactcgtacaactgtatggagtatgtctggaacaagcgcctatctgtttggtttttgagttcatggagcatgggtgtctgagtgactatctgcgaacccagagggggcttttcgcggccgaaacattactcggcatgtgcctggacgtgtgtgaagggatggcttatctggaggaagcatgtgtgatccacagggatctggcagctcggaattgtctggtgggcgaaaaccaggtcatcaaggtttccgacttcggaatgacacggtttgttttggatgatcagtatacgagctccacaggaaccaaattccccgtcaagtgggcctcccccgaggtgttctctttctctagatattcttccaaatccgatgtctggagcttcggagtcctaatgtgggaggtgttcagcgagggaaaaatcccctacgagaaccgctccaatagcgaagtggttgaggacatttctacagggtttcggttatataaaccacgtctggcgtccacacatgtgtatcagatcatgaatcattgttggaaagagaggccagaggacaggcccgccttcagtcgactactccggcagttggcagaaatcgccgaatccggcctctag

SEQ ID NO: 157236 - DNA, 4528 bp, Artificial Sequence
  derived and/or modified sequence
gttgatagaaagataacgttgaaggcaagttgcccttgagcagctctctgaagatcaactgcctccacattgcattctttgccccaaaactctttcctttggttgtgctaagaggtgatgcccaaggtgcaccacctttcaagaactggatcatgaacaactttatcctcctggaagaacagctcatcaagaaatcccaacaaaagagaagaacttctccctcgaactttaaagtccgcttctttgtgttaaccaaagccagcctggcatactttgaagatcgtcatgggaagaagcgcacgctgaaggggtccattgagctctcccgaatcaaatgtgttgagattgtgaaaagtgacatcagcatcccatgccactataaatacccgtttcaggtggtgcatgacaactacctcctatatgtgtttgctccagatcgtgagagccggcagcgctgggtgctggcccttaaagaagaaacgaggaataataacagtttggtgcctaaatatcatcctaatttctggatggatgggaagtggaggtgctgttctcagctggagaagcttgcaacaggctgtgcccaatatgatccaaccaagaatgcttcaaagaagcctcttcctcctactcctgaagacaacaggcgaccactttgggaacctgaagaaactgtggtcattgccttatatgactaccaaaccaatgatcctcaggaactcgcactgcggcgcaacgaagagtactgcctgctggacagttctgagattcactggtggagagtccaggacaggaatgggcatgaaggatatgtaccaagcagttatctggtggaaaaatctccaaataatctggaaacctatgagtggtacaataagagtatcagccgagacaaagctgaaaaacttcttttggacacaggcaaagaaggagccttcatggtaagggattccaggactgcaggaacatacaccgtgtctgttttcaccaaggctgttgtaagtgagaacaatccctgtataaagcattatcacatcaaggaaacaaatgacaatcctaagcgatactatgtggctgaaaagtatgtgttcgattccatccctcttctcatcaactatcaccaacataatggaggaggcctggtgactcgactccggtatccagtttgttttgggaggcagaaagccccagttacagcagggctgagatacgggaaatgggtgatcgacccctcagagctcacttttgtgcaagagattggcagtgggcaatttgggttggtgcatctgggctactggctcaacaaggacaaggtggctatcaaaaccattcgggaaggggctatgtcagaagaggacttcatagaggaggctgaagtaatgatgaaactctctcatcccaaactggtgcagctgtatggggtgtgcctggagcaggcccccatctgcctggtgtttgagttcatggagcacggctgcctgtcagattatctacgcacccagcggggactttttgctgcagagaccctgctgggcatgtgtctggatgtgtgtgagggcatggcctacctggaagaggcatgtgtcatccacagagacttggctgccagaaattgtttggtgggagaaaaccaagtcatcaaggtgtctgactttgggatgacaaggttcgttctggatgatcagtacaccagttccacaggcaccaaattcccggtgaagtgggcatccccagaggttttctctttcagtcgctatagcagcaagtccgatgtgtggtcatttggtgtgctgatgtgggaagttttcagtgaaggcaaaatcccgtatgaaaaccgaagcaactcagaggtggtggaagacatcagtaccggatttcggttgtacaagccccggctggcctccacacacgtctaccagattatgaatcactgctggaaagagagaccagaagatcggccagccttctccagactgctgcgtcaactggctgaaattgcagaatcaggactttagtagagactgagtaccaggccacgggctgcagatcctgaatggaggaaggatatgtcctcattccatagagcattagaagctgccaccagcccaggaccctccagaggcagcctggcctgtggcatcagtccctgagtcaccatggaagcagcatcctgaccacagctggcagtcaagccacagctggagggtcagccaccaagctgggagctgagccagaacaggagtgatgtctctgcccttcctctagcctcttgtcacatgtggtgcacaaacctcaacctgacagctttcagacagcattcttgcacttcttagcaacagagagagacatgagtaagacccagattgctatttttattgttatttttaacatgaatctaaagtttatggttccagggactttttatttgacccaacaacacagtatcccaggatatggaggcaaggggaacaaagagcatgagtctttttccaagaaaactggtgagttaagtaagattagagtgagtgtgctctgttgctgtgatgctgtcagccacagcttcctgccgtagagaatgatagagcagctgctcacacaggaggccggatattctgagaagcagctttatgaggttttacagagtatgctgctacctctctccttgaagggagcatggcgagacccattggatggattggggtgaacagttcaggtcccatgcttggagcattgggtatctgatgtctgcaccagaacaagagaacctctgacggtggagaaccatgtggtgcaagaagagatcttaggtctcttcttttataccaagctcatcttttataccaagctgtgcaggtgactatgcctcctcttctgcacagaatgcttccaccagcatcctgagaagaaatgattacttctgaaaaacatccttttttccagcctctgggaatcagccccccctctctgcactatccgatcctcatcaacagagggcagcattgtgttggtcaatgttcccttggcgagcaattgaaacttgtttaggccctagggttgagcaattttaaggttgagactccaagtctcctaaaattctaggagagaaataaagagtctgtttttgctcaaaccatcaggatggaaacagtcaggcactgactggggtgcttccaagaggcatgagagtgcctactctggcttgagcacttctatatgcaaggtgaatatgtactgagctaggagacttccctgcaaaatctctgttcaccctgggttcacatccccatgaggtaatattattattcccattttacaaataatgtaactgaggctttaaaaagccaagacatctgcccaaagtgatggaactagaaagtctagagctggtattctagcccaaatctgtctgaccgcaatacacagattctttattcctattcgacactggcttctactgaaaatgaaacggattgcagagggaataaatacaaagatggaaagccagtaaagaagtcagtatagaaccactagcgaatagtgttgctctggcacagaccactgtggttgatggcatggccctccaacttggaataggattttccttttcctattctgtatccttaccttggtcatgttaatgactttggagttattcagttaatgaccctttaattctcacaaccaaccagtcatgttgcttgaagccatttatagacgagcttcaaagcaactttaaaagattcttctgtagaagtatgagttcttcctttaattatcattccaactttcagctgtagtcttcttgaacacttcatgaggagggacattccctgatataagagaggatggtgttgcaattggctctttctaaatcatgtgacgttttgactggcttgagattcagatgcataatttttaattataattattgtgaagtggagagcctcaagataaaactctgtcattcagaagatgattttactcagcttatccaaaattatctctgtttactttttagaattttgtacattatcttttgggatccttaattagagatgatttctggaacattcagtctagaaagaaaacattggaattgactgatctctgtggtttggtttagaaaattcccctgtgcatggtattacctttttcaagctcagattcatctaatcctcaactgtacatgtgtacattcttcacctcctggtgccctatcccgcaaaatgggcttcctgcctggtttttctcttctcacattttttaaatggtcccctgtgtttgtagagaactcccttatacagagttttggttctagttttatttcgtagattttgcattttgtaccttttgagactatgtatttatatttggatcagatgcatatttattaatgtacagtcactgctagtgttcaaaataaaaatgttacaaatacctgttatcctttgtagagcacacagagttaaaagttgaatatagcaatattaaagctgcattttaataaatatggtgcatagggcctcgg

SEQ ID NO: 157237 - DNA, 1863 bp, Artificial Sequence
  derived and/or modified sequence
atgaacaacttcatcctgctggaggagcagctgatcaagaagagccagcagaagaggaggaccagccccagcaacttcaaggtgcgcttctttgtgctgaccaaggccagcctggcctactttgaggacagacatggcaagaagaggaccctgaagggcagcattgagctgagccgcatcaagtgtgtggagatcgtgaagagtgacatcagcatcccctgccactacaagtaccccttccaggtggtgcatgacaactacctgctgtatgtgtttgccccagaccgggagagccggcagcgctgggtgctggccctgaaggaggagaccaggaacaacaacagcctggtgcccaagtaccaccccaacttctggatggatggcaagtggcgctgctgcagccagctggagaagctggccaccggctgtgcccagtatgaccccaccaagaatgccagcaagaagcccctgccccccaccccagaggacaacagaagacccctgtgggagcctgaggagaccgtggtgattgccctgtatgactaccagaccaatgacccccaggagctggccctgcggagaaatgaggagtactgcctgctggacagcagcgagatccactggtggagggtgcaggacagaaatggacatgagggctacgtgcccagcagctacctggtggagaagagccccaacaacctggagacctatgagtggtacaacaagagcatcagccgggacaaggccgagaagctgctgctggacaccgggaaggagggcgccttcatggtgcgggacagcaggacagctggcacctacacagtgtctgtgttcaccaaggctgtggtgtctgagaacaacccctgcatcaagcactaccacatcaaggagaccaatgacaaccccaagcgctactacgtggccgagaagtatgtgtttgacagcatccccctgctgatcaactaccaccagcacaacggcggcggcctggtgacccggctgcgctaccctgtgtgcttcggccggcagaaggcccctgtgacagctggcctgcgctatggcaagtgggtgattgaccccagcgagctgacctttgtgcaggagatcggcagcggccagtttggcctggtgcacctgggctactggctgaacaaggacaaggtggccatcaagaccatccgggagggcgccatgtctgaggaggacttcatcgaggaggccgaggtgatgatgaagctgagccaccccaagctggtgcagctgtatggagtgtgcctggagcaggcccccatctgcctggtgtttgagttcatggagcacggctgcctgagtgactacctgcggacccagaggggcctgtttgctgctgagaccctgctgggcatgtgcctggatgtgtgtgagggcatggcctacctggaggaggcctgtgtgatccaccgggacctggccgccaggaactgcctggtgggggagaaccaggtgatcaaggtgtctgactttggcatgaccaggtttgtgctggatgaccagtacaccagcagcacaggcaccaagtttcctgtgaagtgggccagccctgaggtgttctccttcagccgctacagcagcaagagtgatgtgtggagctttggagtgctgatgtgggaggtgttttctgagggcaagatcccctatgagaacagaagcaacagcgaggtggtggaggacatcagcacaggcttccggctgtacaagccccggctggccagcacccacgtgtaccagatcatgaaccactgctggaaggagaggcctgaggacaggcctgccttcagccggctgctgcggcagctggccgagattgctgagagcggcctgtag

SEQ ID NO: 157238 - DNA, 1863 bp, Artificial Sequence
  derived and/or modified sequence
atgaacaacttcatcctgctggaggagcagctgatcaagaagagccagcagaagcgtcggacctcacccagcaattttaaagtaagattttttgtactgacaaaagcatcgctggcatatttcgaagatagacatggaaaaaagcggaccctgaagggcagcatagagctaagtcgaattaagtgcgtggaaattgtcaaatctgatatcagcataccatgccactataaatatcctttccaggtggtacatgacaattatctactatatgtgttcgcacccgatagggagtcacgacagcggtgggtgcttgcgttgaaagaggagacccgaaataacaacagcctggtgcctaaatatcaccctaatttttggatggatggcaaatggcgctgctgctctcaactggaaaaactggcaacaggctgcgcccagtacgaccccacaaaaaatgcttctaaaaaaccactccccccaacccctgaggacaaccgaaggcccctgtgggagcccgaggagaccgtagtcatcgctctatatgattatcagactaatgatccccaggagcttgcccttcggcgcaacgaagaatactgtttgctcgatagcagcgagatccactggtggagagttcaggacagaaacgggcacgaaggctacgtcccttcaagctacttagtggagaagtccccaaacaacctggagacctacgagtggtacaacaagagcataagccgggataaggccgagaaactattacttgatacaggtaaggaaggggcttttatggtacgcgacagtagaacggctggaacatacactgtttcagtgttcaccaaggcagttgtgtcagaaaacaacccttgtatcaaacattatcacatcaaagaaacaaatgataatccaaagcgttactacgtggccgagaaatacgtgttcgactcgatcccgctattgattaactatcatcagcataacggagggggcctagtgacgaggcttaggtatcctgtttgctttggccgccaaaaggcaccagttactgctggcctgcgctatggaaagtgggtcatcgatcccagcgaactcacatttgtgcaggagattggatctgggcaatttggcctggtgcatctcggatattggctgaacaaggacaaggtcgccatcaaaacaattagggaaggggcaatgagtgaggaggacttcattgaagaggccgaggtgatgatgaagctgtctcaccccaagctggtgcagctttacggtgtctgtttagagcaggctcccatctgtctcgtgttcgagttcatggagcacggctgccttagtgactatttgcgtacccaaagggggttgtttgctgcagagactcttcttgggatgtgtctcgacgtgtgcgaagggatggcctatctggaagaagcctgcgtgatacacagagatctagccgcacgaaattgtctggttggcgaaaatcaggtgattaaggtatcagactttggcatgactcgctttgttcttgacgaccagtatacatctagcactggcactaagtttccagtgaaatgggcaagtcctgaagtcttctctttttcacgctactcttctaaaagcgatgtctggtcgttcggggtgctgatgtgggaagtgttctctgaggggaagatcccatatgagaataggtccaattcagaggttgtggaagacatcagtacgggcttccgcctctataaacctaggctggccagcacccacgtgtatcagattatgaaccactgctggaaagagcggcctgaggacagaccggcgttctctagattgttacgccagctggccgagatcgcagaaagcggattgtag

SEQ ID NO: 157239 - DNA, 1863 bp, Artificial Sequence
  derived and/or modified sequence
atgaacaactttattttgcttgaagagcagctcatcaaaaagagtcaacagaagaggcgaacaagcccaagtaattttaaggtgagattcttcgtgctcactaaggctagcctcgcctactttgaagacagacatgggaaaaaacgcactctcaaggggtccatcgaactcagccggataaaatgtgtcgagatcgtcaagagtgatataagcattccctgtcactacaagtaccctttccaggtggtccacgataattacttgctatatgtcttcgctcctgatagggagtctcggcagcgctgggttctggcgctgaaagaggaaaccaggaacaataactccttggttcccaagtatcacccgaatttctggatggacgggaaatggcgctgttgctctcaacttgagaaactagcgaccggttgcgctcaatatgatcccaccaaaaacgcctcgaaaaagcccctcccacccacaccagaggataatcgccgacccttgtgggaacctgaggagacagtggtcattgcactatatgattatcagacaaacgacccgcaagagctggcccttagacgaaacgaagagtactgtttgctggattccagcgaaattcattggtggagagttcaggatcgaaacggacatgagggctatgtaccttccagctatctcgtggaaaaaagccctaataatcttgagacctacgagtggtataataagagcattagcagggataaggctgagaagctgctcctggatacaggaaaggagggcgctttcatggtacgagatagcaggaccgcgggaacctatactgtcagtgtctttaccaaggccgttgtgtccgagaacaatccttgcataaaacattaccacatcaaggagactaatgataacccgaaacgctattacgtcgctgaaaagtacgtctttgatagcattccgctcctgatcaactatcatcagcacaacggtggcggactcgtcacacgacttaggtatccagtgtgcttcggcagacagaaggctccggtgacagccggactcaggtacggtaaatgggtcatagacccgagtgagctcactttcgttcaggagattggcagtggccagtttggcctggtgcacctcggatattggctgaacaaggataaagtggctattaaaaccattcgtgagggcgctatgtccgaggaagacttcatcgaggaagccgaggtgatgatgaagcttagccatccaaaacttgtccaattatacggcgtctgcctcgagcaggctcccatctgcttagtttttgaattcatggagcacgggtgcctatcagattatctgcgtactcagaggggcctgtttgccgcagagacactactgggaatgtgtctagatgtgtgcgaaggcatggcatacttggaggaggcctgcgtgatccatcgagaccttgctgcacgaaactgtctcgtaggggagaaccaggtgataaaggtgtcggacttcggtatgactcgcttcgtgttggatgatcagtacacaagttccaccggcacaaagtttccggtgaaatgggcatcgcccgaggtgttcagcttctcaagatattcatcaaagagtgacgtgtggtcattcggcgtcttgatgtgggaagtcttctccgagggtaagatcccttacgaaaataggagcaattctgaggtggtggaagacatttctacaggctttcggttatataagcccagactggcaagcacccacgtgtaccagattatgaatcactgctggaaggagcggcctgaggaccggccagcgttctcaagactgctgcgacagctggccgaaattgcagaatctggattgtag

SEQ ID NO: 157240 - DNA, 1863 bp, Artificial Sequence
  derived and/or modified sequence
atgaacaacttcatcctgctggaggagcagctgatcaagaagagccagcagaagagaagaaccagccccagcaacttcaaggtgagattcttcgtgctgaccaaggccagcctggcctacttcgaggacagacacggcaagaagagaaccctgaagggcagcatcgagctgagcagaatcaagtgcgtggagatcgtgaagagcgacatcagcatcccctgccactacaagtaccccttccaggtggtgcacgacaactacctgctgtacgtgttcgcccccgacagagagagcagacagagatgggtgctggccctgaaggaggagaccagaaacaacaacagcctggtgcccaagtaccaccccaacttctggatggacggcaagtggagatgctgcagccagctggagaagctggccaccggctgcgcccagtacgaccccaccaagaacgccagcaagaagcccctgccccccacccccgaggacaacagaagacccctgtgggagcccgaggagaccgtggtgatcgccctgtacgactaccagaccaacgacccccaggagctggccctgagaagaaacgaggagtactgcctgctggacagcagcgagatccactggtggagagtgcaggacagaaacggccacgagggctacgtgcccagcagctacctggtggagaagagccccaacaacctggagacctacgagtggtacaacaagagcatcagcagagacaaggccgagaagctgctgctggacaccggcaaggagggcgccttcatggtgagagacagcagaaccgccggcacctacaccgtgagcgtgttcaccaaggccgtggtgagcgagaacaacccctgcatcaagcactaccacatcaaggagaccaacgacaaccccaagagatactacgtggccgagaagtacgtgttcgacagcatccccctgctgatcaactaccaccagcacaacggcggcggcctggtgaccagactgagataccccgtgtgcttcggcagacagaaggcccccgtgaccgccggcctgagatacggcaagtgggtgatcgaccccagcgagctgaccttcgtgcaggagatcggcagcggccagttcggcctggtgcacctgggctactggctgaacaaggacaaggtggccatcaagaccatcagagagggcgccatgagcgaggaggacttcatcgaggaggccgaggtgatgatgaagctgagccaccccaagctggtgcagctgtacggcgtgtgcctggagcaggcccccatctgcctggtgttcgagttcatggagcacggctgcctgagcgactacctgagaacccagagaggcctgttcgccgccgagaccctgctgggcatgtgcctggacgtgtgcgagggcatggcctacctggaggaggcctgcgtgatccacagagacctggccgccagaaactgcctggtgggcgagaaccaggtgatcaaggtgagcgacttcggcatgaccagattcgtgctggacgaccagtacaccagcagcaccggcaccaagttccccgtgaagtgggccagccccgaggtgttcagcttcagcagatacagcagcaagagcgacgtgtggagcttcggcgtgctgatgtgggaggtgttcagcgagggcaagatcccctacgagaacagaagcaacagcgaggtggtggaggacatcagcaccggcttcagactgtacaagcccagactggccagcacccacgtgtaccagatcatgaaccactgctggaaggagagacccgaggacagacccgccttcagcagactgctgagacagctggccgagatcgccgagagcggcctgtag

SEQ ID NO: 157241 - protein, 597 aa, Artificial Sequence
  derived and/or modified sequence
MAAVQAAEVKVDGSEPKLSKNELKRRLKAEKKVAEKEAKQKELSEKQLSQATAAATNHTTDNGVGPEEESVDPNQYYKIRSQAIHQLKVNGEDPYPHKFHVDISLTDFIQKYSHLQPGDHLTDITLKVAGRIHAKRASGGKLIFYDLRGEGVKLQVMANSRNYKSEEEFIHINNKLRRGDIIGVQGNPGKTKKGELSIIPYEITLLSPCLHMLPHLHFGLKDKETRYRQRYLDLILNDFVRQKFIIRSKIITYIRSFLDELGFLEIETPMMNIIPGGAVAKPFITYHNELDMNLYMRIAPELYHKMLVVGGIDRVYEIGRQFRNEGIDLTHNPEFTTCEFYMAYADYHDLMEITEKMVSGMVKHITGSYKVTYHPDGPEGQAYDVDFTPPFRRINMVEELEKALGMKLPETNLFETEETRKILDDICVAKAVECPPPRTTARLLDKLVGEFLEVTCINPTFICDHPQIMSPLAKWHRSKEGLTERFELFVMKKEICNAYTELNDPMRQRQLFEEQAKAKAAGDDEAMFIDENFCTALEYGLPPTAGWGMGIDRVAMFLTDSNNIKEVLLFPAMKPEDKKENVATTDTLESTTVGTSV

SEQ ID NO: 157242 - DNA, 1794 bp, Artificial Sequence
  derived and/or modified sequence
atggctgccgttcaggctgccgaggtcaaggtggacggctctgagcccaaattgagcaaaaacgagctgaagcgccgcctcaaggccgaaaagaaggtagctgagaaggaggccaaacagaaagagctatctgagaagcagctttcccaagcaacggcggcggccaccaaccatactacggataatggagttggcccggaggaagagtccgtcgatcccaatcaatactacaagattaggtcccaggcaatccatcagttgaaagtgaatggagaggatccgtatcctcacaaatttcatgtggacatctcactgactgactttatccagaagtattcacacctgcagcctggcgaccatctgaccgatataacgttgaaggtggccggacgtatccacgccaagcgggcctctggcggcaagctgattttctacgacttacggggggaaggtgtgaaactgcaggtgatggccaattcacgcaattacaagtctgaagaagagtttattcacattaacaataagctgcgcaggggcgacatcatcggagtacagggtaaccctggcaaaaccaagaaaggagaacttagcatcatcccatatgagatcactttgctgagtccatgccttcacatgctcccgcatttgcactttggacttaaagacaaggagaccaggtaccgacaacgctacctcgacctgatcctgaatgactttgtgcgtcaaaaatttatcatcaggtctaaaatcatcacttatatacgcagtttcttggatgagctgggttttctggaaatcgaaacaccgatgatgaatataattcctggcggtgctgtcgcaaagccttttatcacataccacaatgagctagatatgaatttgtatatgagaatcgcgcctgaactgtaccacaaaatgctggtggttggcggcatagacagggtgtatgagattggacgccagttcagaaacgagggaatcgatcttacccacaatcctgagttcactacatgcgaattttacatggcctacgctgattatcacgatctcatggagataaccgagaagatggtgagcggcatggtgaagcacattacgggaagttacaaggttacatatcatcccgacggtccagaaggacaggcctacgatgtggacttcacacctccattcagaagaattaatatggtcgaggagcttgagaaggccctgggaatgaagctacctgaaactaacctgtttgagacagaagagacgaggaaaatactcgatgacatctgcgtggccaaggccgtggaatgcccccccccccggacaacagccaggctgttagacaaactggtcggtgagttcctggaagtcacttgtattaacccgacatttatctgtgaccacccccagataatgagtccgctcgctaagtggcaccgcagtaaagaggggctcacggaacgcttcgaactgtttgtcatgaaaaaggagatctgtaacgcttatactgagctgaacgacccaatgagacaacgacagctgttcgaggaacaggcaaaagccaaggctgcgggggacgatgaggccatgttcatcgacgaaaacttctgcacagcccttgagtacggcttgccccctactgcagggtggggcatgggaatcgatagagtggctatgttcttaactgactccaataacattaaagaggtcctactgttccctgcaatgaagcctgaggacaaaaaggaaaacgtcgcaactactgataccctggaatctacaactgtggggacaagcgtatag

SEQ ID NO: 157243 - DNA, 1794 bp, Artificial Sequence
  derived and/or modified sequence
atggctgctgtgcaggccgctgaggtgaaggtggatggcagcgagcccaagctgagcaagaatgagctgaagaggcggctgaaggccgagaagaaggtggccgagaaggaggccaagcagaaggagctgtctgagaagcagctgagccaggccacagctgctgccaccaaccacaccacagacaacggggtgggccctgaggaggagagcgtggaccccaaccagtactacaagatccgcagccaggccatccaccagctgaaggtgaatggagaggacccctacccccacaagttccacgtggacatcagcctgacagacttcatccagaagtacagccacctgcagcccggggaccacctgacagacatcaccctgaaggtggccggccgcatccacgccaagagggccagcggcggcaagctgatcttctatgacctgcggggggagggcgtgaagctgcaggtgatggccaacagcaggaactacaagtctgaggaggagttcatccacatcaacaacaagctgcggcggggggacatcatcggcgtgcagggcaaccctgggaagaccaagaagggggagctgagcatcatcccctatgagatcaccctgctgagcccctgcctgcacatgctgccccacctgcacttcggcctgaaggacaaggagacccgctaccggcagcgctacctggacctgatcctgaatgactttgtgcggcagaagttcatcatccgcagcaagatcatcacctacatccgctccttcctggatgagctgggcttcctggagattgagacccccatgatgaacatcatccctggaggagctgtggccaagcccttcatcacctaccacaatgagctggacatgaacctgtacatgagaattgcccctgagctgtaccacaagatgctggtggtgggcggcatcgacagagtgtatgagatcggccggcagttcagaaatgaaggaattgacctgacccacaaccctgagttcaccacctgtgagttctacatggcctatgctgactaccatgacctgatggagatcacagagaagatggtgtctggcatggtgaagcacatcaccggcagctacaaggtgacctaccacccagatggccctgagggccaggcctatgatgtggacttcaccccacccttccgccgcatcaacatggtggaggagctggagaaggccctgggcatgaagctgcctgagaccaacctgtttgaaacagaggagaccaggaagatcctggatgacatctgtgtggccaaggctgtggagtgccccccacccaggaccacagcccggctgctggacaagctggtgggggagttcctggaggtgacctgcatcaaccccaccttcatctgtgaccacccccagatcatgagccccctggccaagtggcacaggagcaaggagggcctgacagaaagatttgagctgtttgtgatgaagaaggagatctgcaatgcctacacagagctgaatgaccccatgaggcagaggcagctgtttgaggagcaggccaaggccaaggctgctggagatgatgaggccatgtttattgatgagaacttctgcacagccctggagtatggcctgcccccaacagctggctggggcatgggcatcgacagagtggccatgttcctgacagacagcaacaacatcaaggaggtgctgctcttccctgccatgaagccagaggacaagaaggaaaatgtggccaccacagacaccctggagagcaccaccgtgggcacctctgtgtag

SEQ ID NO: 157244 - DNA, 2005 bp, Artificial Sequence
  derived and/or modified sequence
gtactatcctccttacttttgggtcgggccctccgggaagatggcggccgtgcaggcggccgaggtgaaagtggatggcagcgagccgaaactgagcaagaatgagctgaagagacgcctgaaagctgagaagaaagtagcagagaaggaggccaaacagaaagagctcagtgagaaacagctaagccaagccactgctgctgccaccaaccacaccactgataatggtgtgggtcctgaggaagagagcgtggacccaaatcaatactacaaaatccgcagtcaagcaattcatcagctgaaggtcaatggggaagacccatacccacacaagttccatgtagacatctcactcactgacttcatccaaaaatatagtcacctgcagcctggggatcacctgactgacatcaccttaaaggtggcaggtaggatccatgccaaaagagcttctgggggaaagctcatcttctatgatcttcgaggagagggggtgaagttgcaagtcatggccaattccagaaattataaatcagaagaagaatttattcatattaataacaaactgcgtcggggagacataattggagttcaggggaatcctggtaaaaccaagaagggtgagctgagcatcattccgtatgagatcacactgctgtctccctgtttgcatatgttacctcatcttcactttggcctcaaagacaaggaaacaaggtatcgccagagatacttggacttgatcctgaatgactttgtgaggcagaaatttatcatccgctctaagatcatcacatatataagaagtttcttagatgagctgggattcctagagattgaaactcccatgatgaacatcatcccagggggagccgtggccaagcctttcatcacttatcacaacgagctggacatgaacttatatatgagaattgctccagaactctatcataagatgcttgtggttggtggcatcgaccgggtttatgaaattggacgccagttccggaatgaggggattgatttgacgcacaatcctgagttcaccacctgtgagttctacatggcctatgcagactatcacgatctcatggaaatcacggagaagatggtttcagggatggtgaagcatattacaggcagttacaaggtcacctaccacccagatggcccagagggccaagcctacgatgttgacttcaccccacccttccggcgaatcaacatggtagaagagcttgagaaagccctggggatgaagctgccagaaacgaacctctttgaaactgaagaaactcgcaaaattcttgatgatatctgtgtggcaaaagctgttgaatgccctccacctcggaccacagccaggctccttgacaagcttgttggggagttcctggaagtgacttgcatcaatcctacattcatctgtgatcacccacagataatgagccctttggctaaatggcaccgctctaaagagggtctgactgagcgctttgagctgtttgtcatgaagaaagagatatgcaatgcgtatactgagctgaatgatcccatgcggcagcggcagctttttgaagaacaggccaaggccaaggctgcaggtgatgatgaggccatgttcatagatgaaaacttctgtactgccctggaatatgggctgccccccacagctggctggggcatgggcattgatcgagtcgccatgtttctcacggactccaacaacatcaaggaagtacttctgtttcctgccatgaaacccgaagacaagaaggagaatgtagcaaccactgatacactggaaagcacaacagttggcacttctgtctagaaaataataattgcaagttgtataactcaggcgtctttgcatttctgcgaaagatcaaggtctgcaagggaattcttgtgtgctgctttccatttgacaccgcagttctgttcagccatcagaagagagacaaggaattaaaaatttctttttaatcctgttaccaaataa

SEQ ID NO: 157245 - DNA, 1794 bp, Artificial Sequence
  derived and/or modified sequence
atggccgccgtgcaggccgccgaggtgaaggtggacggcagcgagcctaagctgtccaaaaacgaactgaaacggaggctaaaggctgagaaaaaagtggcggaaaaggaagccaagcaaaaggaactctctgagaaacaactgtcacaggctacagcagccgcaacaaaccatacaacagacaatggcgtgggcccggaagaggagtctgtagacccaaatcagtactataagattcgtagccaggctatccatcagctcaaggtgaacggagaggacccatacccgcacaagttccacgtcgacatatccctgaccgacttcattcagaaatacagtcacctgcagcctggagaccatctgacagacatcaccttgaaagtggcgggaaggattcacgctaaacgcgctagcggcggcaagcttattttctatgacttgcgcggcgagggagttaagctccaggtaatggcaaatagcagaaactacaaatccgaagaagagtttatccatataaacaacaaactgcggaggggagatatcataggggtccagggcaacccaggcaagacaaagaagggggagctgtccattatcccatacgaaataaccctgctctcaccttgccttcacatgcttccacacctgcacttcggacttaaggataaggagaccagatatcgccaaagatatttggacctgattctcaacgacttcgtgaggcaaaaatttattattcgctccaagattataacttatatccgctcatttctggacgaactaggctttctagaaatcgagacacccatgatgaatatcataccaggaggggctgtggccaagccgttcatcacataccacaacgagttagacatgaacttgtacatgagaatcgctcccgagctataccataaaatgttggtcgtgggagggattgatcgtgtgtatgaaattggcaggcagttccgcaacgaaggcatcgacctcacacacaacccagaatttactacttgcgaattctatatggcttatgctgattaccacgacctaatggaaatcacagaaaagatggtatccggtatggttaaacatattacgggttcatataaggtgacctatcatcctgacggccccgagggacaagcttatgacgtggacttcactccgccgtttaggaggatcaatatggtcgaagagctcgaaaaggcccttggtatgaagttgccagagaccaatctgtttgaaacggaagagacccgtaagatactggacgatatctgcgtggccaaagccgttgaatgtcccccgcccaggacaacagctcggctccttgacaagctcgtgggggaatttctagaagtgacatgcattaatcccacgttcatttgtgaccatcctcagattatgtcccccttggctaagtggcatcggtctaaggaaggacttactgagaggttcgagttgttcgttatgaagaaagagatatgcaacgcctatacagagctgaacgacccaatgcgccagcggcagctgttcgaggagcaggctaaggccaaggctgccggcgatgacgaagcaatgttcattgacgaaaatttctgtaccgccctggagtacgggttgcctcccactgccggttggggaatgggcatagatcgagtcgcaatgttcctgacagatagcaacaatattaaggaggttctcctgtttcctgccatgaagcccgaagacaagaaagaaaatgtagccaccacagacactctcgagtccaccactgtcggcacctcagtgtag

SEQ ID NO: 157246 - DNA, 1794 bp, Artificial Sequence
  derived and/or modified sequence
atggccgcagtgcaagccgcagaagtgaaagttgacggctctgaacctaaactgtctaagaacgagctgaaacgacggcttaaagctgagaaaaaagtcgccgaaaaggaagccaagcagaaagagttaagcgaaaaacagctttctcaggctacagccgctgcgaccaaccacacaactgacaacggcgtcggtcctgaggaggagtctgtggacccgaatcagtactataaaatccgttcacaagccatccaccaactcaaagttaatggcgaagacccatacccccacaaattccacgtggatatatcgctcacagacttcattcagaaatacagccatttgcagccgggtgaccatctcactgacatcactttgaaggttgccggacgcatccacgcgaagcgtgcgtccggagggaaacttattttctacgacctccgcggagaaggcgtgaaacttcaggtgatggctaattcacggaactacaagtcagaggaggaattcattcacatcaataataagcttcggcgaggagacattattggcgttcagggcaaccccggaaaaacgaagaaaggcgagttgagtattatcccctatgagattacactgctctctccatgcctacacatgttacctcacttgcattttgggttgaaggacaaggaaactagataccgtcagagatatctcgatctcatcctgaatgatttcgtgcgccagaagtttatcattagaagcaagatcatcacatacatcaggtcttttctggacgaacttgggtttctggagattgaaacgccaatgatgaatataatacccggaggggcagtggctaaacccttcatcacataccacaatgagctggacatgaatctgtacatgcgcatcgcacctgaattgtatcacaaaatgctagttgttggcggtatcgatcgtgtgtacgaaatcgggagacagttccgcaacgagggcatcgacctcacacacaaccccgagttcacaacctgtgagttctatatggcttatgccgactaccatgacctgatggaaatcacagaaaagatggtatcagggatggtcaaacacatcacggggagctataaggttacctatcaccccgacgggcctgagggccaagcctacgatgtggactttacaccacccttccggagaatcaatatggtagaggaactggagaaagcattggggatgaaactgccagagacgaatctcttcgaaacagaagaaactagaaagatcctggatgacatctgcgtagccaaggcagtggagtgtccaccaccgcgaactacagcacgcttgctcgacaagctagtcggcgagtttctcgaggtgacatgcattaatcctactttcatttgcgaccacccccagataatgtcccctctcgccaagtggcataggtccaaagagggcctcaccgaacgcttcgaactgtttgtaatgaagaaggagatttgcaatgcttacaccgagctaaatgaccctatgcggcagcgacagttgttcgaggagcaggccaaagctaaggccgcaggggatgatgaggctatgtttattgatgagaatttctgtacggcgctagagtatggcctaccacctaccgcgggttgggggatgggaatagatagggtagccatgtttcttacggatagcaataatattaaggaggttctgttgttccccgcaatgaagccagaagataagaaggaaaacgtggcaactacggacactctcgagagcacgaccgtcggtacttcagtgtag

SEQ ID NO: 157247 - DNA, 1794 bp, Artificial Sequence
  derived and/or modified sequence
atggccgccgtgcaggccgccgaggtgaaggtggacggcagcgagcccaagctgagcaagaacgagctgaagagaagactgaaggccgagaagaaggtggccgagaaggaggccaagcagaaggagctgagcgagaagcagctgagccaggccaccgccgccgccaccaaccacaccaccgacaacggcgtgggccccgaggaggagagcgtggaccccaaccagtactacaagatcagaagccaggccatccaccagctgaaggtgaacggcgaggacccctacccccacaagttccacgtggacatcagcctgaccgacttcatccagaagtacagccacctgcagcccggcgaccacctgaccgacatcaccctgaaggtggccggcagaatccacgccaagagagccagcggcggcaagctgatcttctacgacctgagaggcgagggcgtgaagctgcaggtgatggccaacagcagaaactacaagagcgaggaggagttcatccacatcaacaacaagctgagaagaggcgacatcatcggcgtgcagggcaaccccggcaagaccaagaagggcgagctgagcatcatcccctacgagatcaccctgctgagcccctgcctgcacatgctgccccacctgcacttcggcctgaaggacaaggagaccagatacagacagagatacctggacctgatcctgaacgacttcgtgagacagaagttcatcatcagaagcaagatcatcacctacatcagaagcttcctggacgagctgggcttcctggagatcgagacccccatgatgaacatcatccccggcggcgccgtggccaagcccttcatcacctaccacaacgagctggacatgaacctgtacatgagaatcgcccccgagctgtaccacaagatgctggtggtgggcggcatcgacagagtgtacgagatcggcagacagttcagaaacgagggcatcgacctgacccacaaccccgagttcaccacctgcgagttctacatggcctacgccgactaccacgacctgatggagatcaccgagaagatggtgagcggcatggtgaagcacatcaccggcagctacaaggtgacctaccaccccgacggccccgagggccaggcctacgacgtggacttcaccccccccttcagaagaatcaacatggtggaggagctggagaaggccctgggcatgaagctgcccgagaccaacctgttcgagaccgaggagaccagaaagatcctggacgacatctgcgtggccaaggccgtggagtgccccccccccagaaccaccgccagactgctggacaagctggtgggcgagttcctggaggtgacctgcatcaaccccaccttcatctgcgaccacccccagatcatgagccccctggccaagtggcacagaagcaaggagggcctgaccgagagattcgagctgttcgtgatgaagaaggagatctgcaacgcctacaccgagctgaacgaccccatgagacagagacagctgttcgaggagcaggccaaggccaaggccgccggcgacgacgaggccatgttcatcgacgagaacttctgcaccgccctggagtacggcctgccccccaccgccggctggggcatgggcatcgacagagtggccatgttcctgaccgacagcaacaacatcaaggaggtgctgctgttccccgccatgaagcccgaggacaagaaggagaacgtggccaccaccgacaccctggagagcaccaccgtgggcaccagcgtgtag

SEQ ID NO: 157248 - protein, 833 aa, Artificial Sequence
  derived and/or modified sequence
MVPSRRTWNLGATPSLRGLWRVGRAPEPEPGMARPAPAPASPAARPFPHTGPGRLRTGRGKDTPVCGDEDSSARSAARPALAQCRALSVDWAGPGSPHGLYLTLQVEHLKEKLISQAQEVSRLRSELGGTDLEKHRDLLMVENERLRQEMRRCEAELQELRTKPAGPCPGCEHSQESAQLRDKLSQLQLEMAESKGMLSELNLEVQQKTDRLAEVELRLKDCLAEKAQEEERLSRRLRDSHETIASLRAQSPPVKYVIKTVEVESSKTKQALSESQARNQHLQEQVAMQRQVLKEMEQQLQSSHQLTARLRAQIAMYESELERAHGQMLEEMQSLEEDKNRAIEEAFARAQVEMKAVHENLAGVRTNLLTLQPALRTLTNDYNGLKRQVRGFPLLLQEALRSVKAEIGQAIEEVNSNNQELLRKYRRELQLRKKCHNELVRLKGNIRVIARVRPVTKEDGEGPEATNAVTFDADDDSIIHLLHKGKPVSFELDKVFSPQASQQDVFQEVQALVTSCIDGFNVCIFAYGQTGAGKTYTMEGTAENPGINQRALQLLFSEVQEKASDWEYTITVSAAEIYNEVLRDLLGKEPQEKLEIRLCPDGSGQLYVPGLTEFQVQSVDDINKVFEFGHTNRTTEFTNLNEHSSRSHALLIVTVRGVDCSTGLRTTGKLNLVDLAGSERVGKSGAEGSRLREAQHINKSLSALGDVIAALRSRQGHVPFRNSKLTYLLQDSLSGDSKTLMVVQVSPVEKNTSETLYSLKFAERVRSVELGPGLRRAELGSWSSQEHLEWEPACQTPQPSARAHSAPSSGTSSRPGSIRRKLQPSGKSRPLPV

SEQ ID NO: 157249 - DNA, 2502 bp, Artificial Sequence
  derived and/or modified sequence
atggtaccttcgagacgaacttggaatttgggcgcgactccgagtttgaggggactgtggcgtgtgggcagagctcctgagcccgagccgggaatggccaggccagcccccgccccagcctcacctgccgcccgcccctttccccatactggacccgggaggctgagaacaggaaggggaaaggacacccctgtttgcggggatgaggattcttctgcgagatcggcggcccgaccagcacttgcccagtgcagggcattgtctgtcgactgggctggacccgggtctccccatggcctctatcttacactacaggtagagcatcttaaagaaaaactaatctcccaagcccaggaagtatcacggcttcggagcgaattaggcgggaccgatttggaaaagcaccgcgacctcctgatggtggagaacgaaagattgaggcaggaaatgcgcaggtgtgaggcagagttgcaggaattacggactaagcctgctggaccttgccccgggtgtgagcattctcaggaatcagcgcagcttcgtgataaactgtctcagctgcagctggagatggccgaatccaaaggtatgctctccgagctgaatctggaggtgcagcagaagacagaccgcctggcggaggtggaacttagactcaaggattgcctggcagagaaggcacaggaggaggagagactttcccgacggctgcgggactctcacgaaacaattgccagcctcagagctcagagccctcccgtaaagtatgtgataaagacagtggaagttgagtctagtaaaaccaaacaagcgctgtccgagtcacaagcgagaaaccagcatctgcaggagcaagtcgctatgcagcgtcaggtcttgaaggagatggaacagcagctccaaagctctcatcagctgaccgctagactccgggctcaaatagctatgtacgagagtgagctcgaacgcgcgcacggacagatgctcgaggaaatgcaaagtttggaagaggacaagaacagggctatcgaggaggcgttcgccagagcacaagtggaaatgaaggccgtgcatgagaacttagcaggggtcagaaccaacttactgacgttgcaacccgccctcagaaccttgacaaacgactataatggccttaaacgacaggtgcggggattcccattattgctgcaggaagccctgcgaagtgtgaaggctgagattggccaggctattgaagaggttaatagtaacaaccaggaactgttgaggaagtacaggagggagcttcaacttcgtaaaaaatgtcataacgaactcgtgaggctgaagggtaatataagagttattgcgcgggtgagacctgtgactaaagaagatggagaaggacccgaagctaccaacgccgtgacttttgatgctgatgacgactccatcatccacctcctacacaaaggtaaaccagtgtcgtttgaactcgacaaggtgtttagtcctcaagctagccagcaagatgtgttccaggaggtgcaggccctggtgaccagttgtatcgatggtttcaatgtgtgtatctttgcctatggtcaaacaggtgctgggaagacatataccatggaaggcactgcggagaatccaggtattaatcagagagccctacaactgcttttctctgaagttcaggagaaagcctctgactgggagtacactatcactgtgtctgcggcagagatctacaacgaagtcctcagagacctgctgggtaaagaaccgcaggagaaactggagattaggctctgcccggacggatctgggcagctgtacgtgccaggactgacagagtttcaggttcaaagtgtggacgatattaacaaggtctttgagtttgggcacaccaatcggacaaccgagtttactaatttaaacgaacacagctccaggagtcacgccctccttatcgtgaccgtgcgtggcgtagattgttcaactggactgcgtaccactggaaaactcaacctcgtggatctggctggctccgagcgtgtcggcaaatctggtgccgaaggctcccgcctgagggaggcccagcacatcaacaaatctcttagtgctctaggcgatgtgatagcagcactgaggtctaggcagggtcacgtgccttttagaaacagtaagctgacatacctgctgcaggattccctatcaggcgattccaagacgcttatggttgtgcaagtatcaccggtcgagaaaaatacatccgagaccctgtacagtctgaaattcgcagaacgcgtccggtcagtggagctgggacctggacttagaagagccgagcttggcagttggagtagtcaagagcacttagaatgggagccagcttgccaaactccacagccctcagctcgggctcattctgcccccagtagcggaacaagcagtagacccggttccatccggaggaaactccagcccagtggcaagtcacgaccgctgccagtgtag

SEQ ID NO: 157250 - DNA, 3362 bp, Artificial Sequence
  derived and/or modified sequence
gagttaatcatttcctgtggaaagtgtgcgggaggggcgcgagcgggctggccgaggaggaggcggcggcgtggagctgcctcctgccggcgggccgggccgggccgagccccgggcgctgcggcgacgcctggatcctgcctccgccaggccggctgcctggtgccccgaggaggctgctgagccccaggccatggtcccctctcgcaggacgtggaacctgggagccacgccctcgctgcggggcctgtggagagtgggccgggccccggagcccgagccggggatggctcgccccgccccagccccagccagcccggccgcccgccctttcccacacaccggcccggggaggttgagaactgggcgtggaaaagataccccagtctgcggtgacgaggactccagtgcccgaagtgcagctcgcccagccctagctcagtgccgagcccttagcgtggactgggctggccccggaagcccccacgggctctacctgaccctgcaggtagaacacctgaaggagaagctcattagccaggcccaggaagtgagccgactgcgatctgagctggggggcaccgacttggagaagcaccgggacctgctgatggtggagaatgagcgactgaggcaggagatgcggcgctgtgaggccgagctgcaagagctgcgcacaaagccagcaggtccctgcccaggttgtgagcacagccaggagagcgcccagctccgtgacaagctgtcccagctgcagctggagatggcggaaagcaaaggcatgctgtcagagctgaacctagaggtgcagcagaagaccgaccggctggctgaggtggagctgcgactcaaggactgcctggctgagaaggcacaggaggaggagcggcttagtcggcgcctgcgtgacagccacgagaccattgccagcctgcgggcccagtccccacctgtcaagtatgtcatcaagacagtggaggtggagtcgtccaagaccaagcaggccctcagcgagtcccaggcccggaaccagcacctgcaggagcaggtggctatgcagaggcaggtgctgaaggagatggaacagcagctgcagagctcacaccagctgaccgcgcggctccgggcgcagattgccatgtacgagtcagagctggagcgggcccatgggcagatgctggaggagatgcagtccctggaagaggacaagaaccgggccattgaggaggcctttgccagagcccaggtggagatgaaggctgtgcacgagaatctagcaggcgtccggaccaacttgctgaccttgcagccggcactgcggaccctcaccaacgactacaatgggctcaagcggcaggtgcgcggcttcccactgctgctgcaggaggccctcaggagtgtcaaggccgagataggccaggccatcgaggaggtcaacagcaacaaccaggagctgctgcgcaagtaccgccgcgagctgcagctgcgtaagaagtgccacaatgagctcgtgcggctgaaagggaacatccgagtgattgctcgtgtccggccagtcaccaaagaggatggggaaggacctgaggccaccaatgctgtgactttcgatgccgacgacgactccatcatccacctgctgcacaagggcaagcctgtgtccttcgagctggacaaggtcttctccccacaggcctcgcagcaggacgtgttccaggaggtgcaggccctggtcacctcttgcattgatggcttcaatgtctgcatctttgcgtacggccagacgggcgccggcaagacgtacacgatggaggggaccgctgagaacccaggtatcaaccagcgggccctgcagctgctcttctccgaggtgcaggagaaggcgtctgactgggagtacaccatcaccgtcagcgctgcggagatctacaatgaggtcctcagggacctgctagggaaagagcctcaggaaaaactggagatccggctgtgcccagacggcagtgggcagctgtatgtaccagggctgactgagttccaagtgcagagcgtggacgacatcaacaaggtgtttgagtttggccacactaatcgcacgaccgagttcaccaacctgaacgagcacagctcccgctcgcacgcgctgctcatcgtgacggtgcgaggcgtggactgcagcacaggcctccgcaccacggggaagctgaacctggtggacttggctggctcggagcgcgtgggcaagtcgggggccgagggcagccgcctgcgggaggcgcagcacatcaacaagtcgctgtcggctctgggggacgtcattgctgccctgcgctcccgccagggccacgtgcccttccgcaactccaagctcacctacctgctgcaggattcgcttagtggtgacagcaagaccctcatggtggtacaggtgtcccccgtggagaagaacactagcgagacgctctattccctcaagtttgctgagagggtgcgctctgtggagctggggcctgggctacgcagggcagagcttgggtcctggtcaagccaggagcatctagagtgggagccggcttgtcagacgccacagccctcggcacgggcccactcagcccccagctctgggaccagtagccgccctggatccatccggaggaagctgcagccctcggggaagtcgcggccactgcctgtgtgacggatgtgaccccgctgggcctgaagctgggccctcactggcctgtccctgctgcagcgccaggacccccggaggtagaggcgagagtggaggctcttcttctgccccgtctcccctcaaagatgagaaacatgttcagaaggaaacggtgtctctcggctgtggctctgagtgcaaattgcatgggcggaaaggcgggggtggctgctcttcctggcaggcctgggccatcagcgaactgggccccgtgaggagggcgggagtgtggaggagggtgggcctctcacccaggctttctcggcccctctcctcagcttgcagagctggccagccccctccttagggggtgggcgaggagcctctgggcagacccaagaaccatggggactggggtgggttggtggcaccaatggcagccctccccgcccctctccttcaaggagggttcccgcagctggggggtgtgcggaggcgcatggcctcccgccacggggccgtgctgtgtttatggctggcagaggcagccagcgggtgggggattctgctgctcgctcacctgcctggctcgctggtctctcgaattttcttccctctgaaatcctatttaagaacttttggaagcttagccatttttacttattaaaataaaagaagcctttttacacaa

SEQ ID NO: 157251 - DNA, 2502 bp, Artificial Sequence
  derived and/or modified sequence
atggtgcccagcaggaggacctggaacctgggcgccacccccagcctgcggggcctgtggagggtgggccgggcccctgagcctgagcccggcatggcccggcctgccccagccccagccagccctgctgcccggcccttcccccacacaggccctggccgcctgaggacaggccggggcaaggacacccctgtgtgtggagatgaggacagcagcgcccggtctgctgcccggcctgccctggcccagtgccgggccctgtctgtggactgggccggccctggcagcccccacggcctgtacctgaccctgcaggtggagcacctgaaggagaagctgatcagccaggcccaggaggtgtcccggctgcggtctgagctgggcggcacagacctggagaagcaccgggacctgctgatggtggagaatgaaaggctgcggcaggagatgagaagatgtgaggccgagctgcaggagctgcggaccaagccagctggcccctgccccggctgtgagcacagccaggagagcgcccagctgcgggacaagctgagccagctgcagctggagatggccgagagcaagggcatgctgtctgagctgaacctggaggtgcagcagaagacagaccggctggccgaggtggagctgcggctgaaggactgcctggccgagaaggcccaggaggaggagcggctgagccggcggctgcgggacagccatgagaccatcgccagcctgcgggcccagagcccccctgtgaagtatgtgatcaagacagtggaggtggagagcagcaagaccaagcaggccctgtctgagagccaggccaggaaccagcacctgcaggagcaggtggccatgcagaggcaggtgctgaaggagatggagcagcagctgcagagcagccaccagctgacagcccggctgcgggcccagatcgccatgtatgaaagtgagctggagcgggcccacggccagatgctggaggagatgcagagcctggaggaggacaagaacagagccatcgaggaggcctttgcccgggcccaggtggagatgaaggctgtgcatgagaacctggccggcgtgaggaccaacctgctgaccctgcagcctgccctgcggaccctgaccaatgactacaacggcctgaagaggcaggtgcggggcttccccctgctgctgcaggaggccctgcggtctgtgaaggccgagatcggccaggccatcgaggaggtgaacagcaacaaccaggagctgctgaggaagtaccgccgggagctgcagctgaggaagaagtgccacaatgagctggtgcggctgaagggcaacatccgggtgattgcccgggtgcggcctgtgaccaaggaggatggagagggccctgaggccaccaatgctgtgacctttgatgctgatgatgacagcatcatccacctgctgcacaagggcaagcctgtgtcctttgagctggacaaggtgttcagcccccaggccagccagcaggatgtgttccaggaggtgcaggccctggtgaccagctgcattgatggcttcaacgtgtgcatctttgcctacggccagacaggagctgggaagacctacaccatggagggcacagcagaaaatcctggcatcaaccagagggccctgcagctgctcttcagcgaggtgcaggagaaggccagtgactgggagtacaccatcaccgtgtctgctgctgagatctacaatgaggtgctgcgggacctgctgggcaaggagccccaggagaagctggagatccggctgtgcccagatggcagcggccagctgtatgtgcccggcctgacagagttccaggtgcagagcgtggatgacatcaacaaggtgtttgaatttggccacaccaacagaaccacagagttcaccaacctgaatgagcacagcagccgcagccacgccctgctgattgtgacagtgcggggcgtggactgcagcacaggcctgcggaccaccgggaagctgaacctggtggacctggccggcagcgagcgggtgggcaagagcggggctgagggcagccggctgcgggaggcccagcacatcaacaagagcctgagcgccctgggagatgtgattgctgccctgcggagccggcagggccacgtgcccttcaggaacagcaagctgacctacctgctgcaggacagcctgagcggggacagcaagaccctgatggtggtgcaggtgtcccctgtggagaagaacaccagcgagaccctgtacagcctgaagtttgctgagcgggtgcgctctgtggagctgggccctggcctgcggcgggcagagctgggctcctggagcagccaggagcacctggagtgggagcccgcctgccagaccccccagcccagcgcccgggcccacagcgcccccagcagcggcaccagcagcaggcctggcagcatccggaggaagctgcagcccagcggcaagagccggcccctgcctgtgtag

SEQ ID NO: 157252 - DNA, 2502 bp, Artificial Sequence
  derived and/or modified sequence
atggtgcccagccggcggacctggaacctgggcgccacccccagcctgcggggtctgtggagggtggggagggcaccggagcctgaaccaggaatggcccgccccgctcctgccccggcgtctcccgccgctcgcccttttcctcatacaggtcctggcagattgcgaaccggaaggggcaaggatacccctgtatgcggagacgaggacagctcagccaggtcagccgcacggcctgccttagcacaatgtagggccctcagcgtcgactgggcagggcctggctccccacatggactgtacctgaccctccaggttgagcaccttaaagaaaagctcattagccaagcccaagaggtcagccgcctgcgttcggaacttggcggcacagatttagaaaaacaccgggatttgctgatggtggagaacgaaaggttacgccaggagatgagaagatgcgaagctgaactacaagagttgcggactaaacctgctggcccttgccccggctgtgaacattcccaggagtccgcacagctgcgcgataaactgagccaacttcagttggaaatggcggagagtaaggggatgttaagtgagctgaatttagaagtacaacaaaaaacggatcgcctcgcagaagttgaactccggttgaaggactgcctcgcagaaaaagcccaggaagaggagaggctcagccgccggcttagagacagccatgagactatagcgagtctgcgtgcacagtcccccccagtaaagtacgtgattaaaactgtcgaagttgagtcttctaagacaaaacaggcgctgtctgaatctcaggcaaggaaccagcacctacaagaacaggtggccatgcagcggcaagtgcttaaagagatggagcagcagctgcaaagttcacaccagcttactgcccgcctccgggcacagattgctatgtacgaaagtgaactcgagagagcccacggccagatgctggaggagatgcagagccttgaagaagacaaaaatagagccattgaagaagctttcgctcgggcgcaggtggagatgaaggcagtacatgagaatctggctggagttagaaccaatctgcttacgttacagccggcacttagaactctgacaaacgactataacgggctgaaacgacaggtccggggatttcccctgttgctgcaggaggccctgcgctctgtgaaggccgagattggtcaggctatcgaagaggtgaattctaacaaccaggagctgctccggaaatatcgcagggaactccaactgaggaaaaaatgccataacgaacttgtccggctgaaaggtaacataagggtgatcgctagagtgaggccagtgaccaaggaagatggtgagggccctgaggcaacaaacgcagtgactttcgatgcagatgatgattctattattcatctgctgcataagggtaaacccgtctcgttcgagcttgacaaagtgttcagcccacaggctagtcagcaggacgtattccaggaagtacaggccctggtcacctcatgcatcgatggatttaacgtgtgtatctttgcgtacggacaaaccggtgccggcaaaacttatactatggagggaacggctgaaaatccgggcatcaaccaacgagcactgcagctgctgttttccgaagtgcaggagaaggcgagtgattgggaatataccatcaccgtatcagcagcagaaatctataacgaggtcttgcgggacctgttgggcaaagagcctcaggaaaagttggaaataagactgtgtccggacggcagtgggcagctctacgtacctggattaacagagtttcaggtgcagagcgttgacgacataaataaggtgttcgagttcggacacacgaatcggactactgaattcaccaacttaaatgagcactcatctcgttctcacgccctccttattgttacagtacgtggcgttgattgcagcactgggctcagaacaacgggaaagctgaatttagtggatttagcgggttcagaaagagtgggaaagtctggagctgaaggatcccgcctacgcgaggctcagcacattaataaatcgttgagcgccttgggagatgttattgcggcgctacgctctagacaaggccacgtgcctttcaggaactcaaagctgacctatctgctccaggattctctttcgggagacagcaaaaccctgatggtcgtgcaggtttcccctgtcgagaagaacacctccgagactttgtactcactgaaattcgctgagcgcgttagatcagtggaactagggcccggtctgcggagagccgagctgggctcctggtctagtcaggagcatttagagtgggaacctgcctgtcaaacgccacaaccttctgcccgtgcccatagcgcccccagcagcggtacctcttcccggccggggtcaatcaggcgcaagttgcagccaagtggcaaatctcggccattaccagtctag

SEQ ID NO: 157253 - DNA, 2502 bp, Artificial Sequence
  derived and/or modified sequence
atggttccttcacgcaggacttggaatttgggtgccacccccagcttgcgcggactgtggagagtgggtagggcaccggaacccgaaccaggtatggccagacccgctccagcgcctgcctctcccgcagcccgtccatttccccataccggtccgggacggctgagaacaggccgtggcaaggatacccctgtgtgcggagacgaagacagctcggcgcgttctgccgctcgacctgccctggcacaatgtcgtgccctttctgtcgactgggcaggccctggaagcccccacggactgtacttaaccctgcaggtcgagcaccttaaagaaaaactaatatctcaggcccaggaggtaagccgtctacgatccgagttgggaggtacagatctggaaaaacacagagacttgctgatggtggagaacgagcggttgcgccaggaaatgcggagatgtgaagccgagctccaagagttgcggactaaaccagcgggtccgtgtccagggtgtgaacattcgcaagagtccgcccagctccgggacaagttaagtcaactccagctcgagatggcagagtccaagggcatgttgtctgagctaaacctcgaagtgcaacagaagaccgatagactggcagaggtcgagctcaggttgaaggactgtttagctgagaaagctcaagaagaagagcggctctctcgtcggctgcgtgatagccacgagacaatcgcctctctacgggcacagagcccacccgttaagtacgtgatcaaaaccgttgaggtcgagagctctaaaactaagcaggccctttctgagagccaggctcggaatcaacacttacaagaacaagtggccatgcaacgccaggtcctgaaggaaatggaacagcagcttcaaagctcacaccagctgacggccaggctgcgcgctcagattgccatgtatgaatctgagctggagcgcgctcatggacagatgctggaagagatgcagagcctggaagaagataagaatcgcgcaatcgaagaggcattcgcacgagcccaggtagaaatgaaggcagtacacgagaacctcgccggagtgcgtacgaacctattgactttgcagcctgctttgcgtaccctcaccaatgattacaacggtctcaagagacaagtacgtggtttccctctcctgctgcaggaagccctccggtctgttaaggccgagatagggcaggccattgaagaggtaaacagcaataaccaagagctactgcgcaaatacaggagggaacttcagttgcgtaagaagtgccacaacgagttggtccggctgaaagggaacattcgagtgatagcgcgagtgaggccagttacaaaggaggacggagagggacccgaagcaacaaatgctgtgacatttgacgcggatgatgattcaattatccatctgctgcataaggggaaaccagtaagcttcgagctcgacaaggtgttctcgccccaagccagccaacaggacgtgttccaggaggtgcaggcactggtgacctcgtgcatcgacggtttcaacgtgtgtatctttgcctacggccagacaggcgctgggaagacatacacgatggaaggcaccgcggaaaaccctggcatcaatcagcgcgcactccagcttcttttcagtgaagtccaggagaaagctagcgattgggaatacacaatcacggttagtgccgctgagatttataatgaggtgctgagagatctcctgggcaaagagccacaagaaaaacttgagatccggctgtgcccagacgggagtggccaactgtacgttcccggactgacagagtttcaagttcagtctgttgatgacatcaataaggtgttcgaatttggccacacaaatcgcaccaccgagttcacaaatctcaatgagcacagctctcggagccatgccctgctgatcgtgacggttcggggtgtcgactgtagcaccggattaaggaccacgggcaagctgaatctagtagatcttgccggaagcgaacgggtcggaaaaagtggggcagaaggttcccggctgagagaagcccaacatattaataaatctctctccgccctgggggatgtcatcgccgctctgagaagtagacaagggcacgtcccttttagaaattccaagctgacctacctgctgcaggactccctgagtggagactccaaaacattgatggtcgttcaagtgtctcctgtggagaaaaacacaagcgaaacattgtacagtctcaaattcgcagaacgggtgagatcagtggagttaggccctggtctgcgcagggccgagctcggatcttggagttcacaggagcaccttgagtgggagcccgcttgtcagacacctcagccaagcgctcgcgctcacagcgctccaagtagtggcacgtcttcccggccaggcagcatccgtcggaaattgcagccatctgggaaatctaggccactgccagtgtag

SEQ ID NO: 157254 - DNA, 2502 bp, Artificial Sequence
  derived and/or modified sequence
atggtgcccagcagaagaacctggaacctgggcgccacccccagcctgagaggcctgtggagagtgggcagagcccccgagcccgagcccggcatggccagacccgcccccgcccccgccagccccgccgccagacccttcccccacaccggccccggcagactgagaaccggcagaggcaaggacacccccgtgtgcggcgacgaggacagcagcgccagaagcgccgccagacccgccctggcccagtgcagagccctgagcgtggactgggccggccccggcagcccccacggcctgtacctgaccctgcaggtggagcacctgaaggagaagctgatcagccaggcccaggaggtgagcagactgagaagcgagctgggcggcaccgacctggagaagcacagagacctgctgatggtggagaacgagagactgagacaggagatgagaagatgcgaggccgagctgcaggagctgagaaccaagcccgccggcccctgccccggctgcgagcacagccaggagagcgcccagctgagagacaagctgagccagctgcagctggagatggccgagagcaagggcatgctgagcgagctgaacctggaggtgcagcagaagaccgacagactggccgaggtggagctgagactgaaggactgcctggccgagaaggcccaggaggaggagagactgagcagaagactgagagacagccacgagaccatcgccagcctgagagcccagagcccccccgtgaagtacgtgatcaagaccgtggaggtggagagcagcaagaccaagcaggccctgagcgagagccaggccagaaaccagcacctgcaggagcaggtggccatgcagagacaggtgctgaaggagatggagcagcagctgcagagcagccaccagctgaccgccagactgagagcccagatcgccatgtacgagagcgagctggagagagcccacggccagatgctggaggagatgcagagcctggaggaggacaagaacagagccatcgaggaggccttcgccagagcccaggtggagatgaaggccgtgcacgagaacctggccggcgtgagaaccaacctgctgaccctgcagcccgccctgagaaccctgaccaacgactacaacggcctgaagagacaggtgagaggcttccccctgctgctgcaggaggccctgagaagcgtgaaggccgagatcggccaggccatcgaggaggtgaacagcaacaaccaggagctgctgagaaagtacagaagagagctgcagctgagaaagaagtgccacaacgagctggtgagactgaagggcaacatcagagtgatcgccagagtgagacccgtgaccaaggaggacggcgagggccccgaggccaccaacgccgtgaccttcgacgccgacgacgacagcatcatccacctgctgcacaagggcaagcccgtgagcttcgagctggacaaggtgttcagcccccaggccagccagcaggacgtgttccaggaggtgcaggccctggtgaccagctgcatcgacggcttcaacgtgtgcatcttcgcctacggccagaccggcgccggcaagacctacaccatggagggcaccgccgagaaccccggcatcaaccagagagccctgcagctgctgttcagcgaggtgcaggagaaggccagcgactgggagtacaccatcaccgtgagcgccgccgagatctacaacgaggtgctgagagacctgctgggcaaggagccccaggagaagctggagatcagactgtgccccgacggcagcggccagctgtacgtgcccggcctgaccgagttccaggtgcagagcgtggacgacatcaacaaggtgttcgagttcggccacaccaacagaaccaccgagttcaccaacctgaacgagcacagcagcagaagccacgccctgctgatcgtgaccgtgagaggcgtggactgcagcaccggcctgagaaccaccggcaagctgaacctggtggacctggccggcagcgagagagtgggcaagagcggcgccgagggcagcagactgagagaggcccagcacatcaacaagagcctgagcgccctgggcgacgtgatcgccgccctgagaagcagacagggccacgtgcccttcagaaacagcaagctgacctacctgctgcaggacagcctgagcggcgacagcaagaccctgatggtggtgcaggtgagccccgtggagaagaacaccagcgagaccctgtacagcctgaagttcgccgagagagtgagaagcgtggagctgggccccggcctgagaagagccgagctgggcagctggagcagccaggagcacctggagtgggagcccgcctgccagaccccccagcccagcgccagagcccacagcgcccccagcagcggcaccagcagcagacccggcagcatcagaagaaagctgcagcccagcggcaagagcagacccctgcccgtgtag

SEQ ID NO: 157255 - protein, 261 aa, Artificial Sequence
  derived and/or modified sequence
MWDLVLSIALSVGCTGAVPLIQSRIVGGWECEKHSQPWQVAVYSHGWAHCGGVLVHPQWVLTAAHCLKKNSQVWLGRHNLFEPEDTGQRVPVSHSFPHPLYNMSLLKHQSLRPDEDSSHDLMLLRLSEPAKITDVVKVLGLPTQEPALGTTCYASGWGSIEPEEFLRPRSLQCVSLHLLSNDMCARAYSEKVTEFMLCAGLWTGGKDTCGGDSGGPLVCNGVLQGITSWGPEPCALPEKPAVYTKVVHYRKWIKDTIAANP

SEQ ID NO: 157256 - DNA, 786 bp, Artificial Sequence
  derived and/or modified sequence
atgtgggatctcgtcttgtctatcgctttgtcagtgggttgcacaggtgcagttccactgatccaaagcagaatcgtgggcgggtgggaatgcgaaaagcactcacagccttggcaggtagcagtgtacagccacggatgggctcattgcggtggcgtcctggtgcacccccagtgggtgctcaccgccgctcactgcctcaagaagaacagccaggtgtggctgggccggcacaatctattcgagccagaagatacgggccaacgggttcccgtcagccacagctttccccaccccctctacaacatgagcttgcttaagcatcagtctctccgcccagacgaggacagctcacatgatctgatgctgctcagactgtccgaacctgcaaagattaccgacgtggtgaaggtcctgggcctccccacccaggaaccagccctgggtacgacatgctatgcgagcgggtggggctcaatcgaacccgaggaattcctgcgacctaggtctcttcaatgcgtgtccttacatctgctgagcaacgacatgtgcgcacgcgcatactccgagaaagtgaccgaatttatgctgtgcgccggcctgtggacgggcggcaaagatacctgtgggggcgacagtggcggcccactggtatgtaacggtgtacttcagggaatcacctcctggggtccggaaccatgcgccctgccagagaagccagctgtatacacaaaggtcgtgcattacagaaagtggattaaagataccattgccgcaaacccttag

SEQ ID NO: 157257 - DNA, 2834 bp, Artificial Sequence
  derived and/or modified sequence
agccccaaactcaccacctggccgtggacacctgtgtcagcatgtgggacctggttctctccatcgccttgtctgtggggtgcactggtgccgtgcccctcatccagtctcggattgtgggaggctgggagtgtgagaagcattcccaaccctggcaggtggctgtgtacagtcatggatgggcacactgtgggggtgtcctggtgcacccccagtgggtgctcacagctgcccattgcctaaagaagaatagccaggtctggctgggtcggcacaacctgtttgagcctgaagacacaggccagagggtccctgtcagccacagcttcccacacccgctctacaatatgagccttctgaagcatcaaagccttagaccagatgaagactccagccatgacctcatgctgctccgcctgtcagagcctgccaagatcacagatgttgtgaaggtcctgggcctgcccacccaggagccagcactggggaccacctgctacgcctcaggctggggcagcatcgaaccagaggagttcttgcgccccaggagtcttcagtgtgtgagcctccatctcctgtccaatgacatgtgtgctagagcttactctgagaaggtgacagagttcatgttgtgtgctgggctctggacaggtggtaaagacacttgtgggggtgattctgggggtccacttgtctgtaatggtgtgcttcaaggtatcacatcatggggccctgagccatgtgccctgcctgaaaagcctgctgtgtacaccaaggtggtgcattaccggaagtggatcaaggacaccatcgcagccaacccctgagtgcccctgtcccacccctacctctagtaaatttaagtccacctcacgttctggcatcacttggcctttctggatgctggacacctgaagcttggaactcacctggccgaagctcgagcctcctgagtcctactgacctgtgctttctggtgtggagtccagggctgctaggaaaaggaatgggcagacacaggtgtatgccaatgtttctgaaatgggtataatttcgtcctctccttcggaacactggctgtctctgaagacttctcgctcagtttcagtgaggacacacacaaagacgtgggtgaccatgttgtttgtggggtgcagagatgggaggggtggggcccaccctggaagagtggacagtgacacaaggtggacactctctacagatcactgaggataagctggagccacaatgcatgaggcacacacacagcaaggatgacgctgtaaacatagcccacgctgtcctgggggcactgggaagcctagataaggccgtgagcagaaagaaggggaggatcctcctatgttgttgaaggagggactagggggagaaactgaaagctgattaattacaggaggtttgttcaggtcccccaaaccaccgtcagatttgatgatttcctagcaggacttacagaaataaagagctatcatgctgtggtttattatggtttgttacattgataggatacatactgaaatcagcaaacaaaacagatgtatagattagagtgtggagaaaacagaggaaaacttgcagttacgaagactggcaacttggctttactaagttttcagactggcaggaagtcaaacctattaggctgaggaccttgtggagtgtagctgatccagctgatagaggaactagccaggtgggggcctttccctttggatggggggcatatctgacagttattctctccaagtggagacttacggacagcatataattctccctgcaaggatgtatgataatatgtacaaagtaattccaactgaggaagctcacctgatccttagtgtccagggtttttactgggggtctgtaggacgagtatggagtacttgaataattgacctgaagtcctcagacctgaggttccctagagttcaaacagatacagcatggtccagagtcccagatgtacaaaaacagggattcatcacaaatcccatctttagcatgaagggtctggcatggcccaaggccccaagtatatcaaggcacttgggcagaacatgccaaggaatcaaatgtcatctcccaggagttattcaagggtgagccctttacttgggatgtacaggctttgagcagtgcagggctgctgagtcaaccttttattgtacaggggatgagggaaagggagaggatgaggaagcccccctggggatttggtttggtcttgtgatcaggtggtctatggggctatccctacaaagaagaatccagaaataggggcacattgaggaatgatactgagcccaaagagcattcaatcattgttttatttgccttcttttcacaccattggtgagggagggattaccaccctggggttatgaagatggttgaacaccccacacatagcaccggagatatgagatcaacagtttcttagccatagagattcacagcccagagcaggaggacgctgcacaccatgcaggatgacatgggggatgcgctcgggattggtgtgaagaagcaaggactgttagaggcaggctttatagtaacaagacggtggggcaaactctgatttccgtgggggaatgtcatggtcttgctttactaagttttgagactggcaggtagtgaaactcattaggctgagaaccttgtggaatgcagctgacccagctgatagaggaagtagccaggtgggagcctttcccagtgggtgtgggacatatctggcaagattttgtggcactcctggttacagatactggggcagcaaataaaactgaatcttgttttcagacctt

SEQ ID NO: 157258 - DNA, 892 bp, Artificial Sequence
  derived and/or modified sequence
aaactcaccacctggccgtggacacctgtgtcagcatgtgggacctggttctctccatcgccttgtctgtggggtgcactggaatagccaggtctggctgggtcggcacaacctgtttgagcctgaagacacaggccagagggtccctgtcagccacagcttcccacacccgctctacaatatgagccttctgaagcatcaaagccttagaccagatgaagactccagccatgacctcatgctgctccgcctgtcagagcctgccaagatcacagatgttgtgaaggtcctgggcctgcccacccaggagccagcactggggaccacctgctacgcctcaggctggggcagcatcgaaccagaggagttcttgcgccccaggagtcttcagtgtgtgagcctccatctcctgtccaatgacatgtgtgctagagcttactctgagaaggtgacagagttcatgttgtgtgctgggctctggacaggtggtaaagacacttgtgggggtgattctgggggtccacttgtctgtaatggtgtgcttcaaggtatcacatcatggggccctgagccatgtgccctgcctgaaaagcctgctgtgtacaccaaggtggtgcattaccggaagtggatcaaggacaccatcgcagccaacccctgagtgcccctgtcccacccctacctctagtaaatttaagtccacctcacgttctggcatcacttggcctttctggatgctggacacctgaagcttggaactcacctggccgaagctcgagcctcctgagtcctactgacctgtgctttctggtgtggagtccagggctgctaggaaaaggaatgggcagacacaggtgtatgccaatgtttctgaaatgggtataatttcgtc

SEQ ID NO: 157259 - DNA, 786 bp, Artificial Sequence
  derived and/or modified sequence
atgtgggacctggtgctgagcatcgccctgtctgtgggctgcacaggagctgtgcccctcatccagagcagaattgtgggcggctgggagtgtgagaagcacagccagccctggcaggtggccgtgtacagccacggctgggcccactgcggcggcgtgctggtgcacccccagtgggtgctgacagctgcccactgcctgaagaagaacagccaggtgtggctgggccgccacaacctgtttgagcctgaggacaccggccagagggtgcctgtgagccacagcttcccccaccccctgtacaacatgagcctgctgaagcaccagagcctgcggccagatgaggacagcagccatgacctgatgctgctgcggctgtctgagcccgccaagatcacagatgtggtgaaggtgctgggcctgcccacccaggagcccgccctgggcaccacctgctacgccagcggctggggcagcattgagcctgaggagttcctgcggcccaggagcctgcagtgtgtgtccctgcacctgctgagcaatgacatgtgtgcccgggcctacagcgagaaggtgacagagttcatgctgtgtgccggcctgtggacaggaggcaaggacacctgtggcggggacagcggcggccccctggtgtgcaatggagtgctgcagggcatcacctcctggggccctgagccctgtgccctgcctgagaagccagctgtgtacaccaaggtggtgcactacaggaagtggatcaaggacaccatcgccgccaacccctag

SEQ ID NO: 157260 - DNA, 786 bp, Artificial Sequence
  derived and/or modified sequence
atgtgggacctggtgctgagcatcgccctgagcgtgggctgcaccggcgccgtacctcttatccagagccgcatcgtaggcggctgggagtgcgaaaagcactctcagccttggcaggttgccgtttatagccacggctgggcacactgtgggggtgtgttggtacacccccaatgggtcctgacggccgctcattgcctaaagaaaaacagtcaggtctggctcgggcgccacaatttgttcgaacccgaggataccggacaacgggtgccagtgtcccactcattccctcatcccctctacaacatgagtctgttaaagcaccaatccctcagacccgacgaagacagctcccacgatctaatgctcctgcgcctgtccgaaccagctaagataactgacgtcgttaaagtactgggcctccccacgcaggagccagcactgggaaccacctgctacgctagtggttggggtagtatcgagcccgaggaatttttgcgaccaagatcgctgcagtgcgtctcactgcatttactaagtaatgacatgtgcgctcgagcttacagcgaaaaagtgacggagttcatgttgtgtgccgggctgtggaccggcggcaaggacacttgcgggggggattcaggtgggcccctggtgtgtaacggcgtactacagggaattacctcttggggcccggagccttgcgccttaccagagaaacctgccgtgtataccaaggtggtccactataggaagtggatcaaagatacaattgcagccaacccttag

SEQ ID NO: 157261 - DNA, 786 bp, Artificial Sequence
  derived and/or modified sequence
atgtgggatctcgtactgagtatcgctctgagtgtgggatgcacaggcgcagtgcctcttatccaatctcgcatcgtcggcggttgggaatgcgagaaacattctcagccttggcaagtcgcggtatactcacacggatgggcccactgtgggggtgtcctagtgcacccacagtgggtgctcaccgcagcccactgcctgaagaaaaattcccaggtgtggttggggaggcacaacctgtttgaacctgaagatacaggacagcgtgtgcctgtgagtcacagcttcccccatcctctgtataatatgtccctactcaaacaccagtcattgcgccctgatgaagactctagccacgatctgatgctcctcaggctgtccgaaccagcaaagattacagatgtggtgaaggttttagggctgccaacccaggaaccagcccttggtaccacttgttacgcctctggttggggttctattgaaccggaggaatttctgcgcccacgatcactgcagtgcgtgtcactgcatctgctgagcaatgatatgtgcgccagggcctatagcgagaaggtgacagagtttatgctttgtgccggtctttggaccgggggtaaagatacctgcgggggagacagtggcggtcctctggtatgtaatggcgtgctccagggaattacctcatggggacccgaaccgtgcgcccttccagagaagcccgcagtctacaccaaagttgtgcactacagaaagtggataaaagatacgatcgctgcaaatccatag

SEQ ID NO: 157262 - DNA, 786 bp, Artificial Sequence
  derived and/or modified sequence
atgtgggacctggtgctgagcatcgccctgagcgtgggctgcaccggcgccgtgcccctgatccagagcagaatcgtgggcggctgggagtgcgagaagcacagccagccctggcaggtggccgtgtacagccacggctgggcccactgcggcggcgtgctggtgcacccccagtgggtgctgaccgccgcccactgcctgaagaagaacagccaggtgtggctgggcagacacaacctgttcgagcccgaggacaccggccagagagtgcccgtgagccacagcttcccccaccccctgtacaacatgagcctgctgaagcaccagagcctgagacccgacgaggacagcagccacgacctgatgctgctgagactgagcgagcccgccaagatcaccgacgtggtgaaggtgctgggcctgcccacccaggagcccgccctgggcaccacctgctacgccagcggctggggcagcatcgagcccgaggagttcctgagacccagaagcctgcagtgcgtgagcctgcacctgctgagcaacgacatgtgcgccagagcctacagcgagaaggtgaccgagttcatgctgtgcgccggcctgtggaccggcggcaaggacacctgcggcggcgacagcggcggccccctggtgtgcaacggcgtgctgcagggcatcaccagctggggccccgagccctgcgccctgcccgagaagcccgccgtgtacaccaaggtggtgcactacagaaagtggatcaaggacaccatcgccgccaacccctag

SEQ ID NO: 157263 - protein, 732 aa, Artificial Sequence
  derived and/or modified sequence
MLPCAAGARGRGAMVVLRAGKKTFLPPLCRAFACRGCQLAPERGAERRDTAPSGVSRFCPPRKSCHDWIGPPDKYSNLRPVHFYIPENESPLEQKLRKLRQETQEWNQQFWANQNLTFSKEKEEFIHSRLKTKGLGLRTESGQKATLNAEEMADFYKEFLSKNFQKHMYYNRMYDNMSTMVYIKEDKLEKLTQDEIISKTKQVIQGLEALKNEHNSILQSLLETLKCLKKDDESNLVEEKSNMIRKSLEMLELGLSEAQVMMALSNHLNAVESEKQKLRAQVRRLCQENQWLRDELANTQQKLQKSEQSVAQLEEEKKHLEFMNQLKKYDDDISPSEDKDTDSTKEPLDDLFPNDEDDPGQGIQQQHSSAAAAAQQGGYEIPARLRTLHNLVIQYASQGRYEVAVPLCKQALEDLEKTSGHDHPDVATMLNILALVYRDQNKYKDAANLLNDALAIREKTLGKDHPAVAATLNNLAVLYGKRGKYKEAEPLCKRALEIREKVLGKDHPDVAKQLNNLALLCQNQGKYEEVEYYYQRALEIYQTKLGPDDPNVAKTKNNLASCYLKQGKFKQAETLYKEILTRAHEREFGSVDDENKPIWMHAEEREECKGKQKDGTSFGEYGGWYKACKVDSPTVTTTLKNLGALYRRQGKFEAAETLEEAAMRSRKQGLDNVHKQRVAEVLNDPENMEKRRSRESLNVDVVKYESGPDGGEEVSMSVEWNGMRKMKLGLVN

SEQ ID NO: 157264 - protein, 576 aa, Artificial Sequence
  derived and/or modified sequence
MYDNMSTMVYIKEDKLEKLTQDEIISKTKQVIQGLEALKNEHNSILQSLLETLKCLKKDDESNLVEEKSNMIRKSLEMLELGLSEAQVMMALSNHLNAVESEKQKLRAQVRRLCQENQWLRDELANTQQKLQKSEQSVAQLEEEKKHLEFMNQLKKYDDDISPSEDKDTDSTKEPLDDLFPNDEDDPGQGIQQQHSSAAAAAQQGGYEIPARLRTLHNLVIQYASQGRYEVAVPLCKQALEDLEKTSGHDHPDVATMLNILALVYRDQNKYKDAANLLNDALAIREKTLGKDHPAVAATLNNLAVLYGKRGKYKEAEPLCKRALEIREKVLGKDHPDVAKQLNNLALLCQNQGKYEEVEYYYQRALEIYQTKLGPDDPNVAKTKNNLASCYLKQGKFKQAETLYKEILTRAHEREFGSVDDENKPIWMHAEEREECKGKQKDGTSFGEYGGWYKACKVDSPTVTTTLKNLGALYRRQGKFEAAETLEEAAMRSRKQRSISEIPKKILSANGSNHFPLPGSQGLDNVHKQRVAEVLNDPENMEKRRSRESLNVDVVKYESGPDGGEEMRKMKLGLVN

SEQ ID NO: 157265 - protein, 560 aa, Artificial Sequence
  derived and/or modified sequence
MYDNMSTMVYIKEDKLEKLTQDEIISKTKQVIQGLEALKNEHNSILQSLLETLKCLKKDDESNLVEEKSNMIRKSLEMLELGLSEAQVMMALSNHLNAVESEKQKLRAQVRRLCQENQWLRDELANTQQKLQKSEQSVAQLEEEKKHLEFMNQLKKYDDDISPSEDKDTDSTKEPLDDLFPNDEDDPGQGIQQQHSSAAAAAQQGGYEIPARLRTLHNLVIQYASQGRYEVAVPLCKQALEDLEKTSGHDHPDVATMLNILALVYRDQNKYKDAANLLNDALAIREKTLGKDHPAVAATLNNLAVLYGKRGKYKEAEPLCKRALEIREKVLGKDHPDVAKQLNNLALLCQNQGKYEEVEYYYQRALEIYQTKLGPDDPNVAKTKNNLASCYLKQGKFKQAETLYKEILTRAHEREFGSVDDENKPIWMHAEEREECKGKQKDGTSFGEYGGWYKACKVDSPTVTTTLKNLGALYRRQGKFEAAETLEEAAMRSRKQGLDNVHKQRVAEVLNDPENMEKRRSRESLNVDVVKYESGPDGGEEVSMSVEWNGMRKMKLGLVN

SEQ ID NO: 157266 - protein, 131 aa, Artificial Sequence
  derived and/or modified sequence
  misc_feature (1)..(1): Xaa can be any naturally occurring amino acid
XENKPIWMHAEEREECKGKQKDGTSFGEYGGWYKACKVDSPTVTTTLKNLGALYRRQGKFEAAETLEEAAMRSRKQGLDNVHKQRVAEVLNDPENMEKRRSRESLNVDVVKYESGPDGGEEMRKMKLGLVN

SEQ ID NO: 157267 - DNA, 2199 bp, Artificial Sequence
  derived and/or modified sequence
atgctgccctgcgccgccggcgccagaggcagaggcgccatggtggtgctgagagccggcaagaagaccttcctgccccccctgtgcagagccttcgcctgcagaggctgccagctggcccccgagagaggcgccgagagaagagacaccgcccccagcggcgtgagcagattctgcccccccagaaagagctgccacgactggatcggcccccccgacaagtacagcaacctgagacccgtgcacttctacatccccgagaacgagagccccctggagcagaagctgagaaagctgagacaggagacccaggagtggaaccagcagttctgggccaaccagaacctgaccttcagcaaggagaaggaggagttcatccacagcagactgaagaccaagggcctgggcctgagaaccgagagcggccagaaggccaccctgaacgccgaggagatggccgacttctacaaggagttcctgagcaagaacttccagaagcacatgtactacaacagaatgtacgacaacatgagcaccatggtgtacatcaaggaggacaagctggagaagctgacccaggacgagatcatcagcaagaccaagcaggtgatccagggcctggaggccctgaagaacgagcacaacagcatcctgcagagcctgctggagaccctgaagtgcctgaagaaggacgacgagagcaacctggtggaggagaagagcaacatgatcagaaagagcctggagatgctggagctgggcctgagcgaggcccaggtgatgatggccctgagcaaccacctgaacgccgtggagagcgagaagcagaagctgagagcccaggtgagaagactgtgccaggagaaccagtggctgagagacgagctggccaacacccagcagaagctgcagaagagcgagcagagcgtggcccagctggaggaggagaagaagcacctggagttcatgaaccagctgaagaagtacgacgacgacatcagccccagcgaggacaaggacaccgacagcaccaaggagcccctggacgacctgttccccaacgacgaggacgaccccggccagggcatccagcagcagcacagcagcgccgccgccgccgcccagcagggcggctacgagatccccgccagactgagaaccctgcacaacctggtgatccagtacgccagccagggcagatacgaggtggccgtgcccctgtgcaagcaggccctggaggacctggagaagaccagcggccacgaccaccccgacgtggccaccatgctgaacatcctggccctggtgtacagagaccagaacaagtacaaggacgccgccaacctgctgaacgacgccctggccatcagagagaagaccctgggcaaggaccaccccgccgtggccgccaccctgaacaacctggccgtgctgtacggcaagagaggcaagtacaaggaggccgagcccctgtgcaagagagccctggagatcagagagaaggtgctgggcaaggaccaccccgacgtggccaagcagctgaacaacctggccctgctgtgccagaaccagggcaagtacgaggaggtggagtactactaccagagagccctggagatctaccagaccaagctgggccccgacgaccccaacgtggccaagaccaagaacaacctggccagctgctacctgaagcagggcaagttcaagcaggccgagaccctgtacaaggagatcctgaccagagcccacgagagagagttcggcagcgtggacgacgagaacaagcccatctggatgcacgccgaggagagagaggagtgcaagggcaagcagaaggacggcaccagcttcggcgagtacggcggctggtacaaggcctgcaaggtggacagccccaccgtgaccaccaccctgaagaacctgggcgccctgtacagaagacagggcaagttcgaggccgccgagaccctggaggaggccgccatgagaagcagaaagcagggcctggacaacgtgcacaagcagagagtggccgaggtgctgaacgaccccgagaacatggagaagagaagaagcagagagagcctgaacgtggacgtggtgaagtacgagagcggccccgacggcggcgaggaggtgagcatgagcgtggagtggaacggcatgagaaagatgaagctgggcctggtgaactag

SEQ ID NO: 157268 - DNA, 2199 bp, Artificial Sequence
  derived and/or modified sequence
atgctgccatgtgccgcaggggctagaggccggggggctatggtggtgttacgggcaggaaagaaaacgttcctgccacccctttgtagggcatttgcttgtaggggatgccagctggctccagagcgcggagctgagagacgagataccgctccttctggcgtctcaaggttctgtcctcctaggaaatcctgccacgactggataggtccacctgataagtactctaatctgcggccagtccatttttatatccccgaaaatgaaagtccactggagcaaaagctgcggaagttgcgccaggagacccaggaatggaatcagcagttttgggctaaccaaaacctaactttctccaaagaaaaagaggaattcatccattctagattaaaaacaaagggcttaggcctccggacagagtctggtcagaaggccacactgaacgcagaggagatggccgatttctacaaggagtttttaagcaaaaatttccagaaacatatgtactacaaccggatgtacgataacatgagcacaatggtctacatcaaggaagacaagcttgagaagctgacccaggacgagatcattagtaagactaagcaggttattcaaggactagaggcactgaaaaatgaacataacagtatcctccaatcgttgcttgagacactcaagtgtctaaaaaaggatgacgagtctaatctggtggaggagaaatcaaacatgatcaggaagtctctggaaatgctggaactgggcttgtccgaggcacaggttatgatggccctgagtaaccatctgaacgctgtcgagtcggaaaaacagaaattacgcgcacaggtgagacggctctgtcaagaaaatcagtggctgcgcgacgagctggccaatacgcagcagaaactgcagaaaagcgagcagtctgtggcccagttggaggaagagaagaagcacctggaattcatgaaccagcttaaaaagtacgacgatgacattagcccatctgaagataaagataccgatagcaccaaggaacccctagacgacttgtttcctaatgacgaggacgacccgggacaaggcatccaacagcagcactcgtcagctgccgcagctgcccagcagggcggatatgaaattcctgcacgcctgcggactcttcacaacctcgtcattcagtacgctagccaaggtcgatatgaagtcgccgtgcctctgtgcaaacaagcacttgaagacctggaaaaaacatccggccacgatcaccctgatgtagcaactatgttaaacattctcgccttagtgtacagagaccagaacaaatataaagacgcagctaatctcttgaacgatgccctcgccatccgggagaaaacactgggaaaggatcaccccgctgttgccgcgaccctgaataatctcgctgtgctctacggcaagcgtggaaaatacaaagaagcagagcccctgtgcaagcgggcacttgagataagagagaaagtgttggggaaggaccacccggacgtggctaagcagctcaataatttggccctactctgccagaaccaggggaaatatgaagaagtggagtactattatcagcgggcgctagagatctaccagaccaaactcggtcccgatgaccctaatgtcgcaaagacaaagaataacctggccagctgctacttaaaacagggaaagtttaaacaagccgagaccctgtataaagagattctgacaagagctcatgagagggagtttggcagcgtagacgacgagaacaagcccatttggatgcacgctgaggaaagggaggaatgtaaaggcaagcagaaagacggtactagttttggagaatacgggggctggtacaaagcctgtaaagtggattcccccacggtcaccacaacgctgaaaaacttgggggcgttgtatcgacggcaaggcaagtttgaggctgcagagaccttagaggaggccgccatgagatcccggaagcagggacttgacaacgtccataagcaacgggtggccgaggtccttaatgatccagagaatatggaaaaacgccgtagcagagagagcttgaatgtggacgtagtcaaatacgagtccggccccgacgggggtgaagaggtttccatgtctgtggaatggaatggcatgaggaagatgaaattaggacttgtgaattag

SEQ ID NO: 157269 - DNA, 2199 bp, Artificial Sequence
  derived and/or modified sequence
atgctgccctgtgccgccggggcccggggccgcggggccatggtggtgctgcgggccggcaagaagaccttcctgccccccctgtgccgggcctttgcctgccggggctgccagctggcccctgagagaggagctgagcggcgggacacagcccccagcggcgtgagccgcttctgcccccccaggaagagctgccacgactggattggccccccagacaagtacagcaacctgcggcctgtgcacttctacatcccagaaaatgaaagccccctggagcagaagctgaggaagctgcggcaggagacccaggagtggaaccagcagttctgggccaaccagaacctgaccttcagcaaggagaaggaggagttcatccacagccggctgaagaccaagggcctgggcctgaggacagaaagtggccagaaggccaccctgaatgctgaggagatggctgacttctacaaggagttcctgagcaagaacttccagaagcacatgtactacaacaggatgtatgacaacatgagcaccatggtgtacatcaaggaggacaagctggagaagctgacccaggatgagatcatcagcaagaccaagcaggtgatccagggcctggaggccctgaagaatgagcacaacagcatcctgcagagcctgctggagaccctgaagtgcctgaagaaggatgatgagagcaacctggtggaggagaagagcaacatgatcaggaagagcctggagatgctggagctgggcctgtctgaggcccaggtgatgatggccctgagcaaccacctgaatgctgtggagagcgagaagcagaagctgcgggcccaggtgcggcggctgtgccaggagaaccagtggctgagagatgagctggccaacacccagcagaagctgcagaagtctgagcagagcgtggcccagctggaggaggagaagaagcacctggagttcatgaaccagctgaagaagtatgatgatgacatcagccccagcgaggacaaggacacagacagcaccaaggagcccctggatgacctcttccccaatgatgaagatgatcctggccagggcatccagcagcagcacagcagcgctgctgctgctgcccagcagggcggctatgagatcccagcccggctgcggaccctgcacaacctggtgatccagtatgccagccagggccgctatgaggtggccgtgcccctgtgcaagcaggccctggaggacctggagaagaccagcggccatgaccacccagatgtggccaccatgctgaacatcctggccctggtgtacagagaccagaacaagtacaaggatgctgccaacctgctgaatgatgccctggccatccgggagaagaccctgggcaaggaccaccctgctgtggccgccaccctgaacaacctggccgtgctgtatggcaagaggggcaagtacaaggaggccgagcccctgtgcaagagggccctggagatccgggagaaggtgctgggcaaggaccacccagatgtggccaagcagctgaacaacctggccctgctgtgccagaaccagggcaagtatgaggaggtggagtactactaccagagggccctggagatctaccagaccaagctgggcccagatgaccccaacgtggccaagaccaagaacaacctggccagctgctacctgaagcagggcaagttcaagcaggccgagaccctgtacaaggagatcctgacccgggcccacgagcgggagtttggatctgtggatgatgagaacaagcccatctggatgcacgccgaggagcgggaggagtgcaagggcaagcagaaggatggcaccagctttggagaatatggaggctggtacaaggcctgcaaggtggacagccccaccgtgaccaccaccctgaagaacctgggcgccctgtaccgccggcagggcaagtttgaggccgctgagaccctggaggaggccgccatgaggagcaggaagcagggcctggacaacgtgcacaagcagagggtggccgaggtgctgaatgaccctgagaacatggagaagagaagaagccgggagagcctgaatgtggatgtggtgaagtatgagagcggcccagatggaggagaggaggtgtccatgtctgtggagtggaatggcatgaggaagatgaagctgggcctggtgaactag

SEQ ID NO: 157270 - DNA, 2199 bp, Artificial Sequence
  derived and/or modified sequence
atgctgccctgcgccgccggcgcccggggccggggcgccatggtggtactcagagcaggtaagaagaccttccttccgcctctgtgccgcgccttcgcgtgccggggctgccagctggccccagagcgaggggcagagaggagagataccgcaccatcaggggtgtccagattctgccctccacgaaagagctgccatgactggatcggccctcctgataagtacagtaacttgaggccagtccatttctacatccccgaaaatgagtcccctctcgaacagaaactgcgcaaactgaggcaggaaacccaagaatggaatcagcagttttgggcgaaccagaatctgacctttagcaaagagaaggaggagttcattcactcacgcctgaagaccaaggggcttgggcttcgtactgagtctggtcagaaagccaccttaaatgcagaggagatggctgatttttacaaggaatttttgtctaagaacttccagaaacacatgtattacaatcgaatgtacgataacatgtctacaatggtatatataaaagaagacaaacttgaaaaactgacacaagatgagatcatttctaaaacaaagcaggtgatccagggtctagaagctttgaagaatgaacacaactcaatacttcagtctctgttggagactctgaagtgcctgaaaaaggatgacgaatctaacctcgtcgaagagaagtccaacatgatccgcaagtcgttggagatgctcgagttaggactctcggaagcacaggtaatgatggccctttcgaaccatcttaacgccgtagaatccgaaaaacagaagctgcgagcccaggtgcgtcgactctgccaagagaaccaatggttgcgagacgaacttgccaatacgcaacagaagttgcagaaaagcgaacagagcgtagcccagctggaggaagagaaaaagcatttggagtttatgaaccagctaaagaagtatgacgacgatatcagcccttcagaggataaggataccgactctactaaggagccccttgatgacctgtttcctaacgatgaggacgatcccggacagggcatacagcagcaacacagctccgcagccgccgctgctcagcagggaggctatgaaattcccgcaagacttcggacgttgcacaaccttgttatccagtatgcaagccagggacgctatgaggtggcagtgcccctgtgtaagcaggcgttagaagacctcgagaaaacatcaggtcacgatcaccctgacgttgcgactatgttgaatatcctagccctggtgtaccgtgaccagaacaaatacaaggatgcggccaacctgctcaatgacgcgctggccattagggagaagaccctggggaaggaccatcctgccgttgccgccacacttaataatctggcagtcctctatggtaagcgcggaaagtacaaggaggctgagcctctgtgtaaaagggccctggagattcgcgaaaaggtgttagggaaggaccacccggatgtcgctaaacaattgaacaacctggccttattgtgccaaaatcagggcaagtacgaggaagtggagtactactaccaacgcgcactcgaaatttatcagaccaagttgggtcccgatgacccgaatgttgctaaaacaaagaacaatctagcatcatgttacctgaagcagggaaagtttaagcaggccgagacactttataaagaaattctgaccagagcccacgaaagggaattcggcagtgtggatgacgagaataaacctatctggatgcatgccgaagaacgggaagagtgtaaaggaaagcaaaaggacggaacaagctttggtgagtatggcggttggtacaaggcctgcaaagttgattcgcctacagtgaccactactctgaaaaatcttggcgctctatataggcgccagggaaagtttgaggctgccgagacacttgaagaggccgctatgagaagtcgcaagcaggggctcgataacgttcacaagcagagggttgctgaggtgctgaatgatcctgagaacatggagaagaggcggtctcgtgaaagtctgaacgtggatgtggttaagtacgagtctggacctgatggtggcgaggaggtcagcatgtccgttgagtggaacggcatgcgtaaaatgaagttgggcctcgtcaattag

SEQ ID NO: 157271 - DNA, 2199 bp, Artificial Sequence
  derived and/or modified sequence
atgctgccctgtgcagctggagctcgcggtcggggtgccatggtggtgctgagggccggtaagaaaacctttttgcccccattatgtcgggctttcgcctgcagggggtgtcagctggctcctgagagaggcgctgaacggagagataccgccccatcgggggtgtcacgtttttgccctcctcgaaagagttgccatgattggatcggtcctcccgacaagtattctaacttaagacctgtgcatttttacattcccgagaatgagtctcccttggagcagaaattacggaagctgagacaagagacgcaggaatggaatcaacagttttgggccaatcagaacttgacttttagcaaagagaaagaagagttcatccacagcagacttaagacaaaagggcttggcctgcgcacggagtccggacagaaggcaactctgaacgctgaggaaatggctgatttctacaaggaattcctgtctaaaaacttccagaaacacatgtattataaccggatgtacgacaacatgagcaccatggtgtatattaaagaagacaaactcgaaaagttgactcaggacgagattattagtaagacaaagcaggtcattcaaggcctcgaagccctgaaaaacgaacacaatagcattctgcagagccttcttgagacactgaagtgtctgaagaaggacgatgagagtaatttggttgaggaaaaatccaacatgattcgcaaatcgctggaaatgctggagcttggcttatccgaagcgcaagtgatgatggctctgagcaaccatcttaacgccgttgagtccgaaaaacaaaaactcagagcacaggtgcgccgactgtgtcaggagaatcagtggctgagggacgaattagccaacacgcagcagaagctccagaagtctgagcaaagtgtagcccaactggaagaggaaaagaaacacctggagttcatgaatcagctcaaaaaatatgacgacgacataagccctagtgaagacaaggacacagactccaccaaggagccactggacgatctgttccccaacgatgaggatgacccaggacagggaatacagcaacagcattccagcgctgcagccgctgcccaacaaggcggttatgagatcccggcaaggctgcgaacactgcataacttagtgattcaatatgcctcccagggaagatacgaagtggccgtccctctgtgcaagcaggcgctggaggatttggaaaagaccagtggtcatgatcaccccgatgtagccaccatgctaaacatcctggcgcttgtctaccgggaccagaataagtacaaagacgccgcaaacttattgaacgacgctctcgcaatcagggagaaaactttggggaaggaccaccctgccgttgccgcaacactgaataacctagctgttctgtatggaaagcgtggaaagtacaaggaagctgagcccctgtgcaagagggccctggagatacgggagaaggtcctcggcaaagatcaccctgatgttgccaaacagctgaataacctggcactgctgtgtcagaatcagggcaaatacgaagaggtcgaatactattaccagagggcgttggagatataccagactaaactgggaccagacgacccaaacgtggccaagactaagaacaatttggcatcttgctatctgaaacagggtaagttcaagcaagctgagacactttacaaagaaatcctcactagggcccacgaaagagaattcggatcggtcgatgatgagaacaaacccatctggatgcatgccgaagaacgggaggagtgtaaaggaaaacagaaggatgggaccagttttggagaatatggagggtggtacaaagcatgtaaggtagattcccctacagtcacaacgactctaaaaaatctgggtgcactttaccggaggcagggcaaatttgaggcggctgagactctagaggaggctgctatgcgctcccggaagcagggacttgacaatgtacacaagcagcgagtcgcggaagtcttgaatgacccagagaatatggaaaaaagacgctctagagagagtctcaacgtcgatgttgtcaaatacgaatccggacccgatggaggcgaggaagtctcaatgagtgtcgaatggaatggcatgcggaagatgaagctgggtctcgtaaattag

SEQ ID NO: 157272 - DNA, 2505 bp, Artificial Sequence
  derived and/or modified sequence
aatgctgccgtgcgccgcgggagccagggggcgtggggccatggtggtcttgcgggcggggaagaagacctttctcccccctctctgccgcgccttcgcctgccgcggctgtcaactcgctccggagcgcggcgccgagcgcagggatacggcgcccagcggggtctcaagattctgccctccaagaaagtcttgccatgattggataggacccccagataaatattcaaaccttcgacctgttcacttttacatacctgaaaatgaatctccattggaacaaaagcttagaaaattaagacaagaaacacaagaatggaatcaacagttctgggcaaaccagaatttgacttttagtaaggaaaaagaagaatttattcactcaagactaaaaactaaaggcctgggcctgagaactgaatcaggtcagaaagcaacattgaatgcagaagaaatggcggacttctacaaggaatttttaagtaaaaattttcagaagcacatgtattataacagaatgtatgacaacatgtccacaatggtgtacataaaggaagacaagttggagaagcttacacaggatgaaattatttctaagacaaagcaagtaattcaggggctggaagctttgaagaatgagcacaattccattttacaaagtttgctggagacactgaagtgtttgaagaaagatgatgaaagtaatttggtggaggagaaatcaaacatgatccggaagtcactggagatgttggagctcggcctgagtgaggcacaggttatgatggctttgtcaaatcacctgaatgctgtggagtccgagaagcagaaactgcgtgcgcaggttcgtcgtctgtgccaggagaatcagtggctacgggatgaactggccaacacgcagcagaaactgcagaagagtgagcagtctgtggctcaactggaggaggagaagaagcatctggagtttatgaatcagctaaaaaaatatgatgacgacatttccccatccgaggacaaagacactgattctaccaaagagcctctggatgaccttttccccaatgatgaagacgacccagggcaaggaatccagcagcagcacagcagtgcagccgcggctgcccagcagggcggctacgagatccccgcgcggctgcggacgctccacaacctggtgatccagtacgcctcgcaggggcgctacgaggtagctgtgcccctctgcaagcaggccctggaggacctggagaagacttcaggacacgaccacccggacgtggccaccatgctcaacatcctggccttggtgtacagggatcagaataaatacaaagatgcagctaacctactgaatgatgccttggctattcgtgagaaaactttgggcaaagatcatcctgcggtggcggcgactttgaataaccttgcagtcctttatggtaaaagagggaagtacaaagaagcagagccgttgtgtaaaagagctctggaaatccgagaaaaggttttggggaaggatcaccccgatgttgccaagcagttaaataacttggccttactgtgccagaaccagggcaagtatgaagaagtagaatattattatcaaagagccctcgagatctaccagacaaaactgggacctgatgaccccaacgtggctaagacgaaaaataacctggcatcctgctatttgaaacaaggaaagttcaagcaagcagaaacactgtacaaagagattctcactcgtgcacatgaaagggagtttggttctgtagatgatgaaaataaacccatctggatgcatgctgaagaaagagaagaatgcaaaggaaagcaaaaggatgggacatcttttggagagtatggcggctggtacaaagcctgcaaagttgatagtccaactgttacaaccactctaaaaaaccttggggcactttacagacgtcaaggcaaatttgaagctgcagaaacgttagaagaagctgctatgaggtctcgtaaacagggtcttgacaatgttcacaaacagagggtggcagaagtgctcaatgaccctgagaacatggagaagcgcaggagccgtgagagcctcaacgtggacgtggtcaagtacgagagtggccctgacggaggggaggaagtgagtatgagcgtagagtggaacgggatgaggaaaatgaagctcgggctggttaactgacttgctcagcgtcccatggcctagccgcccgtgactctcacactgtctcctgcatgacgggtggcgcctcccgcagcttcccttctctctccagtgctgcccgctgtgtctagcagcctctaggatcttgtcagagctgcacctctctgtgaactggccattcctttcggtgctgctgtcctttttgggggggttcctgatttctgtatacatgtagctttgccagatatgtacttagtaatataaactgtattaataaaatccatttactgtgtaatacacgagtttaaaaattaagagcgatt

SEQ ID NO: 157273 - DNA, 1731 bp, Artificial Sequence
  derived and/or modified sequence
atgtatgacaatatgagtaccatggtgtacattaaagaagataaactggaaaagctaacacaggatgagatcatttcaaagacgaagcaggttatacaaggccttgaagctctaaagaacgaacacaatagcatcctgcagtcgttactggagacattgaagtgccttaaaaaggatgatgagtccaacctcgtagaagaaaagtccaacatgatcaggaagtctttggagatgctggaactcgggttgtctgaagcccaggtcatgatggcgctctctaaccatctgaacgcggtggagagcgaaaagcagaaactgcgggctcaggtgaggaggttgtgccaggaaaatcagtggctaagggacgaattggctaacacacagcagaagttgcaaaagtcagaacagtctgtggctcagctcgaagaggagaagaaacacctggaatttatgaaccagttaaaaaagtacgacgatgacatctctccatcagaggataaagataccgacagcactaaagagcccctcgatgatttatttcccaacgacgaagatgatcccgggcaaggaatccagcagcaacattcatctgcggcggcggctgcacagcagggcggttacgagatccccgcccgtctgcgtacactgcataacttagttatccagtatgcatcccagggcaggtatgaggtggcagtacccttgtgtaagcaggccctggaggatctcgaaaagacttcaggacacgatcaccccgatgtcgctaccatgctaaatatcctggccctcgtgtatagggaccagaataaatacaaggatgccgcaaacctgctgaacgacgccctagcaataagggaaaagactctgggcaaagatcacccagcagtggccgctaccctaaacaacttggccgtgctctatggaaagcggggcaaatacaaggaggcagaaccactttgtaaacgagcactggagatccgggagaaggtgttaggaaaagaccaccccgatgtcgccaagcagttaaataatcttgcattactctgtcagaatcaaggaaagtacgaagaggtagagtactattatcagagggcgttagagatctaccagactaaactcggtcccgacgatccaaacgtggccaagacgaagaataatctggcatcatgttatcttaagcagggaaaattcaaacaggccgagactttgtacaaggagattctgacccgtgcgcatgaacgcgaatttggatctgtggatgatgagaataagccgatttggatgcatgcggaggagcgcgaagagtgcaaggggaaacagaaagacggcacctccttcggggaatatgggggatggtacaaggcatgcaaggtcgattctccaaccgtgactaccacattgaagaaccttggggccttgtatagaaggcaggggaagttcgaagcagcggagacactcgaggaggccgccatgcgttcccgcaagcagcgcagcattagtgaaattccaaaaaagatactgtctgcgaatggttcaaatcactttccattgcccggttcccaggggctcgataatgtacacaagcagcgggtggctgaagtactgaatgaccctgagaacatggagaagcggcggagcagagagagcctcaacgtcgatgtggtaaaatacgagtctggccctgacgggggggaagagatgcgcaagatgaagctcggcctggtgaactag

SEQ ID NO: 157274 - DNA, 1683 bp, Artificial Sequence
  derived and/or modified sequence
atgtacgataacatgagcaccatggtatatattaaagaggataagctggagaagctcacacaggatgagatcatctctaaaacgaaacaggttatccagggactcgaagccctgaagaatgaacacaattcaattcttcagtccttgttagaaactctgaagtgtctgaaaaaggatgacgagtccaatttggtggaagaaaaatctaatatgattagaaagtccttagagatgctcgagcttggcctgagcgaagcccaagtcatgatggccctctctaaccacctgaacgccgttgagtctgaaaagcagaagctgcgggctcaggtgagaagattgtgccaggaaaaccaatggctgcgagacgagcttgccaacacccagcaaaaactgcagaaaagcgagcaaagtgtggcacagctagaggaggagaagaaacacctagaatttatgaatcagctcaagaagtacgatgatgatatatcaccttcagaggataaggacacagactcgaccaaggaaccccttgatgacctgtttcccaatgatgaggatgaccctggtcaggggattcaacagcagcattcatccgcagcagctgctgcccaacaaggcgggtacgagatccccgcccgcctcagaactttgcacaacctggtgatccagtatgcctctcagggacgttatgaagtcgccgtgccactctgcaagcaggctctcgaggatctggaaaagactagcgggcatgatcatcctgatgtggcaacaatgctcaacatcctcgctcttgtctatagggaccagaacaagtacaaggacgctgccaatctgctgaacgatgcactggcaataagggaaaaaacactagggaaggaccatcctgcagttgccgccaccctaaacaatctggccgttctgtacgggaaacgcggaaagtataaagaagccgagcccctttgcaagagggctttggagattcgtgagaaggtcttgggaaaggatcatccagacgtcgccaaacagcttaataatcttgccttgctgtgccagaaccaaggtaaatatgaggaggtggagtactattaccagcgggctttagaaatctaccagactaaattagggcctgacgaccctaacgtggctaagaccaagaataatcttgccagttgctatttgaagcagggcaagtttaagcaggcagagacgctctataaggagatcttgacaagagcccacgagcgtgaattcggtagcgtggatgatgaaaataagcccatctggatgcatgcggaagagcgggaagagtgcaagggcaagcagaaggatggtacatcttttggagagtacggagggtggtacaaggcatgtaaggtggacagtcctaccgtaactacaacgcttaagaatttgggggctctgtaccggagacaggggaaatttgaggccgccgaaaccttggaggaggccgctatgcggtcccggaagcagggcctggacaatgttcacaagcaacgcgtcgcagaagtgctgaacgaccccgagaatatggagaaaaggaggagtcgcgagtcgctcaatgtggacgtagtcaagtatgaatctgggcccgatggaggagaagaagtaagcatgtctgttgagtggaacggaatgcgtaagatgaaactgggactggttaattag

SEQ ID NO: 157275 - DNA, 1683 bp, Artificial Sequence
  derived and/or modified sequence
atgtacgataatatgagtaccatggtctacatcaaagaggataagctcgaaaagctgacacaggacgaaattattagcaagacgaagcaagtgattcagggcctggaggccctgaaaaacgaacacaattctattctgcagtcgttattagaaacccttaagtgcctgaaaaaagatgacgaaagcaatctggttgaagagaagtccaacatgatcaggaagtcactggagatgctggaactgggccttagcgaagctcaggttatgatggctctttccaatcatttaaatgctgtagaatccgagaagcaaaagctgcgcgctcaggtgcgtcggctgtgtcaagaaaaccaatggttacgagatgagctcgccaacactcaacagaagttgcaaaagtctgagcaatctgtcgcacagctggaggaggaaaagaaacatctggagtttatgaatcaactcaagaagtatgatgatgacattagcccatcagaggataaggacacagactccacaaaggaaccactcgacgacttgttcccaaatgacgaagatgatccaggtcaagggattcaacagcagcacagctccgctgcggcagccgcccagcaagggggatacgaaatccccgctaggcttcgaacactccacaacctggtcattcaatacgccagccaaggcagatacgaagtagcagtgcctctttgtaagcaggctttggaagatttggagaaaacgagcggacacgatcaccctgacgtcgcgaccatgctaaacatactagccctggtgtaccgcgatcagaataagtacaaagacgccgccaatctgcttaacgacgcactggcaatccgagagaagactctagggaaagatcacccggcagtcgcagccactctgaacaatctggctgtgttatacggtaaaagaggaaaatacaaggaggctgaacctttgtgtaagcgcgctctcgagattagggaaaaggtgctcggcaaagatcaccccgacgtggccaagcaattaaataatcttgccctgctgtgtcagaaccagggaaaatatgaagaggtggaatattactatcagagagccctggagatataccagaccaagctcggcccagacgacccaaatgtcgctaagacaaaaaacaacctcgcctcatgttatctcaagcagggcaaatttaaacaggccgagaccctgtataaggaaattctgaccagagcgcacgagcgggaattcggaagcgtggatgacgagaataagcctatttggatgcacgcagaagagagagaggagtgcaaaggcaagcagaaggacgggacatcctttggcgaatatggcgggtggtataaggcttgtaaggtcgactccccaacggtcactacaactctcaagaacctgggcgctctgtatagacgtcagggcaagttcgaggccgccgaaaccctggaagaggcggccatgcggagtaggaaacaaggtctagacaatgtacacaagcagcgcgtggctgaagtactcaacgatcctgaaaatatggaaaagaggcggagtcgggaaagccttaatgtcgacgttgtgaagtatgaatcagggcctgatgggggtgaggaggttagcatgtctgtggagtggaatggcatgagaaaaatgaagctcggcctggtgaattag

SEQ ID NO: 157276 - DNA, 396 bp, Artificial Sequence
  derived and/or modified sequence
tgagaaaacaaacctatatggatgcacgccgaagagcgcgaagaatgtaagggaaaacagaaggatgggacaagcttcggcgagtacgggggatggtataaagcgtgtaaggttgattctccaacagtgactaccacattaaagaacctcggtgcactgtatcgacgacaggggaaatttgaggcagcagaaacactcgaggaagccgcaatgcggagccgcaagcaaggtttggacaacgtgcacaaacagcgggttgcagaggtgcttaatgatccagaaaacatggagaaaaggcgctcccgggaatcactgaacgtggacgtggttaagtatgagtcaggccctgatggtggggaggagatgaggaagatgaagttgggactggtgaactag

SEQ ID NO: 157277 - DNA, 453 bp, Artificial Sequence
  derived and/or modified sequence
atgtacgacaatatgtcaaccatggtttacataaaggaagacaaacttgagaaactgacccaggacgaaattatttcaaagactaagcaggtaattcagggtctggaggcacttaagaatgagcacaactctatcttgcagtccctgctggagactttgaagtgtttaaagaaggacgatgagagcaatctggtggaggaaaagtctaatatgatccggaagagtctcgaaatgctagaactcggactgagcgaggcccaggtgatgatggccctgtccaaccatctcaacgccgtcgaatccgagaagcagaaactacgtgcgcaggtgcggcggctctgccaggaaaatcagtggcttcgcgacgagcttgccaatacacaacaaaaactgcaaaaatccgaacagtcagtcgctcagcttgaagaggaaaaaaaacatctagaattctag

SEQ ID NO: 157278 - DNA, 2322 bp, Artificial Sequence
  derived and/or modified sequence
gagacgccattttcggcggcgggagcggcgcaggcggccgagcgggactggctgggtcggctgggctgctggtgcgaggagccgcggggctgtgctcggcggccaaggggacagcgcgtgggtggccgaggatgctgcggggcggtagctccggcgcccctagctggtgactgctgcgccgtgcctcacacagccgaggcgggctcggcgcacagtcgctgctccgcgcgcgcgcccggcggcgctccaggtgctgacagcgcgagagagcgcggccctcaggagcaaggcgaatgtatgacaacatgtccacaatggtgtacataaaggaagacaagttggagaagcttacacaggatgaaattatttctaagacaaagcaagtaattcaggggctggaagctttgaagaatgagcacaattccattttacaaagtttgctggagacactgaagtgtttgaagaaagatgatgaaagtaatttggtggaggagaaatcaaacatgatccggaagtcactggagatgttggagctcggcctgagtgaggcacaggttatgatggctttgtcaaatcacctgaatgctgtggagtccgagaagcagaaactgcgtgcgcaggttcgtcgtctgtgccaggagaatcagtggctacgggatgaactggccaacacgcagcagaaactgcagaagagtgagcagtctgtggctcaactggaggaggagaagaagcatctggagtttatgaatcagctaaaaaaatatgatgacgacatttccccatccgaggacaaagacactgattctaccaaagagcctctggatgaccttttccccaatgatgaagacgacccagggcaaggaatccagcagcagcacagcagtgcagccgcggctgcccagcagggcggctacgagatccccgcgcggctgcggacgctccacaacctggtgatccagtacgcctcgcaggggcgctacgaggtagctgtgcccctctgcaagcaggccctggaggacctggagaagacttcaggacacgaccacccggacgtggccaccatgctcaacatcctggccttggtgtacagggatcagaataaatacaaagatgcagctaacctactgaatgatgccttggctattcgtgagaaaactttgggcaaagatcatcctgcggtggcggcgactttgaataaccttgcagtcctttatggtaaaagagggaagtacaaagaagcagagccgttgtgtaaaagagctctggaaatccgagaaaaggttttggggaaggatcaccccgatgttgccaagcagttaaataacttggccttactgtgccagaaccagggcaagtatgaagaagtagaatattattatcaaagagccctcgagatctaccagacaaaactgggacctgatgaccccaacgtggctaagacgaaaaataacctggcatcctgctatttgaaacaaggaaagttcaagcaagcagaaacactgtacaaagagattctcactcgtgcacatgaaagggagtttggttctgtagatgatgaaaataaacccatctggatgcatgctgaagaaagagaagaatgcaaaggaaagcaaaaggatgggacatcttttggagagtatggcggctggtacaaagcctgcaaagttgatagtccaactgttacaaccactctaaaaaaccttggggcactttacagacgtcaaggcaaatttgaagctgcagaaacgttagaagaagctgctatgaggtctcgtaaacagcgaagtatctcagaaatacctaagaaaatcttaagtgctaatgggtcaaaccattttcccctgcctggctcacagggtcttgacaatgttcacaaacagagggtggcagaagtgctcaatgaccctgagaacatggagaagcgcaggagccgtgagagcctcaacgtggacgtggtcaagtacgagagtggccctgacggaggggaggaaatgaggaaaatgaagctcgggctggttaactgacttgctcagcgtcccatggtgagtccgagcgggcggggcgcaggccctgccgtctggcgcttctgtcgagacgtcggctttccaacctggcaggacccaggacgcattgctgcctgtggaaattaattttcttttggattatcaactgcatgtttaaaatgggctgtagacttttaaagtccgtggtttcctaaagtttctgaaatgtctaaaatgtgtttttaagagaatgaaagtcatacctgtagcctttattttggtccctatgtttttcattgcataatctccttatatacag

SEQ ID NO: 157279 - DNA, 2558 bp, Artificial Sequence
  derived and/or modified sequence
gcggcgcaggcggccgagcgggactggctgggtcggctgggctgctggtgcgaggagccgcggggctgtgctcggcggccaaggggacagcgcgtgggtggccgaggatgctgcggggcggtagctccggcgcccctagctggtgactgctgcgccgtgcctcacacagccgaggcgggctcggcgcacagtcgctgctccgcgcgcgcgcccggcggcgctccaggtgctgacagcgcgagagagcgcggccctcaggagcaaggcgaatgtatgacaacatgtccacaatggtgtacataaaggaagacaagttggagaagcttacacaggatgaaattatttctaagacaaagcaagtaattcaggggctggaagctttgaagaatgagcacaattccattttacaaagtttgctggagacactgaagtgtttgaagaaagatgatgaaagtaatttggtggaggagaaatcaaacatgatccggaagtcactggagatgttggagctcggcctgagtgaggcacaggttatgatggctttgtcaaatcacctgaatgctgtggagtccgagaagcagaaactgcgtgcgcaggttcgtcgtctgtgccaggagaatcagtggctacgggatgaactggccaacacgcagcagaaactgcagaagagtgagcagtctgtggctcaactggaggaggagaagaagcatctggagtttatgaatcagctaaaaaaatatgatgacgacatttccccatccgaggacaaagacactgattctaccaaagagcctctggatgaccttttccccaatgatgaagacgacccagggcaaggaatccagcagcagcacagcagtgcagccgcggctgcccagcagggcggctacgagatccccgcgcggctgcggacgctccacaacctggtgatccagtacgcctcgcaggggcgctacgaggtagctgtgcccctctgcaagcaggccctggaggacctggagaagacttcaggacacgaccacccggacgtggccaccatgctcaacatcctggccttggtgtacagggatcagaataaatacaaagatgcagctaacctactgaatgatgccttggctattcgtgagaaaactttgggcaaagatcatcctgcggtggcggcgactttgaataaccttgcagtcctttatggtaaaagagggaagtacaaagaagcagagccgttgtgtaaaagagctctggaaatccgagaaaaggttttggggaaggatcaccccgatgttgccaagcagttaaataacttggccttactgtgccagaaccagggcaagtatgaagaagtagaatattattatcaaagagccctcgagatctaccagacaaaactgggacctgatgaccccaacgtggctaagacgaaaaataacctggcatcctgctatttgaaacaaggaaagttcaagcaagcagaaacactgtacaaagagattctcactcgtgcacatgaaagggagtttggttctgtagatgatgaaaataaacccatctggatgcatgctgaagaaagagaagaatgcaaaggaaagcaaaaggatgggacatcttttggagagtatggcggctggtacaaagcctgcaaagttgatagtccaactgttacaaccactctaaaaaaccttggggcactttacagacgtcaaggcaaatttgaagctgcagaaacgttagaagaagctgctatgaggtctcgtaaacagggtcttgacaatgttcacaaacagagggtggcagaagtgctcaatgaccctgagaacatggagaagcgcaggagccgtgagagcctcaacgtggacgtggtcaagtacgagagtggccctgacggaggggaggaagtgagtatgagcgtagagtggaacgggatgaggaaaatgaagctcgggctggttaactgacttgctcagcgtcccatggcctagccgcccgtgactctcacactgtctcctgcatgacgggtggcgcctcccgcagcttcccttctctctccagtgctgcccgctgtgtctagcagcctctaggatcttgtcagagctgcacctctctgtgaactggccattcctttcggtgctgctgtcctttttgggggggttcctgatttctgtatacatgtagctttgccagatatgtacttagtaatataaactgtattaataaaatccatttactgtgtaatacacgagtttaaaaattaagagcgattagctgttcactttggtaacaggtagttaagtgtcacacaaggtgttgttgcaatggcatgacggtgacctgttgacgtaactaagccttacagcaaggcatgtgccgcacgtgctccgtggtacttagagccctgggggccccgctcggactccgggtctccctaggatatgccccagtagcatttgctgtgtagtctgtgtgtgaaatttgggcattctgcttttctctactaatcttgaagtgctcagtgatttgtgtatttgtgtctttctaacttctaataaactcactccgactga

SEQ ID NO: 157280 - DNA, 3135 bp, Artificial Sequence
  derived and/or modified sequence
cggccgagcgggactggctgggtcggctgggctgctggtgcgaggagccgcggggctgtgctcggcggccaaggggacagcgcgtgggtggccgaggatgctgcggggcggtagctccggcgcccctagctggtgactgctgcgccgtgcctcacacagccgaggcgggctcggcgcacagtcgctgctccgcgcgcgcgcccggcggcgctccaggtgctgacagcgcgagagagcgcggccctcaggagcaaggcgaatgtatgacaacatgtccacaatggtgtacataaaggaagacaagttggagaagcttacacaggatgaaattatttctaagacaaagcaagtaattcaggggctggaagctttgaagaatgagcacaattccattttacaaagtttgctggagacactgaagtgtttgaagaaagatgatgaaagtaatttggtggaggagaaatcaaacatgatccggaagtcactggagatgttggagctcggcctgagtgaggcacaggttatgatggctttgtcaaatcacctgaatgctgtggagtccgagaagcagaaactgcgtgcgcaggttcgtcgtctgtgccaggagaatcagtggctacgggatgaactggccaacacgcagcagaaactgcagaagagtgagcagtctgtggctcaactggaggaggagaagaagcatctggagtttatgaatcagctaaaaaaatatgatgacgacatttccccatccgaggacaaagacactgattctaccaaagagcctctggatgaccttttccccaatgatgaagacgacccagggcaaggaatccagcagcagcacagcagtgcagccgcggctgcccagcagggcggctacgagatccccgcgcggctgcggacgctccacaacctggtgatccagtacgcctcgcaggggcgctacgaggtagctgtgcccctctgcaagcaggccctggaggacctggagaagacttcaggacacgaccacccggacgtggccaccatgctcaacatcctggccttggtgtacagggatcagaataaatacaaagatgcagctaacctactgaatgatgccttggctattcgtgagaaaactttgggcaaagatcatcctgcggtggcggcgactttgaataaccttgcagtcctttatggtaaaagagggaagtacaaagaagcagagccgttgtgtaaaagagctctggaaatccgagaaaaggttttggggaaggatcaccccgatgttgccaagcagttaaataacttggccttactgtgccagaaccagggcaagtatgaagaagtagaatattattatcaaagagccctcgagatctaccagacaaaactgggacctgatgaccccaacgtggctaagacgaaaaataacctggcatcctgctatttgaaacaaggaaagttcaagcaagcagaaacactgtacaaagagattctcactcgtgcacatgaaagggagtttggttctgtagatgatgaaaataaacccatctggatgcatgctgaagaaagagaagaatgcaaaggaaagcaaaaggatgggacatcttttggagagtatggcggctggtacaaagcctgcaaagttgatagtccaactgttacaaccactctaaaaaaccttggggcactttacagacgtcaaggcaaatttgaagctgcagaaacgttagaagaagctgctatgaggtctcgtaaacagggtcttgacaatgttcacaaacagagggtggcagaagtgctcaatgaccctgagaacatggagaagcgcaggagccgtgagagcctcaacgtggacgtggtcaagtacgagagtggccctgacggaggggaggaagtgagtatgagcgtagagtggaacgggatgaggaaaatgaagctcgggctggttaactgacttgctcagcgtcccatggtgagtccgagcgggcggggcgcaggccctgccgtctggcgcttctgtcgagacgtcggctttccaacctggcaggacccaggacgcattgctgcctgtggaaattaattttcttttggattatcaactgcatgtttaaaatgggctgtagacttttaaagtccgtggtttcctaaagtttctgaaatgtctaaaatgtgtttttaagagaatgaaagtcatacctgtagcctttattttggtccctatgtttttcattgcataatctccttatatacagttacttgtaaagccttttacaccaagtgtcaaggagatttctaatacgttgccaatctttacgcttaaagtgttgacatttactttgatgaccattgggaatggaccagtctggattctgtgaaatgcaccatgaggcccagcacctgctttatgctggactggtagaagcaggcagaaggtcatcccagtcctaaagccactcagaaggctgctgagacttgtgacctagaaatactgtaagccaggctgttatgcagagcctgttgcctttcctcgccgcggtttcacgtgggttttctctctcctttctgtctgacaggcctagccgcccgtgactctcacactgtctcctgcatgacgggtggcgcctcccgcagcttcccttctctctccagtgctgcccgctgtgtctagcagcctctaggatcttgtcagagctgcacctctctgtgaactggccattcctttcggtgctgctgtcctttttgggggggttcctgatttctgtatacatgtagctttgccagatatgtacttagtaatataaactgtattaataaaatccatttactgtgtaatacacgagtttaaaaattaagagcgattagctgttcactttggtaacaggtagttaagtgtcacacaaggtgttgttgcaatggcatgacggtgacctgttgacgtaactaagccttacagcaaggcatgtgccgcacgtgctccgtggtacttagagccctgggggccccgctcggactccgggtctccctaggatatgccccagtagcatttgctgtgtagtctgtgtgtgaaatttgggcattctgcttttctctactaatcttgaagtgctcagtgatttgtgtatttgtgtctttctaacttctaataaa

SEQ ID NO: 157281 - DNA, 976 bp, Artificial Sequence
  derived and/or modified sequence
atgaaaataaacccatctggatgcatgctgaagaaagagaagaatgcaaaggaaagcaaaaggatgggacatcttttggagagtatggcggctggtacaaagcctgcaaagttgatagtccaactgttacaaccactctaaaaaaccttggggcactttacagacgtcaaggcaaatttgaagctgcagaaacgttagaagaagctgctatgaggtctcgtaaacagggtcttgacaatgttcacaaacagagggtggcagaagtgctcaatgaccctgagaacatggagaagcgcaggagccgtgagagcctcaacgtggacgtggtcaagtacgagagtggccctgacggaggggaggaaatgaggaaaatgaagctcgggctggttaactgacttgctcagcgtcccatggcctagccgcccgtgactctcacactgtctcctgcatgacgggtggcgcctcccgcagcttcccttctctctccagtgctgcccgctgtgtctagcagcctctaggatcttgtcagagctgcacctctctgtgaactggccattcctttcggtgctgctgtcctttttgggggggttcctgatttctgtatacatgtagctttgccagatatgtacttagtaatataaactgtattaataaaatccatttactgtgtaatacacgagtttaaaaattaagagcgattagctgttcactttggtaacaggtagttaagtgtcacacaaggtgttgttgcaatggcatgacggtgacctgttgacgtaactaagccttacagcaaggcatgtgccgcacgtgctccgtggtacttagagccctgggggccccgctcggactccgggtctccctaggatatgccccagtagcatttgctgtgtagtctgtgtgtgaaatttgggcattctgcttttctctactaatcttgaagtgctcagtgatttgtgtatttgtgtctttctaa

SEQ ID NO: 157282 - DNA, 540 bp, Artificial Sequence
  derived and/or modified sequence
ataattcattcactcgcctcccactgggagtccacaatggcctaatgcacgtttcaagctcttggtttctatcaaacggctcgctcaagaatgtatgacaacatgtccacaatggtgtacataaaggaagacaagttggagaagcttacacaggatgaaattatttctaagacaaagcaagtaattcaggggctggaagctttgaagaatgagcacaattccattttacaaagtttgctggagacactgaagtgtttgaagaaagatgatgaaagtaatttggtggaggagaaatcaaacatgatccggaagtcactggagatgttggagctcggcctgagtgaggcacaggttatgatggctttgtcaaatcacctgaatgctgtggagtccgagaagcagaaactgcgtgcgcaggttcgtcgtctgtgccaggagaatcagtggctacgggatgaactggccaacacgcagcagaaactgcagaagagtgagcagtctgtggctcaactggaggaggagaagaagcatctggagttt

SEQ ID NO: 157283 - DNA, 1731 bp, Artificial Sequence
  derived and/or modified sequence
atgtatgacaacatgagcaccatggtgtacatcaaggaggacaagctggagaagctgacccaggatgagatcatcagcaagaccaagcaggtgatccagggcctggaggccctgaagaatgagcacaacagcatcctgcagagcctgctggagaccctgaagtgcctgaagaaggatgatgagagcaacctggtggaggagaagagcaacatgatcaggaagagcctggagatgctggagctgggcctgtctgaggcccaggtgatgatggccctgagcaaccacctgaatgctgtggagagcgagaagcagaagctgcgggcccaggtgcggcggctgtgccaggagaaccagtggctgagagatgagctggccaacacccagcagaagctgcagaagtctgagcagagcgtggcccagctggaggaggagaagaagcacctggagttcatgaaccagctgaagaagtatgatgatgacatcagccccagcgaggacaaggacacagacagcaccaaggagcccctggatgacctcttccccaatgatgaagatgatcctggccagggcatccagcagcagcacagcagcgctgctgctgctgcccagcagggcggctatgagatcccagcccggctgcggaccctgcacaacctggtgatccagtatgccagccagggccgctatgaggtggccgtgcccctgtgcaagcaggccctggaggacctggagaagaccagcggccatgaccacccagatgtggccaccatgctgaacatcctggccctggtgtacagagaccagaacaagtacaaggatgctgccaacctgctgaatgatgccctggccatccgggagaagaccctgggcaaggaccaccctgctgtggccgccaccctgaacaacctggccgtgctgtatggcaagaggggcaagtacaaggaggccgagcccctgtgcaagagggccctggagatccgggagaaggtgctgggcaaggaccacccagatgtggccaagcagctgaacaacctggccctgctgtgccagaaccagggcaagtatgaggaggtggagtactactaccagagggccctggagatctaccagaccaagctgggcccagatgaccccaacgtggccaagaccaagaacaacctggccagctgctacctgaagcagggcaagttcaagcaggccgagaccctgtacaaggagatcctgacccgggcccacgagcgggagtttggatctgtggatgatgagaacaagcccatctggatgcacgccgaggagcgggaggagtgcaagggcaagcagaaggatggcaccagctttggagaatatggaggctggtacaaggcctgcaaggtggacagccccaccgtgaccaccaccctgaagaacctgggcgccctgtaccgccggcagggcaagtttgaggccgctgagaccctggaggaggccgccatgaggagcaggaagcagaggagcatcagcgagatccccaagaagatcctgagcgccaacggcagcaaccacttccccctgcccggcagccagggcctggacaacgtgcacaagcagagggtggccgaggtgctgaatgaccctgagaacatggagaagaggaggagccgggagagcctgaatgtggatgtggtgaagtatgaaagtggcccagatggaggagaggagatgaggaagatgaagctgggcctggtgaactag

SEQ ID NO: 157284 - DNA, 1683 bp, Artificial Sequence
  derived and/or modified sequence
atgtatgacaacatgagcaccatggtgtacatcaaggaggacaagctggagaagctgacccaggatgagatcatcagcaagaccaagcaggtgatccagggcctggaggccctgaagaatgagcacaacagcatcctgcagagcctgctggagaccctgaagtgcctgaagaaggatgatgagagcaacctggtggaggagaagagcaacatgatcaggaagagcctggagatgctggagctgggcctgtctgaggcccaggtgatgatggccctgagcaaccacctgaatgctgtggagagcgagaagcagaagctgcgggcccaggtgcggcggctgtgccaggagaaccagtggctgagagatgagctggccaacacccagcagaagctgcagaagtctgagcagagcgtggcccagctggaggaggagaagaagcacctggagttcatgaaccagctgaagaagtatgatgatgacatcagccccagcgaggacaaggacacagacagcaccaaggagcccctggatgacctcttccccaatgatgaagatgatcctggccagggcatccagcagcagcacagcagcgctgctgctgctgcccagcagggcggctatgagatcccagcccggctgcggaccctgcacaacctggtgatccagtatgccagccagggccgctatgaggtggccgtgcccctgtgcaagcaggccctggaggacctggagaagaccagcggccatgaccacccagatgtggccaccatgctgaacatcctggccctggtgtacagagaccagaacaagtacaaggatgctgccaacctgctgaatgatgccctggccatccgggagaagaccctgggcaaggaccaccctgctgtggccgccaccctgaacaacctggccgtgctgtatggcaagaggggcaagtacaaggaggccgagcccctgtgcaagagggccctggagatccgggagaaggtgctgggcaaggaccacccagatgtggccaagcagctgaacaacctggccctgctgtgccagaaccagggcaagtatgaggaggtggagtactactaccagagggccctggagatctaccagaccaagctgggcccagatgaccccaacgtggccaagaccaagaacaacctggccagctgctacctgaagcagggcaagttcaagcaggccgagaccctgtacaaggagatcctgacccgggcccacgagcgggagtttggatctgtggatgatgagaacaagcccatctggatgcacgccgaggagcgggaggagtgcaagggcaagcagaaggatggcaccagctttggagaatatggaggctggtacaaggcctgcaaggtggacagccccaccgtgaccaccaccctgaagaacctgggcgccctgtaccgccggcagggcaagtttgaggccgctgagaccctggaggaggccgccatgaggagcaggaagcagggcctggacaacgtgcacaagcagagggtggccgaggtgctgaatgaccctgagaacatggagaagagaagaagccgggagagcctgaatgtggatgtggtgaagtatgagagcggcccagatggaggagaggaggtgtccatgtctgtggagtggaatggcatgaggaagatgaagctgggcctggtgaactag

SEQ ID NO: 157285 - DNA, 396 bp, Artificial Sequence
  derived and/or modified sequence
tgagaaaacaagcccatctggatgcacgccgaggagcgggaggagtgcaagggcaagcagaaggatggcaccagctttggagaatatggaggctggtacaaggcctgcaaggtggacagccccaccgtgaccaccaccctgaagaacctgggcgccctgtaccgccggcagggcaagtttgaggccgctgagaccctggaggaggccgccatgaggagcaggaagcagggcctggacaacgtgcacaagcagagggtggccgaggtgctgaatgaccctgagaacatggagaagagaagaagccgggagagcctgaatgtggatgtggtgaagtatgagagcggcccagatggaggagaggagatgaggaagatgaagctgggcctggtgaactag

SEQ ID NO: 157286 - DNA, 453 bp, Artificial Sequence
  derived and/or modified sequence
atgtatgacaacatgagcaccatggtgtacatcaaggaggacaagctggagaagctgacccaggatgagatcatcagcaagaccaagcaggtgatccagggcctggaggccctgaagaatgagcacaacagcatcctgcagagcctgctggagaccctgaagtgcctgaagaaggatgatgagagcaacctggtggaggagaagagcaacatgatcaggaagagcctggagatgctggagctgggcctgtctgaggcccaggtgatgatggccctgagcaaccacctgaatgctgtggagagcgagaagcagaagctgcgggcccaggtgcggcggctgtgccaggagaaccagtggctgagagatgagctggccaacacccagcagaagctgcagaagtctgagcagagcgtggcccagctggaggaggagaagaagcacctggagttctag

SEQ ID NO: 157287 - DNA, 1731 bp, Artificial Sequence
  derived and/or modified sequence
atgtacgacaacatgagcaccatggtgtacatcaaggaggacaagctagaaaagcttacacaagacgaaatcataagcaaaaccaaacaggttatccagggtctggaagcactcaagaatgagcataatagcattctgcaaagtctgctggagacactgaaatgcttaaagaaggatgatgagagcaacctggtcgaggaaaaaagcaatatgataaggaagtccctcgaaatgttggagctggggctctcagaggcacaagtgatgatggcactgtcaaaccacttgaatgcggtggaaagcgagaagcagaagctgagagctcaagtcagaaggctgtgccaggaaaatcaatggttgcgtgacgagctagccaacacccagcagaagctgcagaagtctgaacagagcgtggcccagctcgaggaagagaagaagcacctggagtttatgaaccagctgaagaagtatgatgacgacatctcgccatcggaggacaaagatacggactcaacaaaggagcctttagacgatctgtttcccaacgatgaagatgatcccgggcagggtatccagcagcagcatagcagcgctgcagccgccgcccagcagggcggctacgaaatcccagcacgactgcgcactctgcataatctggtaatccagtacgcatctcagggtagatacgaagtggctgtgccattatgtaaacaggccctcgaggatcttgagaagactagcgggcatgatcatccggatgttgctacaatgctgaatatccttgcccttgtttacagggaccaaaacaagtataaagacgcagcgaacctcctgaacgatgcactggctataagagagaaaaccttaggaaaagatcaccccgctgtggcagctactctcaataacttagccgtcctctatgggaaaagggggaagtataaggaggcggagcccctatgcaaaagggccttggagattcgtgagaaggtgctgggcaaagatcacccagacgtcgctaagcaactgaacaacctggcactgttgtgccaaaaccaaggcaagtacgaggaggtggagtattattaccagcgtgccctcgaaatctaccagactaagcttggacccgacgatcccaacgtagctaagaccaagaataaccttgccagctgttacctaaagcagggaaagttcaagcaggccgagactctttataaggaaattctgacccgcgcgcacgaacgggaatttggatctgtggacgacgagaacaaacctatttggatgcacgctgaggagagggaagaatgcaaaggaaagcaaaaagacggaacaagcttcggtgaatatgggggctggtacaaagcgtgcaaggtcgacagtcccaccgtgaccaccaccctgaaaaacctgggggcactctatcgcagacaaggtaagttcgaggcggcagaaacactcgaggaagccgccatgcgatcgagaaaacaacgtagcatatccgagatccctaagaagatattaagcgcgaacgggagtaaccatttcccccttccaggtagtcaaggcctggataatgttcacaaacagcgggttgccgaggtcttaaacgatcctgagaacatggagaaaaggagaagccgggagtccctcaacgtcgatgttgtcaaatatgaatctggaccagacgggggagaggaaatgaggaagatgaagctcgggctcgtcaactag

SEQ ID NO: 157288 - DNA, 1683 bp, Artificial Sequence
  derived and/or modified sequence
atgtacgacaacatgagcaccatggtgtacatcaaggaggacaagctcgagaaactcactcaggacgaaataataagtaaaacgaagcaggttatccagggactggaggcactcaagaacgagcataattctattttgcagagcctgctggaaactttgaagtgccttaagaaggatgacgagtctaatctggtggaagaaaagagcaacatgatcagaaaatctttggaaatgctcgaattgggactatctgaagcgcaggtaatgatggcattaagtaatcacttgaatgccgttgaaagcgagaagcagaagctccgggctcaggtgcgccgtctctgccaagaaaaccagtggctccgcgatgagttggccaatacccagcaaaaactacaaaaatcagaacaatccgtcgcccagctggaagaagaaaagaaacacctagaattcatgaaccagctgaagaagtatgacgacgacatatcgcccagcgaggacaaggacacggactcaacaaaagagccgctggacgacctgtttcccaacgacgaggatgatcccgggcagggaattcagcagcaacactccagcgctgccgcagctgcacagcaggggggctacgagatccctgcaagactgaggactcttcacaaccttgtgatccagtatgccagtcagggccgctacgaggttgcagtaccactctgcaaacaggccctcgaagatctggagaagacttctggccatgaccatcccgacgtggctactatgctgaacatcctcgccctggtctatagagatcagaataagtacaaagacgctgcgaacttacttaatgacgcacttgcaatcagagagaaaaccttgggaaaggatcatccagcagttgccgcaaccttaaataacctggccgttctgtatggcaaacgcggcaaatataaagaagccgaacccttatgcaaaagggcgctcgaaattcgggagaaagtacttggcaaagatcaccccgacgtggccaagcagctaaataacttggccctcctgtgtcagaaccaaggaaagtatgaagaagtagaatactactaccagcgggcacttgagatctatcagacaaaactaggcccagacgaccctaacgtggcgaagaccaagaacaatctggccagctgctacctgaagcagggcaagttcaagcaggcagaaaccctgtacaaagaaatactaactagggctcatgaaagagagtttggctctgtggacgacgagaataagcctatatggatgcacgcagaagaaagagaggaatgcaaaggaaagcaaaaggatgggacgtcgtttggtgagtatggcgggtggtacaaggcctgcaaggtggattcaccaacggtgactaccaccctgaagaaccttggcgccctatacagacgccagggcaagtttgaggccgccgagacactggaagaggcagcgatgcgatcgcggaagcagggtcttgacaacgttcacaagcagcgtgtggcggaggtattaaatgatcccgaaaacatggaaaagaggcggtccagggagtcattaaacgtggatgtcgtgaaatacgagagcggacccgatggcggagaagaggtttctatgtctgtggaatggaatggcatgcgtaaaatgaagctaggtctggtaaactag

SEQ ID NO: 157289 - DNA, 1683 bp, Artificial Sequence
  derived and/or modified sequence
atgtacgacaacatgagcaccatggtgtacatcaaggaggacaagctggaaaagttaacacaggacgaaattatttcaaaaaccaagcaggtaattcaaggccttgaagccctgaagaacgaacacaactctatcctgcagagcctcctggagaccctcaaatgcctgaagaaggacgacgagtccaacctcgtggaagaaaaaagcaatatgatccgaaaatcactggaaatgctagagcttgggctctcagaagcccaggtaatgatggccctctctaatcacttgaatgctgttgagtctgagaagcaaaaactgcgggcacaggtgcggcgactctgtcaggagaatcagtggttgagagatgaactggctaacacgcagcaaaagctccagaagagcgaacagagtgtggcccagctcgaggaggagaagaaacacctagaattcatgaatcagctcaagaagtatgacgacgacattagtccatcagaggacaaagatacagacagcactaaggagcctttggatgacttattccctaatgatgaggatgaccccggccagggcatacagcagcagcatagctccgccgctgccgcggcacagcagggtggatatgagattcccgcccgcctgaggaccctgcataatctcgtcatccaatatgcctcacagggacgatacgaggtggccgtgccactttgtaagcaggcactggaagacctcgagaaaacatcagggcacgaccaccctgatgtggccactatgctaaacatcctggcactggtgtaccgggatcagaacaaatataaggacgccgcaaacctgctcaatgacgccctggctattcgcgaaaaaactctcggcaaggaccacccggccgtcgccgctactctgaataatctggcagtcttgtatgggaaacgcggcaagtacaaggaggcagagcccttgtgcaagagggcattagaaattcgggaaaaggtgctaggcaaagaccaccctgacgttgcaaagcagctgaacaacctggcgctcctgtgccagaatcagggtaaatacgaagaggtcgagtactactatcaacgagcactggaaatctaccagactaagctcggcccagatgatccaaatgtggctaagaccaaaaataatcttgcttcttgttatctgaagcagggaaaattcaaacaagccgagacactgtacaaggaaatactaactagggcccacgagcgcgaatttggatccgtcgacgacgaaaacaagccaatttggatgcatgctgaagaacgggaagagtgcaaagggaagcagaaggatggcacctcctttggagagtatggtggatggtataaagcctgtaaagtcgactccccaacagttaccaccacactgaaaaatttgggggcactgtaccgcaggcaggggaaattcgaagccgccgaaacccttgaggaggccgctatgcgaagtaggaagcaagggctagataatgtgcacaagcagcgcgtggccgaggttctcaacgatcctgaaaacatggagaaacggcgaagtcgtgaatcgctgaacgtcgacgtggttaagtacgaatccggacccgatggcggagaggaggtgtccatgagtgtggagtggaacggtatgagaaaaatgaagcttggcctggtgaactag

SEQ ID NO: 157290 - DNA, 396 bp, Artificial Sequence
  derived and/or modified sequence
tgagagaacaagcccatctggatgcacgccgaggagcgggaggagtgcaagggcaagcagaaggacgggactagttttggtgaatatgggggatggtataaggcgtgcaaagtcgactcacctaccgtgacaacaacgctgaaaaacttaggagctttatacaggcgccaaggcaagtttgaagccgccgagactctggaggaggccgcaatgaggagtcgcaagcaggggttagacaatgtgcacaaacaaagggtagcggaagtgctcaacgatcccgagaatatggagaagcggaggtccagagagagcctgaacgttgatgttgtcaaatatgagtccggccctgacggcggagaagagatgcgtaaaatgaagctgggactggtcaactag

SEQ ID NO: 157291 - DNA, 453 bp, Artificial Sequence
  derived and/or modified sequence
atgtacgacaacatgagcaccatggtgtacatcaaggaggacaagcttgaaaagctcacacaggacgagatcatctctaagacaaaacaggtcattcaggggctggaggcgctgaaaaacgagcacaactctatactccagtctctcctggaaacccttaaatgcctgaaaaaggacgatgagtctaatctcgtggaagaaaaatctaacatgatacgaaagtctctggaaatgttggaacttgggctttccgaggcccaggttatgatggcgctctcaaatcacctcaacgccgttgagtcagagaaacagaaactgcgcgcacaggtgaggcgcctttgccaagagaaccagtggctgcgggatgagctggcgaacactcagcagaagcttcagaagagcgaacagagcgtcgcacagctggaagaggaaaagaaacacctggaattctag

SEQ ID NO: 157292 - DNA, 1731 bp, Artificial Sequence
  derived and/or modified sequence
atgtacgacaacatgagcaccatggtgtacatcaaagaagacaagctggagaaattgacacaagatgagattattagtaaaacaaagcaggtcattcagggactggaggccttaaaaaacgagcacaactccatcttacagtccctgctcgagaccctcaagtgcctgaagaaggacgatgagtctaaccttgtggaagagaaaagcaacatgattcggaagtctcttgagatgctcgagctggggctgtcagaggctcaagtgatgatggcgttatccaatcacttgaatgcagtggagagtgagaagcagaagctgagagcccaggtccgacggctctgccaagaaaatcaatggctccgcgatgaattggctaatacccagcagaagttgcaaaagagcgagcagagcgtggcgcagttagaagaagagaagaaacacctggagttcatgaaccaactgaaaaaatacgacgacgatattagtccctctgaggataaagataccgactctaccaaggagcctctggatgacttatttccgaatgatgaagacgatcccggacaggggatccagcaacagcactcatcagcagccgctgccgctcaacaaggcggatatgagattcctgcaaggctgcggacactacacaatttggtgatccagtatgcatcccagggcaggtacgaagtggctgtccctttgtgcaaacaggcactggaagacctcgagaaaacatcgggtcacgatcacccggatgttgcaaccatgctgaatatcttggctctggtgtatcgcgatcagaacaaatacaaggatgccgctaatcttctcaacgatgccctcgcaattcgcgaaaagactttgggcaaagatcaccctgctgtcgctgctacgctgaacaacctcgccgtcctgtacggaaagaggggcaaatacaaagaggctgagccactctgtaagcgggctttggaaatcagagagaaagtgctgggcaaggatcatccagacgtcgcaaaacaactgaataatctggctctcttatgtcaaaaccagggcaaatatgaagaggtggaatactattaccagcgcgcactggagatttatcagacaaaattaggccctgacgatccgaacgttgcgaagaccaagaataacctcgcgtcatgctacctgaaacaaggtaagttcaaacaggccgagaccctatacaaggagatcctgactagagcacacgagcgggagttcggatctgttgacgacgaaaacaagccaatctggatgcatgcagaggaaagggaagaatgtaagggcaagcaaaaggacggcacaagtttcggggaatacggcggttggtataaggcctgtaaagtggatagtcctactgtgaccactacactgaaaaatctgggggctctttacaggcggcagggaaaatttgaggcagccgagaccctggaagaggcggctatgagaagccgcaagcagaggagtatatccgagattccaaagaagatcctctcggcaaatgggagcaaccacttccctctgcctgggagccaaggtctagataacgttcacaaacagagagtagccgaggtcttaaatgacccggagaatatggaaaagcggaggtcccgggagtctttgaatgtcgatgtggtcaagtacgaaagcggtcctgatggtggagaagagatgcggaagatgaaactaggcctcgttaattag

SEQ ID NO: 157293 - DNA, 1683 bp, Artificial Sequence
  derived and/or modified sequence
atgtatgacaacatgtccacgatggtctacataaaggaggataaactcgaaaagctgacacaggacgagattatatctaaaacaaagcaggtgatccaggggctggaggcactgaaaaacgaacataatagcatactgcagtctctgctagagacactgaagtgcttaaagaaagatgacgaatccaacttagtcgaagagaagtctaatatgatacgaaagtcactggaaatgctggagctggggttgagcgaagcccaagtcatgatggccctatctaatcacttgaatgcagtggaatctgagaagcaaaaactgcgcgcacaggtgcgacgactctgtcaagagaaccagtggctcagggacgaattggcaaacacccagcaaaagttgcagaagagcgaacaatccgttgcccaacttgaggaagaaaaaaagcatcttgagttcatgaatcagctgaagaagtatgatgacgatatttccccttcagaagacaaagacacggattctaccaaggaacccctggacgacctgtttcccaatgatgaggatgatcccggacaggggatccaacagcagcactcctcagccgctgccgcagcacagcaaggaggatatgaaataccagcccgtctgcgaaccctgcataatctggtgatacagtacgcctcccaaggtagatatgaggtggcagtgcccctttgcaaacaggcgctggaggatctggaaaaaacaagcgggcacgatcacccagatgtggccacaatgctgaatattcttgccttggtttaccgggaccaaaataagtacaaagatgctgcaaacttgctcaacgatgcactcgctataagagaaaagaccctggggaaagatcaccctgccgttgcagctacattgaataacctggccgtcctgtatggcaagagaggcaagtataaggaggcagagcctctgtgcaaaagagctctggaaatccgcgagaaggttcttgggaaggatcatccagacgtcgcaaagcagctgaacaatctggccctgttgtgccagaaccaaggaaaatatgaggaagtggagtattattatcagagggccctggagatataccagaccaagttaggtcccgacgacccaaacgtggctaagaccaagaacaacctggcgagctgctatctcaagcaagggaagtttaaacaggcggaaactctgtacaaggagatccttacacgagcacatgagcgcgagtttgggtcagtcgacgatgaaaacaaacctatctggatgcatgcagaggagagagaggagtgtaagggtaagcagaaggacgggactagcttcggtgagtacggcggttggtacaaagcctgcaaggtggactctccaacggttactacaaccttgaagaatctgggagcgctgtatagaagacagggcaaattcgaagctgctgagaccctcgaggaggctgcaatgcgctcacgaaagcaggggctcgacaatgtgcacaagcaacgagtggccgaagtacttaacgatcctgagaatatggagaagaggagatcaagagagtccctgaatgtggacgtagtgaagtatgagtctggtcccgacgggggtgaggaggtgtctatgtccgtggaatggaacgggatgaggaaaatgaagcttggcttggttaactag

SEQ ID NO: 157294 - DNA, 1683 bp, Artificial Sequence
  derived and/or modified sequence
atgtacgacaatatgtccacgatggtgtacataaaggaagataagctcgagaagctgacacaggatgagattatatcaaagactaaacaggtgatccagggtctggaggctcttaagaacgaacataatagcatcttacagtcactgctggaaaccctgaaatgcctgaaaaaagatgacgaaagcaacctggtggaagaaaagtccaatatgatacgaaaatctctggaaatgctagaactgggcctgtctgaggcccaggtgatgatggcactttcgaatcacttgaacgcggtcgagagtgaaaagcagaaacttcgcgctcaggtaaggcgactgtgccaggaaaaccagtggctccgagatgaactcgcaaacacccagcaaaagcttcagaaatctgagcaaagtgtggcccagctcgaggaagagaaaaagcacttagagttcatgaatcaactcaaaaaatacgatgatgatatctccccctccgaggacaaggacactgattctacgaaagagccattggacgatctgttccccaacgatgaggacgatcccggacagggcatccaacaacagcacagttctgccgctgcagctgcacaacagggagggtacgaaattccagctcgcctccggaccctgcacaatttggtcatccagtatgcatctcaaggccgatacgaagtggctgtgccactctgtaagcaagccttggaagacctggagaagacttctgggcacgaccacccagatgtcgccacgatgctgaacattctggccctggtctatagggatcagaataagtacaaggatgccgctaacttgctgaacgatgcactggccattcgcgagaaaactttggggaaagatcacccagcggtggccgctaccctgaacaatcttgccgtgctttatggcaagaggggaaagtacaaggaggccgaacccctgtgtaagagggccctcgagatacgtgagaaagtcctcggaaaggaccatcccgatgtggccaagcagctgaacaatctggcccttctctgccagaaccagggcaaatatgaggaagtggaatactattatcagagagcgcttgagatctaccaaaccaagctgggcccagacgacccgaacgtggctaaaacgaagaacaacctagcgagttgttatctgaaacaaggcaaatttaagcaggccgagacactgtacaaggagatccttactagggcacacgaaagggagttcgggtccgtggatgacgagaataaaccaatttggatgcatgccgaggaaagggaggagtgcaaggggaaacagaaagatggtacctcttttggcgagtatggtggatggtacaaggcttgtaaggtggactcaccaacggtgacaacaactctgaagaaccttggcgcactatacaggcggcagggcaagttcgaagcggcagagacactggaagaagccgctatgcgtagtcgcaagcagggactggataacgtgcacaaacagagagttgcggaggtgttgaacgatcccgaaaacatggagaagaggcgctcacgagagagtctcaatgtggatgtggtcaagtacgaaagcggtcctgacggtggcgaagaagtttccatgtctgttgaatggaacggcatgagaaagatgaaactgggtctcgtcaattag

SEQ ID NO: 157295 - DNA, 396 bp, Artificial Sequence
  derived and/or modified sequence
taggagaataaaccgatctggatgcacgcagaagagagagaagaatgtaaagggaaacagaaggacgggacatcatttggagagtatgggggatggtataaagcgtgtaaagtggactctccaactgttacaaccacccttaagaaccttggtgccctgtatagaaggcaggggaaattcgaggcggctgagacattagaggaagcggcaatgcggtcccggaaacagggtctggataatgtgcacaagcagcgggtggctgaggttcttaatgatccagagaatatggagaagcgaaggtctagggaatctctgaacgttgacgtggtgaagtacgaatcgggaccggacggcggtgaggaaatgagaaagatgaagttgggtcttgtcaattag

SEQ ID NO: 157296 - DNA, 453 bp, Artificial Sequence
  derived and/or modified sequence
atgtatgataacatgagtactatggtctacatcaaggaagataagttggaaaaactgacccaggatgagatcattagcaagaccaagcaagttatccagggtttagaagctttaaaaaatgagcataattccattttgcaatcactcttggagactttgaaatgtctcaaaaaagatgatgagtctaatttggtggaggaaaaatcaaatatgatccgcaaatcattggagatgttggagctgggtttgagcgaagcacaggtcatgatggcacttagtaatcacttgaatgcggttgagagcgagaaacagaaactgagagcccaagtgaggaggctgtgtcaggaaaaccaatggctccgggatgagctggccaatactcagcagaaattacagaagtcagaacagtccgtagcccaattggaggaggagaagaagcatttggaattctag

SEQ ID NO: 157297 - DNA, 1731 bp, Artificial Sequence
  derived and/or modified sequence
atgtacgacaacatgagcaccatggtgtacatcaaggaggacaagctggagaagctgacccaggacgagatcatcagcaagaccaagcaggtgatccagggcctggaggccctgaagaacgagcacaacagcatcctgcagagcctgctggagaccctgaagtgcctgaagaaggacgacgagagcaacctggtggaggagaagagcaacatgatcagaaagagcctggagatgctggagctgggcctgagcgaggcccaggtgatgatggccctgagcaaccacctgaacgccgtggagagcgagaagcagaagctgagagcccaggtgagaagactgtgccaggagaaccagtggctgagagacgagctggccaacacccagcagaagctgcagaagagcgagcagagcgtggcccagctggaggaggagaagaagcacctggagttcatgaaccagctgaagaagtacgacgacgacatcagccccagcgaggacaaggacaccgacagcaccaaggagcccctggacgacctgttccccaacgacgaggacgaccccggccagggcatccagcagcagcacagcagcgccgccgccgccgcccagcagggcggctacgagatccccgccagactgagaaccctgcacaacctggtgatccagtacgccagccagggcagatacgaggtggccgtgcccctgtgcaagcaggccctggaggacctggagaagaccagcggccacgaccaccccgacgtggccaccatgctgaacatcctggccctggtgtacagagaccagaacaagtacaaggacgccgccaacctgctgaacgacgccctggccatcagagagaagaccctgggcaaggaccaccccgccgtggccgccaccctgaacaacctggccgtgctgtacggcaagagaggcaagtacaaggaggccgagcccctgtgcaagagagccctggagatcagagagaaggtgctgggcaaggaccaccccgacgtggccaagcagctgaacaacctggccctgctgtgccagaaccagggcaagtacgaggaggtggagtactactaccagagagccctggagatctaccagaccaagctgggccccgacgaccccaacgtggccaagaccaagaacaacctggccagctgctacctgaagcagggcaagttcaagcaggccgagaccctgtacaaggagatcctgaccagagcccacgagagagagttcggcagcgtggacgacgagaacaagcccatctggatgcacgccgaggagagagaggagtgcaagggcaagcagaaggacggcaccagcttcggcgagtacggcggctggtacaaggcctgcaaggtggacagccccaccgtgaccaccaccctgaagaacctgggcgccctgtacagaagacagggcaagttcgaggccgccgagaccctggaggaggccgccatgagaagcagaaagcagagaagcatcagcgagatccccaagaagatcctgagcgccaacggcagcaaccacttccccctgcccggcagccagggcctggacaacgtgcacaagcagagagtggccgaggtgctgaacgaccccgagaacatggagaagagaagaagcagagagagcctgaacgtggacgtggtgaagtacgagagcggccccgacggcggcgaggagatgagaaagatgaagctgggcctggtgaactag

SEQ ID NO: 157298 - DNA, 1683 bp, Artificial Sequence
  derived and/or modified sequence
atgtacgacaacatgagcaccatggtgtacatcaaggaggacaagctggagaagctgacccaggacgagatcatcagcaagaccaagcaggtgatccagggcctggaggccctgaagaacgagcacaacagcatcctgcagagcctgctggagaccctgaagtgcctgaagaaggacgacgagagcaacctggtggaggagaagagcaacatgatcagaaagagcctggagatgctggagctgggcctgagcgaggcccaggtgatgatggccctgagcaaccacctgaacgccgtggagagcgagaagcagaagctgagagcccaggtgagaagactgtgccaggagaaccagtggctgagagacgagctggccaacacccagcagaagctgcagaagagcgagcagagcgtggcccagctggaggaggagaagaagcacctggagttcatgaaccagctgaagaagtacgacgacgacatcagccccagcgaggacaaggacaccgacagcaccaaggagcccctggacgacctgttccccaacgacgaggacgaccccggccagggcatccagcagcagcacagcagcgccgccgccgccgcccagcagggcggctacgagatccccgccagactgagaaccctgcacaacctggtgatccagtacgccagccagggcagatacgaggtggccgtgcccctgtgcaagcaggccctggaggacctggagaagaccagcggccacgaccaccccgacgtggccaccatgctgaacatcctggccctggtgtacagagaccagaacaagtacaaggacgccgccaacctgctgaacgacgccctggccatcagagagaagaccctgggcaaggaccaccccgccgtggccgccaccctgaacaacctggccgtgctgtacggcaagagaggcaagtacaaggaggccgagcccctgtgcaagagagccctggagatcagagagaaggtgctgggcaaggaccaccccgacgtggccaagcagctgaacaacctggccctgctgtgccagaaccagggcaagtacgaggaggtggagtactactaccagagagccctggagatctaccagaccaagctgggccccgacgaccccaacgtggccaagaccaagaacaacctggccagctgctacctgaagcagggcaagttcaagcaggccgagaccctgtacaaggagatcctgaccagagcccacgagagagagttcggcagcgtggacgacgagaacaagcccatctggatgcacgccgaggagagagaggagtgcaagggcaagcagaaggacggcaccagcttcggcgagtacggcggctggtacaaggcctgcaaggtggacagccccaccgtgaccaccaccctgaagaacctgggcgccctgtacagaagacagggcaagttcgaggccgccgagaccctggaggaggccgccatgagaagcagaaagcagggcctggacaacgtgcacaagcagagagtggccgaggtgctgaacgaccccgagaacatggagaagagaagaagcagagagagcctgaacgtggacgtggtgaagtacgagagcggccccgacggcggcgaggaggtgagcatgagcgtggagtggaacggcatgagaaagatgaagctgggcctggtgaactag

SEQ ID NO: 157299 - DNA, 396 bp, Artificial Sequence
  derived and/or modified sequence
tgagagaacaagcccatctggatgcacgccgaggagagagaggagtgcaagggcaagcagaaggacggcaccagcttcggcgagtacggcggctggtacaaggcctgcaaggtggacagccccaccgtgaccaccaccctgaagaacctgggcgccctgtacagaagacagggcaagttcgaggccgccgagaccctggaggaggccgccatgagaagcagaaagcagggcctggacaacgtgcacaagcagagagtggccgaggtgctgaacgaccccgagaacatggagaagagaagaagcagagagagcctgaacgtggacgtggtgaagtacgagagcggccccgacggcggcgaggagatgagaaagatgaagctgggcctggtgaactag

SEQ ID NO: 157300 - DNA, 453 bp, Artificial Sequence
  derived and/or modified sequence
atgtacgacaacatgagcaccatggtgtacatcaaggaggacaagctggagaagctgacccaggacgagatcatcagcaagaccaagcaggtgatccagggcctggaggccctgaagaacgagcacaacagcatcctgcagagcctgctggagaccctgaagtgcctgaagaaggacgacgagagcaacctggtggaggagaagagcaacatgatcagaaagagcctggagatgctggagctgggcctgagcgaggcccaggtgatgatggccctgagcaaccacctgaacgccgtggagagcgagaagcagaagctgagagcccaggtgagaagactgtgccaggagaaccagtggctgagagacgagctggccaacacccagcagaagctgcagaagagcgagcagagcgtggcccagctggaggaggagaagaagcacctggagttctag

SEQ ID NO: 157301 - protein, 169 aa, Artificial Sequence
  derived and/or modified sequence
MGCCGCSGGCGSSCGGCDSSCGSCGSGCRGCGPSCCAPVYCCKPVCCCVPACSCSSCGKRGCGSCGGSKGGCGSCGCSQCSCCKPCCCSSGCGSSCCQCSCCKPYCSQCSCCKPCCSSSGRGSSCCQSSCCKPCCSSSGCGSSCCQSSCCKPCCSQSRCCVPVCYQCKI

SEQ ID NO: 157302 - DNA, 492 bp, Artificial Sequence
  derived and/or modified sequence
atgacccaccccctgccccacgacagccacaccagcggcgccccccccctggtgaacaagagcagagacctggccaacggcccccccttcttcagccccctgcagagcctgtgggaggagttcctgcacctgctgttcatgggcaccctgctgttctacagaatcgccaccaaggccctgagaggcaaggccaccctgctgaagagccacagcaagcagcccgcccagcccggctgggagcccggcatcagagcccccagccccgtgcccgccagcagcctgcaggaccacagcagactgaccagcctgagcagaaccggcaaggagcagagaagaaccctgagcctgatcagaaagaccagcggcacccccaccgagagcaccgtggccaccgccgccgccagcaccaccgaggtgcccagcagactgccctgggccgccagagccggcttcaagagaaccaccggcgtgtgcatcgccctgcccacctag

SEQ ID NO: 157303 - DNA, 459 bp, Artificial Sequence
  derived and/or modified sequence
atgcccagccagccccacctgagcgcctgcagcgtggagagccccggcgccgccgccagactgacccagagacacctgaccggcgtggccagaggcggcggccagaccggcaccttccacatgggcctgctgcccagcagacaggagtgcgcccccgtgagcgccctgaccctgaccaccaccatgggcagactgttcagcgtgcactggcagatctggggcccctgcagcccctgcatcgtgtaccccaagggcgacagcgagcagagcgccagcaagagcaagcaggccttccccctgctgctgagaaagggcatggagtggcccctgagcgcctggctggagagcagcagccccgccccctgcatgcccctgtggagaagaaacagcttctgggagagcagacccagcccctgcagaatcagaggcctgtgcagcatgagaccccacggcctgtag

SEQ ID NO: 157304 - DNA, 540 bp, Artificial Sequence
  derived and/or modified sequence
atgggctcctggcactgggagtggtatggagcccccaccagcaccctgagcctgggctgcctgctgctgcccggggagaagtggaccttcctgatcctgcccagccactacggcaccaccacccacgcccacagcctgcagggctgtgtggagcggcagtggcaggacagcaagcagctggccatcagccctggccccaccctgctgcggagtgaatatgtgggcagcctgagccctgtgtgcagcagcctgacccaggtgcaccgggtgccctggggccagcaccgggcctgccctgtgatgctgctggtgttcaccaagtggctgcagcgctacctgcactttgagaagccagctgagcccgcctctgtgggccaggaccctgacttcttcggcaagtctgagggggagcgggccacctgcctgctgagccgcagctgcctgtacctggcctctgtgtgcaacctgcgggagaatgacagctgcatgggccgcagcggcggcaccgggaagagtgacctgcccggcagctgcaggtag

SEQ ID NO: 157305 - DNA, 459 bp, Artificial Sequence
  derived and/or modified sequence
atgcccagccagccccacctgagcgcctgcagcgtggagagccctggagctgctgcccggctgacccagaggcacctgactggagtggcccggggcggcggccagacaggcaccttccacatgggcctgctgcccagccggcaggagtgtgcccctgtgtctgccctgaccctgaccaccaccatgggccgcctcttctctgtgcactggcagatctggggcccctgcagcccctgcatcgtgtaccccaagggggacagcgagcagagcgccagcaagagcaagcaggccttccccctgctgctgaggaagggcatggagtggcccctgagcgcctggctggagagcagcagccctgccccctgcatgcccctgtggaggaggaacagcttctgggagagccggcccagcccctgccgcatccggggcctgtgcagcatgaggccccacggcctgtag

SEQ ID NO: 157306 - protein, 564 aa, Artificial Sequence
  derived and/or modified sequence
MASTSTTIRSHSSSRRGFSANSARLPGVSRSGFSSVSVSRSRGSGGLGGACGGAGFGSRSLYGLGGSKRISIGGGSCAISGGYGSRAGGSYGFGGAGSGFGFGGGAGIGFGLGGGAGLAGGFGGPGFPVCPPGGIQEVTVNQSLLTPLNLQIDPTIQRVRAEEREQIKTLNNKFASFIDKVRFLEQQNKVLETKWTLLQEQGTKTVRQNLEPLFEQYINNLRRQLDSIVGERGRLDSELRGMQDLVEDFKNKYEDEINKRTAAENEFVTLKKDVDAAYMNKVELQAKADTLTDEINFLRALYDAELSQMQTHISDTSVVLSMDNNRNLDLDSIIAEVKAQYEEIAQRSRAEAESWYQTKYEELQVTAGRHGDDLRNTKQEIAEINRMIQRLRSEIDHVKKQCANLQAAIADAEQRGEMALKDAKNKLEGLEDALQKAKQDLARLLKEYQELMNVKLALDVEIATYRKLLEGEECRLNGEGVGQVNISVVQSTVSSGYGGASGVGSGLGLGGGSSYSYGSGLGVGGGFSSSSGRAIGGGLSSVGGGSSTIKYTTTSSSSRKSYKH

SEQ ID NO: 157307 - protein, 520 aa, Artificial Sequence
  derived and/or modified sequence
MASTSTTIRSHSGSRSLYGLGGSKRISIGGGSCAISGGYGSRAGGSYGFGGAGSGFGFGGGAGIGFGLGGGAGLAGGFGGPGFPVCPPGGIQEVTVNQSLLTPLNLQIDPTIQRVRAEEREQIKTLNNKFASFIDKVRFLEQQNKVLETKWTLLQEQGTKTVRQNLEPLFEQYINNLRRQLDSIVGERGRLDSELRGMQDLVEDFKNKYEDEINKRTAAENEFVTLKKDVDAAYMNKVELQAKADTLTDEINFLRALYDAELSQMQTHISDTSVVLSMDNNRNLDLDSIIAEVKAQYEEIAQRSRAEAESWYQTKYEELQVTAGRHGDDLRNTKQEIAEINRMIQRLRSEIDHVKKQCANLQAAIADAEQRGEMALKDAKNKLEGLEDALQKAKQDLARLLKEYQELMNVKLALDVEIATYRKLLEGEECRLNGEGVGQVNISVVQSTVSSGYGGASGVGSGLGLGGGSSYSYGSGLGVGGGFSSSSGRAIGGGLSSVGGGSSTIKYTTTSSSSRKSYKH

SEQ ID NO: 157308 - DNA, 1695 bp, Artificial Sequence
  derived and/or modified sequence
atggcaagcacgagcacaactatacggtctcattcctcatcccgaaggggcttttcagcaaactccgctcggttacccggggtcagtaggtctggctttagttcagtgtccgttagtcgctcacgcggctccggtggcctcgggggggcttgcggtggcgcaggattcggctcccggagcctctatgggctgggcgggtctaaacgaatctctatcggaggagggtcttgcgctatttccggaggctacggctctcgcgccggcggaagctacggttttgggggggcaggttctggatttggattcggaggcggtgccggaattggcttcggcctggggggaggggcaggacttgccggggggtttggcggcccaggctttcctgtgtgccctcctgggggtatccaagaagtgacagttaaccagtccctgctgaccccgctcaatctgcagattgacccaacgatacaacgtgtacgggcagaagagagagagcaaatcaagactctcaataacaaatttgctagcttcattgacaaggtgcggtttctcgagcaacaaaacaaggtcctggaaacaaaatggaccctgctccaggagcagggcaccaagacagtgcgacagaacttggaaccactgtttgaacagtatataaacaatttaaggcgccagctggattcaatcgtcggggaaagaggaagactggacagcgaacttagagggatgcaggatctcgtcgaggacttcaaaaacaaatacgaggacgaaatcaacaaacgaaccgccgctgagaacgaattcgtgacactcaaaaaagacgtcgacgcggcttacatgaataaagtggagctgcaggctaaggccgatactctgacagacgagattaatttcctccgggcactatacgatgcagaattgagccaaatgcagacacatatctccgacaccagcgtagtcctgtctatggataacaacagaaatctggacctcgatagcatcatcgccgaggtgaaagcccaatacgaggaaatcgcacaacgcagccgggctgaggccgaaagttggtaccaaacaaaatatgaggagctgcaggtgacggctggaagacacggagacgaccttaggaacacaaagcaggagatagcagaaatcaacagaatgatccagcggttacggagcgagattgatcacgtgaagaagcagtgcgctaatctgcaggctgcaattgctgatgcagaacagcgaggcgagatggctttgaaagacgcgaagaacaagcttgagggcctggaagatgcactccagaaagccaaacaagacctggcccggcttctgaaggagtaccaggagctgatgaacgtgaagttagctctcgatgtagaaatcgctacctatagaaaacttctggagggcgaggaatgcagactgaacggggaaggagtgggtcaagtaaacatttccgtcgtccagtctaccgtgagcagtggctacggcggagccagcggcgtgggaagcggtctcggactaggcggtgggtcaagctattcctatggatccgggctcggcgtcggtggtggattctccagctctagcgggagagctatcggcggaggcttatcgagtgttggtggtgggagtagcaccataaaatatactacaactagctcttcctcaagaaagagctacaagcactag

SEQ ID NO: 157309 - DNA, 1563 bp, Artificial Sequence
  derived and/or modified sequence
atggcctctacatccaccaccattaggagccacagtggcagtcgttccctgtacgggttagggggaagcaagaggatatccatcggagggggcagttgcgccatatctggcggctatggcagcagagcagggggtagctatggattcgggggagccggctccgggttcgggttcgggggtggcgctggcatcggcttcggactgggcggaggtgcagggctggctggcggatttggagggcctggatttcctgtgtgtccccctggcggaattcaagaagttacagtgaatcagtccctcttaacacctctcaatctccagatcgaccctaccatccagagggttagagccgaggagagagagcagatcaaaacgctgaacaacaaattcgcatccttcatagataaagtcagatttcttgaacagcagaacaaggtgctggagacaaagtggacgctgttgcaggaacaagggacgaaaaccgtgcgacagaacctcgagccgcttttcgagcagtacattaataacctgaggagacaactcgattctattgtgggcgagagaggaaggctggacagtgagctgagaggtatgcaagatctggttgaggacttcaagaacaaatacgaggacgaaataaataagaggacagcagctgagaatgagtttgtcactttaaaaaaggacgttgacgcagcctatatgaataaagtggagctgcaggcaaaggccgacaccctaactgacgaaattaactttcttagggcgctgtatgacgcagaactgtcccaaatgcagacacacattagcgacactagcgtcgtgctctccatggataataatcggaacctcgacctcgactctatcatcgcagaggtgaaagcacagtatgaggagattgcccagcgttcccgcgcagaagccgaaagctggtatcaaaccaaatacgaggagctgcaggttacagcaggtaggcacggcgatgatctgcgcaatactaagcaggaaatcgctgaaatcaataggatgattcagagattgagaagcgaaattgaccacgtcaaaaagcagtgcgcaaacctgcaggctgcaatcgcagatgccgaacaaagaggagagatggccttgaaagacgctaaaaacaagttagagggtctcgaggacgcccttcaaaaagccaaacaggatctcgcaagactgttaaaagagtatcaggaattaatgaacgtgaagcttgctttagacgttgagatcgctacttatagaaaactattagagggcgaagaatgtcggctcaacggggagggggtgggtcaggttaatatcagcgtcgtgcagtcgactgtgtctagtggctacgggggggccagtggtgtaggctctggactggggctgggcggaggatccagttattcctacggctccggacttggcgtcggcggaggcttctccagtagcagtggtcgagctattggaggcggcctctccagcgtgggaggcggaagcagcacgattaaatataccacgacatcatccagtagccgcaagagttacaagcattag

SEQ ID NO: 157310 - DNA, 2310 bp, Artificial Sequence
  derived and/or modified sequence
agtcctgcttctcttccctctctcctccagcctctcacactctcctcagctctctcatctcctggaaccatggccagcacatccaccaccatcaggagccacagcagcagccgccggggtttcagtgccaactcagccaggctccctggggtcagccgctctggcttcagcagcgtctccgtgtcccgctccaggggcagtggtggcctgggtggtgcatgtggaggagctggctttggcagccgcagtctgtatggcctggggggctccaagaggatctccattggagggggcagctgtgccatcagtggcggctatggcagcagagccggaggcagctatggctttggtggcgccgggagtggatttggtttcggtggtggagccggcattggctttggtctgggtggtggagccggccttgctggtggctttgggggccctggcttccctgtgtgcccccctggaggcatccaagaggtcaccgtcaaccagagtctcctgactcccctcaacctgcaaatcgatcccaccatccagcgggtgcgggctgaggagcgtgaacagatcaagaccctcaacaacaagtttgcctccttcatcgacaaggtgcggttcctggagcagcagaacaaggttctggaaacaaagtggaccctgctgcaggagcagggcaccaagactgtgaggcagaacctggagccgttgttcgagcagtacatcaacaacctcaggaggcagctggacagcattgtcggggaacggggccgcctggactcagagctcagaggcatgcaggacctggtggaggacttcaagaacaaatatgaggatgaaatcaacaagcgcacagcagcagagaatgaatttgtgactctgaagaaggatgtggatgctgcctacatgaacaaggttgaactgcaagccaaggcagacactctcacagacgagatcaacttcctgagagccttgtatgatgcagagctgtcccagatgcagacccacatctcagacacatctgtggtgctgtccatggacaacaaccgcaacctggacctggacagcatcatcgctgaggtcaaggcccaatatgaggagattgctcagagaagccgggctgaggctgagtcctggtaccagaccaagtacgaggagctgcaggtcacagcaggcagacatggggacgacctgcgcaacaccaagcaggagattgctgagatcaaccgcatgatccagaggctgagatctgagatcgaccacgtcaagaagcagtgcgccaacctgcaggccgccattgctgatgctgagcagcgtggggagatggccctcaaggatgccaagaacaagctggaagggctggaggatgccctgcagaaggccaagcaggacctggcccggctgctgaaggagtaccaggagctgatgaatgtcaagctggccctggacgtggagatcgccacctaccgcaagctgctggagggtgaggagtgcaggctgaatggcgaaggcgttggacaagtcaacatctctgtggtgcagtccaccgtctccagtggctatggcggtgccagtggtgtcggcagtggcttaggcctgggtggaggaagcagctactcctatggcagtggtcttggcgttggaggtggcttcagttccagcagtggcagagccattgggggtggcctcagctctgttggaggcggcagttccaccatcaagtacaccaccacctcctcctccagcaggaagagctataagcactaaagtgcgtctgctagctctcggtcccacagtcctcaggcccctctctggctgcagagccctctcctcaggttgcctttcctctcctggcctccagtctcccctgctgtcccaggtagagctgggtatggatgcttagtgccctcacttcttctctctctctctataccatctgagcacccattgctcaccatcagatcaacctctgattttacatcatgatgtaatcaccactggagcttcactgttactaaattattaatttcttgcctccagtgttctatctctgaggctgagcattataagaaaatgacctctgctccttttcattgcagaaaattgccaggggcttatttcagaacaacttccacttactttccactggctctcaaactctctaacttataagtgttgtgaacccccacccaggcagtatccatgaaagcacaagtgactagtcctatgatgtacaaagcctgtatctctgtgatgatttctgtgctcttcgctgtttgcaattgctaaataaagcagatttataatacaata

SEQ ID NO: 157311 - DNA, 2109 bp, Artificial Sequence
  derived and/or modified sequence
atggccagcacatccaccaccatcaggagccacagcggcagccgcagtctgtatggcctggggggctccaagaggatctccattggagggggcagctgtgccatcagtggcggctatggcagcagagccggaggcagctatggctttggtggcgccgggagtggatttggtttcggtggtggagccggcattggctttggtctgggtggtggagccggccttgctggtggctttgggggccctggcttccctgtgtgcccccctggaggcatccaagaggtcaccgtcaaccagagtctcctgactcccctcaacctgcaaatcgatcccaccatccagcgggtgcgggctgaggagcgtgaacagatcaagaccctcaacaacaagtttgcctccttcatcgacaaggtgcggttcctggagcagcagaacaaggttctggaaacaaagtggaccctgctgcaggagcagggcaccaagactgtgaggcagaacctggagccgttgttcgagcagtacatcaacaacctcaggaggcagctggacagcattgtcggggaacggggccgcctggactcagagctcagaggcatgcaggacctggtggaggacttcaagaacaaatatgaggatgaaatcaacaagcgcacagcagcagagaatgaatttgtgactctgaagaaggatgtggatgctgcctacatgaacaaggttgaactgcaagccaaggcagacactctcacagacgagatcaacttcctgagagccttgtatgatgcagagctgtcccagatgcagacccacatctcagacacatctgtggtgctgtccatggacaacaaccgcaacctggacctggacagcatcatcgctgaggtcaaggcccaatatgaggagattgctcagagaagccgggctgaggctgagtcctggtaccagaccaagtacgaggagctgcaggtcacagcaggcagacatggggacgacctgcgcaacaccaagcaggagattgctgagatcaaccgcatgatccagaggctgagatctgagatcgaccacgtcaagaagcagtgcgccaacctgcaggccgccattgctgatgctgagcagcgtggggagatggccctcaaggatgccaagaacaagctggaagggctggaggatgccctgcagaaggccaagcaggacctggcccggctgctgaaggagtaccaggagctgatgaatgtcaagctggccctggacgtggagatcgccacctaccgcaagctgctggagggtgaggagtgcaggctgaatggcgaaggcgttggacaagtcaacatctctgtggtgcagtccaccgtctccagtggctatggcggtgccagtggtgtcggcagtggcttaggcctgggtggaggaagcagctactcctatggcagtggtcttggcgttggaggtggcttcagttccagcagtggcagagccattgggggtggcctcagctctgttggaggcggcagttccaccatcaagtacaccaccacctcctcctccagcaggaagagctataagcactaaagtgcgtctgctagctctcggtcccacagtcctcaggcccctctctggctgcagagccctctcctcaggttgcctttcctctcctggcctccagtctcccctgctgtcccaggtagagctgggtatggatgcttagtgccctcacttcttctctctctctctataccatctgagcacccattgctcaccatcagatcaacctctgattttacatcatgatgtaatcaccactggagcttcactgttactaaattattaatttcttgcctccagtgttctatctctgaggctgagcattataagaaaatgacctctgctccttttcattgcagaaaattgccaggggcttatttcagaacaacttccacttactttccactggctctcaaactctctaacttataagtgttgtgaacccccacccaggcagtatccatgaaagcacaagtgactagtcctatgatgtacaaagcctgtatctctgtgatgatttctgtgctcttcgctgtttgcaattgctaaataaagcagatttataatacaata

SEQ ID NO: 157312 - DNA, 1695 bp, Artificial Sequence
  derived and/or modified sequence
atggccagcaccagcaccaccatccgcagccacagcagcagcagaagaggcttcagcgccaacagcgcccggctgcccggggtgagccgcagcggcttcagctctgtgtctgtgagccgcagccggggcagcggcggcctgggcggggcctgtggcggggccggcttcggcagccgcagcctgtatggcctgggcggcagcaagaggatcagcatcggcggcggcagctgtgccatcagcggcggctacggcagcagagctgggggcagctatggctttggaggagctggcagcggcttcggctttggaggaggagctggcatcggcttcggcctgggcggcggggccggcctggccggcggctttggaggccctggcttccctgtgtgccccccaggcggcatccaggaggtgacagtgaaccagagcctgctgacccccctgaacctgcagattgaccccaccatccagagggtgcgggcagaggagcgggagcagatcaagaccctgaacaacaagtttgccagcttcatcgacaaggtgcgcttcctggagcagcagaacaaggtgctggagaccaagtggaccctgctgcaggagcagggcaccaagacagtgcggcagaacctggagcccctgtttgagcagtacatcaacaacctgcggcggcagctggacagcatcgtgggggagcggggccgcctggacagcgagctgcggggcatgcaggacctggtggaggacttcaagaacaagtatgaagatgagatcaacaagaggacagctgctgaaaatgaatttgtgaccctgaagaaggatgtggatgctgcctacatgaacaaggtggagctgcaggccaaggctgacaccctgacagatgagatcaacttcctgcgggccctgtatgatgctgagctgagccagatgcagacccacatcagtgacacctctgtggtgctgtccatggacaacaacagaaacctggacctggacagcatcatcgccgaggtgaaggcccagtatgaggagatcgcccagaggagcagagctgaggccgagagctggtaccagaccaagtatgaggagctgcaggtgacagctggaagacatggagatgacctgaggaacaccaagcaggagattgctgagatcaacaggatgatccagaggctgcggagtgaaattgaccacgtgaagaagcagtgtgccaacctgcaggccgccatcgcagatgctgagcagagaggagagatggccctgaaggatgccaagaacaagctggagggcctggaggatgccctgcagaaggccaagcaggacctggcccggctgctgaaggagtaccaggagctgatgaatgtgaagctggccctggatgtggagatcgccacctacaggaagctgctggagggggaggagtgccgcctgaatggagagggcgtgggccaggtgaacatctctgtggtgcagagcacagtgagcagcggctatggaggagccagcggcgtgggcagcggcctgggcctgggcggcggcagcagctacagctatggcagcggcctgggcgtgggcggcggcttcagcagcagcagcggccgggccatcggcggcggcctgagctctgtgggcggcggcagcagcaccatcaagtacaccaccaccagcagcagcagcaggaagagctacaagcactag

SEQ ID NO: 157313 - DNA, 1563 bp, Artificial Sequence
  derived and/or modified sequence
atggccagcaccagcaccaccatccgcagccacagcggcagccgcagcctgtatggcctgggcggcagcaagaggatcagcatcggcggcggcagctgtgccatcagcggcggctacggcagcagagctgggggcagctatggctttggaggagctggcagcggcttcggctttggaggaggagctggcatcggcttcggcctgggcggcggggccggcctggccggcggctttggaggccctggcttccctgtgtgccccccaggcggcatccaggaggtgacagtgaaccagagcctgctgacccccctgaacctgcagattgaccccaccatccagagggtgcgggcagaggagcgggagcagatcaagaccctgaacaacaagtttgccagcttcatcgacaaggtgcgcttcctggagcagcagaacaaggtgctggagaccaagtggaccctgctgcaggagcagggcaccaagacagtgcggcagaacctggagcccctgtttgagcagtacatcaacaacctgcggcggcagctggacagcatcgtgggggagcggggccgcctggacagcgagctgcggggcatgcaggacctggtggaggacttcaagaacaagtatgaagatgagatcaacaagaggacagctgctgaaaatgaatttgtgaccctgaagaaggatgtggatgctgcctacatgaacaaggtggagctgcaggccaaggctgacaccctgacagatgagatcaacttcctgcgggccctgtatgatgctgagctgagccagatgcagacccacatcagtgacacctctgtggtgctgtccatggacaacaacagaaacctggacctggacagcatcatcgccgaggtgaaggcccagtatgaggagatcgcccagaggagcagagctgaggccgagagctggtaccagaccaagtatgaggagctgcaggtgacagctggaagacatggagatgacctgaggaacaccaagcaggagattgctgagatcaacaggatgatccagaggctgcggagtgaaattgaccacgtgaagaagcagtgtgccaacctgcaggccgccatcgcagatgctgagcagagaggagagatggccctgaaggatgccaagaacaagctggagggcctggaggatgccctgcagaaggccaagcaggacctggcccggctgctgaaggagtaccaggagctgatgaatgtgaagctggccctggatgtggagatcgccacctacaggaagctgctggagggggaggagtgccgcctgaatggagagggcgtgggccaggtgaacatctctgtggtgcagagcacagtgagcagcggctatggaggagccagcggcgtgggcagcggcctgggcctgggcggcggcagcagctacagctatggcagcggcctgggcgtgggcggcggcttcagcagcagcagcggccgggccatcggcggcggcctgagctctgtgggcggcggcagcagcaccatcaagtacaccaccaccagcagcagcagcaggaagagctacaagcactag

SEQ ID NO: 157314 - DNA, 1695 bp, Artificial Sequence
  derived and/or modified sequence
atggccagcaccagcaccaccatccggagccacagcagcagccggcggggcttctcggctaatagtgcccgcctgcccggcgtgtccagatctgggttctcttcagtgtcagtttcacgatcacgggggtccggcgggctgggcggcgcatgcggaggagctggttttgggtccagaagtctgtacggcctggggggttctaagagaatcagcatcggtggaggctcctgcgccatctcgggcgggtacggaagccgagccggaggaagttatggctttggaggtgctggtagcggattcgggttcggagggggcgctggcatcggtttcggtctgggaggcggggctgggctggctggtggattcgggggacctggattcccagtctgtcctcctgggggcatccaggaggtgactgtgaaccaatcacttttgacaccgctgaatctccagatagacccaacgatccagcgcgtccgagcagaagaaagagagcaaatcaagactctgaataacaaattcgcctcctttatcgataaggtgcggtttttagaacagcaaaataaggtgcttgagaccaagtggacactactccaagagcagggcaccaagaccgtgaggcagaacctcgagcctttattcgagcagtacatcaataatctgcgcagacaactcgatagcatcgtaggagagaggggcagacttgattctgaacttaggggaatgcaggatttggttgaagatttcaagaataagtacgaggatgaaataaataagaggaccgcagctgaaaacgagttcgtgacactgaagaaggatgttgacgccgcatatatgaataaggtcgaactgcaggccaaggcagacaccctgaccgacgaaattaatttcctgagggccctttatgacgccgagctatcccagatgcagacacatattagcgatacgtccgtggtcctgagtatggataacaataggaatttagacctagactcaatcattgctgaagttaaagcacagtacgaggaaattgcccagaggtctagagccgaggctgagagctggtatcaaacgaagtatgaggagctacaggtgacagccgggcggcatggcgatgatctccggaatacaaaacaggagatagctgagataaatcgtatgatacaacgattgcggtccgagattgaccacgtgaagaaacagtgcgccaatctccaagctgcaatagccgatgccgagcaaaggggcgaaatggccctaaaagatgcgaagaacaaattagagggcctcgaggacgccctacagaaagcaaagcaggacctggcacgcctgctcaaggaatatcaggagctcatgaatgtgaaactggcgctcgacgtggagattgctacttaccgtaagctcctggaaggagaggagtgtaggctgaatggggaaggcgtcggccaggtgaatatcagcgtggtgcagtctactgttagtagtggctacggaggtgccagcggcgttgggagcggactgggccttggtggtggctcaagctactcctatggcagcgggctcggcgtgggaggcggattctcttcctcatccggacgtgccattgggggtgggttaagctcagtggggggaggaagcagcaccattaagtatactactaccagctcctcgtcacggaaaagctacaagcactag

SEQ ID NO: 157315 - DNA, 1563 bp, Artificial Sequence
  derived and/or modified sequence
atggccagcaccagcaccaccatccggagccacagcggcagccggtctctctacggattggggggttcaaaacggatcagcattggcggcggaagctgtgcgatttctgggggctacggaagccgggcaggcggatcatatggcttcgggggagccgggtctgggtttggctttggaggaggcgccgggatcgggtttggcctcgggggcggagccggcctggccggggggtttggcggacctgggttccctgtttgcccccccggaggaattcaagaggtcactgtcaatcaatctctcttgacccccctgaacttgcagatcgatcctacgatccagcgtgtcagggcggaagaaagagaacagattaagactctcaataataagtttgctagcttcatcgataaggtgcggttccttgagcagcagaacaaagtgcttgaaacaaagtggactcttctccaagagcaaggcacaaagacagtgcgtcagaacctggaacccctctttgaacagtacataaataaccttagacggcagctagactccattgtaggggagcggggaaggctcgacagtgaactgcggggcatgcaagatttagttgaggactttaaaaataagtatgaggacgaaatcaataagcgcaccgccgctgaaaacgagtttgtcacattgaagaaggacgtcgacgccgcctacatgaacaaggtggaactgcaggctaaggccgacacccttaccgacgaaattaactttcttagggcgttgtatgatgcagaactgtcacagatgcaaactcatattagcgataccagcgtggtgctctctatggataataatcggaacctggaccttgactccattatcgctgaggtgaaggctcagtatgaagagattgctcagcgctcccgggcggaagcagaaagctggtaccaaacgaagtatgaagagctgcaagttacagcgggcagacacggagacgacctccgaaacacgaagcaagagatagccgaaatcaacaggatgattcagaggttacgttctgagatcgaccatgtcaaaaagcaatgtgccaatctgcaagccgcaatagctgatgcggagcaaagaggcgagatggccttaaaagatgctaagaacaagctggagggactcgaggacgccctgcagaaggcaaaacaggatttagcaagacttctgaaggaatatcaggagctcatgaacgtgaagctggccctggatgtggagatcgcgacttatcgaaaacttctggagggcgaagaatgccgattgaatggcgaaggcgtgggccaggtaaacatttcggtcgtccagagcaccgtatcttctggctacggaggggctagcggagtcggcagcgggctgggcttgggcggtggaagcagctacagctatggaagcggcctaggcgtgggcggcggattcagtagctcttccggaagggcaatcggaggaggtctttcttccgtcgggggtggctccagcacgatcaagtacaccacaacttcatcatcttcgcgcaagagttacaagcattag

SEQ ID NO: 157316 - DNA, 1695 bp, Artificial Sequence
  derived and/or modified sequence
atggcatcaaccagtactactatcagatctcacagcagcagcagacgcggttttagcgcgaattccgccaggctcccgggagttagcagatccggattcagttccgtctcagtgagccggtcacggggatccggtggtcttggcggagcctgtgggggagctggttttggatcccgttcgctgtacgggctgggaggctcgaagcgcatctctatcggcggtggcagctgcgccatctccggaggctatggcagccgcgctggcggatcttatggctttggcggagccggatcagggtttggatttggaggcggagcagggattggattcgggctgggtggtggggctggcctcgccggtggcttcgggggaccaggatttcctgtgtgtccacctggcggaatccaagaagtcacagtgaaccagtccttattgactccactcaatctacagattgacccaacgatccagagggtgcgcgcagaggagcgagaacagatcaagaccttaaacaataagttcgcgtcatttatagacaaggtcagatttctcgaacagcagaataaggtgctggaaaccaaatggacactgttgcaagaacagggaaccaagaccgtccgacagaacctggagccactcttcgagcagtacattaataatctgcgcaggcagctggatagtatcgtaggtgaaagggggagactggacagtgaattgagaggcatgcaggatctggtcgaagactttaagaataaatacgaggatgaaatcaataagcgtaccgccgctgaaaatgaatttgtcacgctgaagaaggacgttgacgctgcttacatgaataaggtggagctgcaagccaaagcagatactctgaccgacgagatcaactttctacgagccctgtacgatgctgagctctcacagatgcagacacacatcagcgatacaagcgtggttctttcaatggataacaatagaaacctcgatctggattcaatcattgccgaagtgaaagcccaatacgaggagatcgcgcagaggagccgagcggaagccgagtcatggtaccagaccaagtatgaagagcttcaggtgaccgctggacggcacggagatgatctacgcaacactaaacaggagatcgcagagatcaaccggatgatacaaaggttgcggtccgaaatcgatcatgttaagaagcaatgcgccaacctccaggctgcaattgctgatgcagaacagaggggtgaaatggccctgaaggatgcaaagaataaactcgagggcttggaggacgcgctccaaaaggcaaaacaggacttggcccgactgctgaaagagtaccaggagctcatgaacgtcaagttagctctggacgtggagattgcaacgtatcgcaaactgctcgagggggaggaatgtagattgaatggcgagggtgtgggccaggtaaacataagtgtggtgcagtccaccgtatcctcaggatacggaggtgcttcgggagtcggctccgggctgggcctcggcggaggaagttcttatagttacgggtcagggttgggcgtgggcggaggcttttcatccagtagtgggcgtgccataggcggaggtctgagtagcgtaggtggtgggagctcaaccattaagtatacaactactagcagtagctcccggaaatcgtataagcattag

SEQ ID NO: 157317 - DNA, 1563 bp, Artificial Sequence
  derived and/or modified sequence
atggcatcaacctcaaccaccattagatctcattcaggatccaggtccttatacgggctgggtggaagtaagcgcatctcaatcggcggaggatcttgcgccatatccggaggctacggctccagagcaggcggaagctacgggtttggaggcgcaggttctggattcggatttggcggaggggctggaatcggcttcggattgggcggaggagccggactagccggaggtttcggcggtccgggttttcccgtgtgtcctccagggggaatccaggaagtgactgttaaccaatccctgctgacccccctaaacctgcagatcgatccaacaattcagcgggtgcgggctgaagagagggaacagattaaaactctcaacaacaagtttgcctcatttatcgataaggtaaggtttctcgagcagcaaaacaaggtgctcgaaaccaaatggaccctgctacaagagcagggaacaaagactgtgaggcagaaccttgagcctttgtttgagcagtatatcaacaatctgcggagacaactggactcaatcgttggcgagcgaggacggttggatagcgaacttcgcggtatgcaagacctggtggaagatttcaagaacaaatacgaggatgaaattaataaacgaaccgctgccgagaatgagtttgtgaccctcaaaaaggatgtagacgccgcttatatgaataaggtggagctgcaggctaaagctgacactctgacagatgaaattaactttttacgtgcgctctacgacgcggaactgtcacagatgcagacccacataagtgatacctccgtggtgctttcaatggacaacaatcgtaatctcgatcttgacagcatcatcgccgaggttaaggctcagtatgaagaaattgctcagcggtctcgagcagaagccgaatcttggtaccaaactaaatatgaggagttacaggtgactgccggacgacatggggacgatctgagaaacaccaagcaggaaatagccgagatcaatcggatgatccagaggctcagaagcgaaattgaccatgtaaagaaacagtgtgcaaatttgcaggccgcaattgccgacgctgagcagcggggagagatggcactgaaagacgccaagaataaactcgaaggtctcgaggacgctctgcagaaggctaaacaggacctggctaggctgcttaaggaataccaggagctgatgaacgtgaagcttgctcttgatgtcgagatcgcaacatacaggaaactactggaaggtgaggagtgccggcttaatggagagggtgtgggccaggtgaacatatcagtggtccaatcgaccgtcagctccgggtatggtggggcttcaggggttggcagtggcttgggcttaggaggcggatcgtcctactcttatgggtccgggctgggagttggaggcggattttccagtagttcaggcagagcaatagggggagggcttagcagcgtggggggaggctcaagcaccataaagtacaccaccacttccagctctagccggaaaagctataagcattag

SEQ ID NO: 157318 - DNA, 1695 bp, Artificial Sequence
  derived and/or modified sequence
atggccagcaccagcaccaccatcagaagccacagcagcagcagaagaggcttcagcgccaacagcgccagactgcccggcgtgagcagaagcggcttcagcagcgtgagcgtgagcagaagcagaggcagcggcggcctgggcggcgcctgcggcggcgccggcttcggcagcagaagcctgtacggcctgggcggcagcaagagaatcagcatcggcggcggcagctgcgccatcagcggcggctacggcagcagagccggcggcagctacggcttcggcggcgccggcagcggcttcggcttcggcggcggcgccggcatcggcttcggcctgggcggcggcgccggcctggccggcggcttcggcggccccggcttccccgtgtgcccccccggcggcatccaggaggtgaccgtgaaccagagcctgctgacccccctgaacctgcagatcgaccccaccatccagagagtgagagccgaggagagagagcagatcaagaccctgaacaacaagttcgccagcttcatcgacaaggtgagattcctggagcagcagaacaaggtgctggagaccaagtggaccctgctgcaggagcagggcaccaagaccgtgagacagaacctggagcccctgttcgagcagtacatcaacaacctgagaagacagctggacagcatcgtgggcgagagaggcagactggacagcgagctgagaggcatgcaggacctggtggaggacttcaagaacaagtacgaggacgagatcaacaagagaaccgccgccgagaacgagttcgtgaccctgaagaaggacgtggacgccgcctacatgaacaaggtggagctgcaggccaaggccgacaccctgaccgacgagatcaacttcctgagagccctgtacgacgccgagctgagccagatgcagacccacatcagcgacaccagcgtggtgctgagcatggacaacaacagaaacctggacctggacagcatcatcgccgaggtgaaggcccagtacgaggagatcgcccagagaagcagagccgaggccgagagctggtaccagaccaagtacgaggagctgcaggtgaccgccggcagacacggcgacgacctgagaaacaccaagcaggagatcgccgagatcaacagaatgatccagagactgagaagcgagatcgaccacgtgaagaagcagtgcgccaacctgcaggccgccatcgccgacgccgagcagagaggcgagatggccctgaaggacgccaagaacaagctggagggcctggaggacgccctgcagaaggccaagcaggacctggccagactgctgaaggagtaccaggagctgatgaacgtgaagctggccctggacgtggagatcgccacctacagaaagctgctggagggcgaggagtgcagactgaacggcgagggcgtgggccaggtgaacatcagcgtggtgcagagcaccgtgagcagcggctacggcggcgccagcggcgtgggcagcggcctgggcctgggcggcggcagcagctacagctacggcagcggcctgggcgtgggcggcggcttcagcagcagcagcggcagagccatcggcggcggcctgagcagcgtgggcggcggcagcagcaccatcaagtacaccaccaccagcagcagcagcagaaagagctacaagcactag

SEQ ID NO: 157319 - DNA, 1563 bp, Artificial Sequence
  derived and/or modified sequence
atggccagcaccagcaccaccatcagaagccacagcggcagcagaagcctgtacggcctgggcggcagcaagagaatcagcatcggcggcggcagctgcgccatcagcggcggctacggcagcagagccggcggcagctacggcttcggcggcgccggcagcggcttcggcttcggcggcggcgccggcatcggcttcggcctgggcggcggcgccggcctggccggcggcttcggcggccccggcttccccgtgtgcccccccggcggcatccaggaggtgaccgtgaaccagagcctgctgacccccctgaacctgcagatcgaccccaccatccagagagtgagagccgaggagagagagcagatcaagaccctgaacaacaagttcgccagcttcatcgacaaggtgagattcctggagcagcagaacaaggtgctggagaccaagtggaccctgctgcaggagcagggcaccaagaccgtgagacagaacctggagcccctgttcgagcagtacatcaacaacctgagaagacagctggacagcatcgtgggcgagagaggcagactggacagcgagctgagaggcatgcaggacctggtggaggacttcaagaacaagtacgaggacgagatcaacaagagaaccgccgccgagaacgagttcgtgaccctgaagaaggacgtggacgccgcctacatgaacaaggtggagctgcaggccaaggccgacaccctgaccgacgagatcaacttcctgagagccctgtacgacgccgagctgagccagatgcagacccacatcagcgacaccagcgtggtgctgagcatggacaacaacagaaacctggacctggacagcatcatcgccgaggtgaaggcccagtacgaggagatcgcccagagaagcagagccgaggccgagagctggtaccagaccaagtacgaggagctgcaggtgaccgccggcagacacggcgacgacctgagaaacaccaagcaggagatcgccgagatcaacagaatgatccagagactgagaagcgagatcgaccacgtgaagaagcagtgcgccaacctgcaggccgccatcgccgacgccgagcagagaggcgagatggccctgaaggacgccaagaacaagctggagggcctggaggacgccctgcagaaggccaagcaggacctggccagactgctgaaggagtaccaggagctgatgaacgtgaagctggccctggacgtggagatcgccacctacagaaagctgctggagggcgaggagtgcagactgaacggcgagggcgtgggccaggtgaacatcagcgtggtgcagagcaccgtgagcagcggctacggcggcgccagcggcgtgggcagcggcctgggcctgggcggcggcagcagctacagctacggcagcggcctgggcgtgggcggcggcttcagcagcagcagcggcagagccatcggcggcggcctgagcagcgtgggcggcggcagcagcaccatcaagtacaccaccaccagcagcagcagcagaaagagctacaagcactag

SEQ ID NO: 157320 - protein, 564 aa, Artificial Sequence
  derived and/or modified sequence
MASTSTTIRSHSSSRRGFSANSARLPGVSRSGFSSISVSRSRGSGGLGGACGGAGFGSRSLYGLGGSKRISIGGGSCAISGGYGSRAGGSYGFGGAGSGFGFGGGAGIGFGLGGGAGLAGGFGGPGFPVCPPGGIQEVTVNQSLLTPLNLQIDPAIQRVRAEEREQIKTLNNKFASFIDKVRFLEQQNKVLDTKWTLLQEQGTKTVRQNLEPLFEQYINNLRRQLDNIVGERGRLDSELRNMQDLVEDLKNKYEDEINKRTAAENEFVTLKKDVDAAYMNKVELQAKADTLTDEINFLRALYDAELSQMQTHISDTSVVLSMDNNRNLDLDSIIAEVKAQYEEIAQRSRAEAESWYQTKYEELQITAGRHGDDLRNTKQEIAEINRMIQRLRSEIDHVKKQCANLQAAIADAEQRGEMALKDAKNKLEGLEDALQKAKQDLARLLKEYQELMNVKLALDVEIATYRKLLEGEECRLNGEGVGQVNISVVQSTVSSGYGGASGVGSGLGLGGGSSYSYGSGLGVGGGFSSSSGRATGGGLSSVGGGSSTIKYTTTSSSSRKSYKH

SEQ ID NO: 157321 - protein, 524 aa, Artificial Sequence
  derived and/or modified sequence
MASTSTTIRSHSSSRRGFSANSARLPGVSRSGFSSISVSRSRGSGGLGGACGGAGFGSRSLYGLGGSKRISIGGGSCAISGGYGSRAGGSYGFGGAGSGFGFGGGAGIGFGLGGGAGLAGGFGGPGFPVCPPGGIQEVTVNQSLLTPLNLQIDPAIQRVRAEEREQIKTLNNKFASFIDKVRFLEQQNKVLDTKWTLLQEQGTKTVRQNLEPLFEQYINNLRRQLDNIVGERGRLDSELRNMQDLVEDLKNKDEINFLRALYDAELSQMQTHISDTSVVLSMDNNRNLDLDSIIAEVKAQYEEIAQRSRAEAESWYQTKYEELQITAGRHGDDLRNTKQEIAEINRMIQRLRSEIDHVKKQCANLQAAIADAEQRGEMALKDAKNKLEGLEDALQKAKQDLARLLKEYQELMNVKLALDVEIATYRKLLEGEECRLNGEGVGQVNISVVQSTVSSGYGGASGVGSGLGLGGGSSYSYGSGLGVGGGFSSSSGRATGGGLSSVGGGSSTIKYTTTSSSSRKSYKH

SEQ ID NO: 157322 - DNA, 1695 bp, Artificial Sequence
  derived and/or modified sequence
atggcatcaacttccaccaccattagaagtcactcctcctctcgccgcgggttctccgcaaatagtgcccgactgcccggagtgagcaggtctgggttcagcagtatcagcgtctctaggagccgcggctcaggcggactaggcggtgcctgcggcggagctgggtttgggagccgatccctttatgggctcgggggaagcaaaagaatttcaatcggaggaggaagttgtgccatctccgggggatacggatctcgcgccggcggaagttacggcttcggcggagcaggatctggctttggatttggaggaggagctgggattggttttggactgggaggcggcgctggccttgcaggcggttttgggggacctggatttcccgtgtgccctccaggcggaattcaggaagtgacagtaaatcaatctctccttacccctctcaacctccagatagaccccgccatacagcgggtccgcgcagaggagcgtgagcagattaagaccttgaataacaagtttgcttcctttattgacaaggttcgattcctggagcagcagaataaggtgttagacactaaatggacacttcttcaagaacaaggaaccaagactgttcggcagaatcttgaacctttatttgaacagtacattaacaacctgcgacgtcagctggacaacattgtgggtgagcggggccgtttggactctgagctgaggaatatgcaagatttggtagaggaccttaagaacaaatacgaggatgaaattaacaagagaacagctgccgaaaatgaattcgtgaccctcaagaaggatgtcgatgcagcctacatgaataaggtggagctgcaggccaaggctgacaccctgacagacgagatcaacttccttcgcgccttgtatgacgcggagctctcccagatgcagacacatataagcgacacctccgtggtgctgagtatggataataatagaaacttggacctggatagcatcatcgcggaagtgaaggctcagtatgaggaaatcgcccagaggtcccgagctgaggccgagagttggtatcaaacaaagtatgaagaactccagattaccgcggggaggcatggggacgacctccggaacacaaaacaagagatcgcagaaattaatagaatgattcagaggctccggagcgagattgatcacgttaagaaacagtgtgccaatttacaggctgcaattgcagacgccgaacagcgtggggaaatggctctcaaggacgctaaaaataaattggagggcctggaggatgcactgcagaaagctaagcaggatctggctcgtcttctaaaggaatatcaggaactcatgaatgtgaagctggcccttgacgttgaaattgccacatatcgcaagctgcttgaaggcgaagagtgcaggctgaacggggaaggtgtcggtcaggtcaatatctccgtggtacagtcgacagtttcctcagggtatggcggcgctagtggtgtgggttctggcttaggactcggcggcggaagtagttactcctacggtagcggactgggcgtgggaggaggcttctctagttcctcaggcagggcgaccggtggtgggctcagttctgtgggggggggttcctccactatcaaatatacaacgacatcctcatctagccgtaaatcttataagcattag

SEQ ID NO: 157323 - DNA, 1575 bp, Artificial Sequence
  derived and/or modified sequence
atggccagtacctcaacaaccatccgaagtcattcatcctctcggcgcggattttcagcaaattccgcccgtttacctggggtcagcagatcaggattctcttcaatctccgtgtcgcgtagtcgggggagcggaggcctcggtggagcctgtggcggagccggcttcgggtctcggtctctgtatgggcttggcgggtccaagaggattagtatcggcggggggtcctgtgccattagcggggggtacggaagcagggcaggcggaagttatggattcgggggggcaggctccgggtttggcttcggaggtggcgccggaatcggattcggactggggggcggagcaggcctggctggcggattcgggggccctggatttccagtctgcccacctggagggattcaggaggtaacggtgaaccagtctctgttgacccccctgaacctgcaaatcgaccctgcaatccagagagtgcgggcagaggagcgggagcaaatcaaaacactgaataacaaatttgcttccttcatcgacaaggtgcgcttcctggaacaacagaacaaagtgctggacactaaatggacccttttacaagaacagggcacgaagaccgtgagacagaacctcgaacctctgtttgagcagtacatcaataacttgcgaagacagctggataacatagtgggcgaaagagggaggctggactctgagcttagaaatatgcaagatctggtcgaggatctcaagaataaagatgaaatcaactttctgcgggctctctatgatgcggaactatcccaaatgcagacgcacattagtgataccagtgtggtccttagtatggacaacaaccggaaccttgaccttgactccatcattgcggaggtgaaagctcagtacgaagagatcgcccaaagaagccgtgccgaagcagaaagttggtatcaaactaagtacgaggagctgcagattactgccgggcgtcatggggatgacctgcgcaataccaagcaggagatcgcagagatcaacagaatgattcaaagactccgaagcgagatcgatcacgttaaaaaacagtgcgctaatctgcaagccgccatagccgacgccgaacagagaggcgagatggccctgaaggatgccaagaacaaactagaagggctggaggacgccttgcagaaagccaaacaagacctggcacggcttctaaaggagtaccaagagctcatgaacgttaagctcgctcttgatgttgaaattgcaacgtatcgcaagctgttggagggtgaggaatgcagactgaatggggagggcgtaggccaggtgaacatctctgtcgtacagtctacagttagctccggttatggaggcgcctccggtgtaggaagcggccttgggctgggaggggggagcagttatagctatggctcaggactgggggttggcggtgggttctcgagtagcagcggcagagcaaccggcggcggcctatccagcgtgggcggcggctcatcaactatcaaatacaccacaacgtccagctccagtagaaagtcttataagcattag

SEQ ID NO: 157324 - DNA, 2282 bp, Artificial Sequence
  derived and/or modified sequence
cgcctccagcctctcacactctcctaagccctctcatctcctggaaccatggccagcacatccaccaccatcaggagccacagcagcagccgccggggtttcagtgccaactcagccaggctccctggggtcagccgctctggcttcagcagcatctccgtgtcccgctccaggggcagtggtggcctgggtggcgcatgtggaggagctggctttggcagccgcagtctgtatggcctggggggctccaagaggatctccattggagggggcagctgtgccatcagtggcggctatggcagcagagccggaggcagctatggctttggtggcgccgggagtggatttggtttcggtggtggagccggcattggctttggtctgggtggtggagccggccttgctggtggctttgggggccctggcttccctgtgtgcccccctggaggcatccaagaggtcactgtcaaccagagtctcctgactcccctcaacctgcaaattgaccccgccatccagcgggtgcgggccgaggagcgtgagcagatcaagaccctcaacaacaagtttgcctccttcatcgacaaggtgcggttcctagagcagcagaacaaggttctggacaccaagtggaccctgctgcaggagcagggcaccaagactgtgaggcagaacctggagccgttgttcgagcagtacatcaacaacctcaggaggcagctggacaacatcgtgggggaacggggtcgtctggactcggagctgagaaacatgcaggacctggtggaggacctcaagaacaaatatgaggatgaaatcaacaagcgcacagcagcagagaatgaatttgtgactctgaagaaggatgtggatgctgcctacatgaacaaggttgaactgcaagccaaggcagacactcttacagatgagatcaacttcctgagagccttgtatgatgcagagctgtcccagatgcagacccacatctcagacacatccgtggtgctatccatggacaacaaccgcaacctggacctggacagcatcatcgctgaggtcaaggcccaatatgaggagattgctcagaggagcagggctgaggctgagtcctggtaccagacaaagtacgaggagctgcagatcacagcaggcagacatggggacgacctgcgcaacaccaagcaggagattgctgagatcaaccgcatgatccagaggctgagatctgagatcgaccacgtcaagaagcagtgtgccaacctacaggccgccattgctgatgctgagcagcgtggggagatggccctcaaggatgctaagaacaagctggaagggctggaggatgccctgcagaaggccaagcaggacctggcccggctgctgaaggagtaccaggagctgatgaacgtcaagctggccctggatgtggagatcgccacctaccgcaagctgctggagggcgaggagtgcaggctgaatggcgaaggcgttggacaagtcaacatctctgtagtgcagtccaccgtctccagtggctatggcggtgccagcggtgtcggcagtggcttaggcctgggtggaggaagcagctactcctatggcagtggtcttggcgttggaggcggctttagttccagcagcggcagagccactgggggtggcctcagctctgttggaggcggcagttccaccatcaagtacaccaccacctcctcctccagcaggaagagctacaagcactgaagtgctgccgccagctctcagtcccacagctctcaggcccctctctggcagcagagccctctcctcaggttgcttgtcctcccctggcctccagtctcccctgccctcccgggtagagctgggatgccctcacttttcttctcatcaatacctgttccactgagctcctgttgcttaccatcaagtcaacagttatcagcactcagacatgcgaatgtcctttttagttcccgtattattacaggtatctgagtctgccataattctgagaagaaaatgacctatatccccataagaactgaaactcagtctaggtccagctgcagatgaggagtcctctctttaattgctaaccatcctgcccattatagctacactcaggagttctcatctgacaagtcagttgtcctgatcttctcttgcagtgtccctgaatggcaagtgatgtaccttctgatgcagtctgcattcctgcactgctttctctgctctctttgccttcttttgttctgttgaataaagcatattgagaatgtgaa

SEQ ID NO: 157325 - DNA, 1723 bp, Artificial Sequence
  derived and/or modified sequence
atgctctccatatataagctgctactggagtccgattcctcgtcctgcttctcctccctctcgcctccagcctctcacactctcctaagccctctcatctcctggaaccatggccagcacatccaccaccatcaggagccacagcagcagccgccggggtttcagtgccaactcagccaggctccctggggtcagccgctctggcttcagcagcatctccgtgtcccgctccaggggcagtggtggcctgggtggcgcatgtggaggagctggctttggcagccgcagtctgtatggcctggggggctccaagaggatctccattggagggggcagctgtgccatcagtggcggctatggcagcagagccggaggcagctatggctttggtggcgccgggagtggatttggtttcggtggtggagccggcattggctttggtctgggtggtggagccggccttgctggtggctttgggggccctggcttccctgtgtgcccccctggaggcatccaagaggtcactgtcaaccagagtctcctgactcccctcaacctgcaaattgaccccgccatccagcgggtgcgggccgaggagcgtgagcagatcaagaccctcaacaacaagtttgcctccttcatcgacaaggtgcggttcctagagcagcagaacaaggttctggacaccaagtggaccctgctgcaggagcagggcaccaagactgtgaggcagaacctggagccgttgttcgagcagtacatcaacaacctcaggaggcagctggacaacatcgtgggggaacggggtcgtctggactcggagctgagaaacatgcaggacctggtggaggacctcaagaacaaagatgagatcaacttcctgagagccttgtatgatgcagagctgtcccagatgcagacccacatctcagacacatccgtggtgctatccatggacaacaaccgcaacctggacctggacagcatcatcgctgaggtcaaggcccaatatgaggagattgctcagaggagcagggctgaggctgagtcctggtaccagacaaagtacgaggagctgcagatcacagcaggcagacatggggacgacctgcgcaacaccaagcaggagattgctgagatcaaccgcatgatccagaggctgagatctgagatcgaccacgtcaagaagcagtgtgccaacctacaggccgccattgctgatgctgagcagcgtggggagatggccctcaaggatgctaagaacaagctggaagggctggaggatgccctgcagaaggccaagcaggacctggcccggctgctgaaggagtaccaggagctgatgaacgtcaagctggccctggatgtggagatcgccacctaccgcaagctgctggagggcgaggagtgcaggctgaatggcgaaggcgttggacaagtcaacatctctgtagtgcagtccaccgtctccagtggctatggcggtgccagcggtgtcggcagtggcttaggcctgggtggaggaagcagctactcctatggcagtggtcttggcgttggaggcggctttagttccagcagcggcagagccactgggggtggcctcagctctgttggaggcggcagttccaccatcaagtacaccaccacctcctcctccagcaggaagagctacaagcactgaagtgctgccgccagctctcagtcccacagctctcaggcc

SEQ ID NO: 157326 - DNA, 1695 bp, Artificial Sequence
  derived and/or modified sequence
atggccagcaccagcaccaccatccgcagccacagcagcagcagaagaggcttcagcgccaacagcgcccggctgcccggggtgagccgcagcggcttcagcagcatctctgtgagccgcagccggggcagcggcggcctgggcggggcctgtggcggggccggcttcggcagccgcagcctgtatggcctgggcggcagcaagaggatcagcatcggcggcggcagctgtgccatcagcggcggctacggcagcagagctgggggcagctatggctttggaggagctggcagcggcttcggctttggaggaggagctggcatcggcttcggcctgggcggcggggccggcctggccggcggctttggaggccctggcttccctgtgtgccccccaggcggcatccaggaggtgacagtgaaccagagcctgctgacccccctgaacctgcagattgatcctgccatccagagggtgcgggcagaggagcgggagcagatcaagaccctgaacaacaagtttgccagcttcatcgacaaggtgcgcttcctggagcagcagaacaaggtgctggacaccaagtggaccctgctgcaggagcagggcaccaagacagtgcggcagaacctggagcccctgtttgagcagtacatcaacaacctgcggcggcagctggacaacatcgtgggggagcggggccgcctggacagcgagctgaggaacatgcaggacctggtggaggacctgaagaacaagtatgaagatgagatcaacaagaggacagctgctgaaaatgaatttgtgaccctgaagaaggatgtggatgctgcctacatgaacaaggtggagctgcaggccaaggctgacaccctgacagatgagatcaacttcctgcgggccctgtatgatgctgagctgagccagatgcagacccacatcagtgacacctctgtggtgctgtccatggacaacaacagaaacctggacctggacagcatcatcgccgaggtgaaggcccagtatgaggagatcgcccagaggagcagagctgaggccgagagctggtaccagaccaagtatgaggagctgcagatcacagctggaagacatggagatgacctgaggaacaccaagcaggagattgctgagatcaacaggatgatccagaggctgcggagtgaaattgaccacgtgaagaagcagtgtgccaacctgcaggccgccatcgcagatgctgagcagagaggagagatggccctgaaggatgccaagaacaagctggagggcctggaggatgccctgcagaaggccaagcaggacctggcccggctgctgaaggagtaccaggagctgatgaatgtgaagctggccctggatgtggagatcgccacctacaggaagctgctggagggggaggagtgccgcctgaatggagagggcgtgggccaggtgaacatctctgtggtgcagagcacagtgagcagcggctatggaggagccagcggcgtgggcagcggcctgggcctgggcggcggcagcagctacagctatggcagcggcctgggcgtgggcggcggcttcagcagcagcagcggccgggccactggaggcggcctgagctctgtgggcggcggcagcagcaccatcaagtacaccaccaccagcagcagcagcaggaagagctacaagcactag

SEQ ID NO: 157327 - DNA, 1575 bp, Artificial Sequence
  derived and/or modified sequence
atggccagcaccagcaccaccatccgcagccacagcagcagcagaagaggcttcagcgccaacagcgcccggctgcccggggtgagccgcagcggcttcagcagcatctctgtgagccgcagccggggcagcggcggcctgggcggggcctgtggcggggccggcttcggcagccgcagcctgtatggcctgggcggcagcaagaggatcagcatcggcggcggcagctgtgccatcagcggcggctacggcagcagagctgggggcagctatggctttggaggagctggcagcggcttcggctttggaggaggagctggcatcggcttcggcctgggcggcggggccggcctggccggcggctttggaggccctggcttccctgtgtgccccccaggcggcatccaggaggtgacagtgaaccagagcctgctgacccccctgaacctgcagattgatcctgccatccagagggtgcgggcagaggagcgggagcagatcaagaccctgaacaacaagtttgccagcttcatcgacaaggtgcgcttcctggagcagcagaacaaggtgctggacaccaagtggaccctgctgcaggagcagggcaccaagacagtgcggcagaacctggagcccctgtttgagcagtacatcaacaacctgcggcggcagctggacaacatcgtgggggagcggggccgcctggacagcgagctgaggaacatgcaggacctggtggaggacctgaagaacaaggatgagatcaacttcctgcgggccctgtatgatgctgagctgagccagatgcagacccacatcagtgacacctctgtggtgctgtccatggacaacaacagaaacctggacctggacagcatcatcgccgaggtgaaggcccagtatgaggagatcgcccagaggagcagagctgaggccgagagctggtaccagaccaagtatgaggagctgcagatcacagctggaagacatggagatgacctgaggaacaccaagcaggagattgctgagatcaacaggatgatccagaggctgcggagtgaaattgaccacgtgaagaagcagtgtgccaacctgcaggccgccatcgcagatgctgagcagagaggagagatggccctgaaggatgccaagaacaagctggagggcctggaggatgccctgcagaaggccaagcaggacctggcccggctgctgaaggagtaccaggagctgatgaatgtgaagctggccctggatgtggagatcgccacctacaggaagctgctggagggggaggagtgccgcctgaatggagagggcgtgggccaggtgaacatctctgtggtgcagagcacagtgagcagcggctatggaggagccagcggcgtgggcagcggcctgggcctgggcggcggcagcagctacagctatggcagcggcctgggcgtgggcggcggcttcagcagcagcagcggccgggccactggaggcggcctgagctctgtgggcggcggcagcagcaccatcaagtacaccaccaccagcagcagcagcaggaagagctacaagcactag

SEQ ID NO: 157328 - DNA, 1695 bp, Artificial Sequence
  derived and/or modified sequence
atggccagcaccagcaccaccatccggagccacagcagcagccggagaggattctccgccaatagtgctcgcctgccaggcgtgtctcgctcaggcttcagctcaatatctgtgtcccgtagcaggggctctggcggcctggggggggcgtgtggcggggcaggatttggtagtagaagcctctacggtcttgggggttctaaaaggatctcaattggcggaggctcttgtgctatttccggcggatacggctcacgcgccggcgggtcatacgggtttggcggcgcagggtctgggttcggcttcggggggggggctggaattggttttggacttggagggggggctggtctagccggcgggtttggcggtccgggatttcccgtgtgcccgcctggggggatacaggaggtgaccgtcaaccagagccttctaacccctctgaatctgcaaattgatccagccatacagcgggtgcgggcggaggagagagaacagatcaaaaccctcaacaacaaatttgcatcttttatcgataaagtacgcttcctggagcaacagaataaagtgttggatacaaagtggaccttacttcaagaacagggaacaaagactgtgcgccagaaccttgaacccctgttcgagcagtatataaataacctccggcgtcaactggataacatcgtgggggaacgaggcaggttggactcagagctcagaaacatgcaggacttggtcgaggacctgaaaaacaagtatgaggatgaaattaataaaagaaccgccgctgagaatgagtttgtgacgctgaagaaggacgtggatgcagcctacatgaacaaggtggagttgcaggctaaggcggataccttgactgacgagatcaacttcctgagggccctgtatgacgccgaattgagtcaaatgcagacccacatcagcgacactagcgtcgtgttaagcatggacaacaatcgtaatctggatttggatagcatcatagcagaggttaaagcccaatatgaggagattgcccaacggtcaagagctgaggcggagagttggtatcaaactaaatatgaggaactgcagattactgcggggagacatggcgacgatctacgtaatacgaaacaggaaatcgctgagattaatcggatgatccagagactcaggtccgagattgatcatgttaaaaagcagtgcgctaatctacaggccgccatcgctgatgctgagcaacgaggggaaatggcccttaaggacgccaaaaacaagctcgagggattggaagacgcacttcaaaaggcaaagcaggacctggcaaggctcttgaaggagtatcaggagctcatgaacgtaaagctggccctcgatgtcgagatcgctacctacaggaaactgctggaaggggaggagtgccgtttgaatggagagggtgtgggccaagttaacatttccgttgttcagtctacagtttcctctgggtatgggggagcaagtggcgtgggctccggcctggggctggggggaggtagttcatactcttatgggagtggcctgggagtcggcggtggattctcgagctcttcaggacgagctacaggcggtggtttaagctccgtgggagggggatcttcaactatcaaatatacaactacctcctcttccagccgaaagtcatacaaacactag

SEQ ID NO: 157329 - DNA, 1575 bp, Artificial Sequence
  derived and/or modified sequence
atggccagcaccagcaccaccatccggagccacagcagcagccggcgggggttcagcgcaaattctgcacggctgccaggcgtgagccggagcggattcagtagcatcagtgttagccggagccgagggtccggaggcctggggggtgcgtgcggcggggcaggctttggctcgcgatcgctgtacggtttgggcggctctaagcgcatttctatcggtggcgggagctgcgccatatcagggggttatggcagtagggccggcggtagctatggtttcggtggcgccggctcaggcttcggcttcggcggtggcgccgggattggcttcggtctggggggcggtgcaggcctggccggaggattcggggggcccggtttcccggtttgcccgcccggcggcatccaggaagttaccgtcaaccagagtctgctgaccccattgaacctgcagattgatcctgccatccagcgcgttcgggctgaggagcgggaacagatcaagacactgaataacaagtttgcctcctttattgataaagttcgattcctcgagcagcagaacaaagtgctggatacaaaatggacgctgcttcaagaacagggcaccaaaaccgtgcgccaaaatttggagcctctgtttgagcagtacattaataacttgagacggcagctggataacattgtcggagagcgagggaggctggacagtgaactacgtaacatgcaggatctcgtggaggatttgaagaataaggatgaaattaattttctgagggcattgtacgacgcggagttatctcagatgcagacccacatctcagatacgagcgttgtgttaagtatggataataaccgcaaccttgatctggacagcatcatcgccgaggtgaaagcccagtatgaagaaatcgctcaacggagtcgcgctgaggccgagtcctggtaccagactaaatacgaggaactgcagatcactgccggcagacatggcgacgatctacgaaatactaagcaggaaatagcggaaattaaccgcatgatacagaggctgcgatcagagattgaccatgtaaagaagcaatgcgccaatcttcaggccgccatagcggacgcagagcagcgcggcgagatggcactgaaagatgctaaaaacaagctggaaggtttagaggacgcattgcagaaagcaaagcaagatcttgcccgtttgcttaaagaataccaggagctgatgaacgtgaaactggcactcgatgtggagatcgcaacttaccgcaagctgctggagggggaagagtgtagactcaacggcgagggcgtcggtcaggtgaatatctctgttgtgcagtccaccgtgtcgtccggttatggcggcgctagtggggtcggcagcggattagggttaggcggtggcagcagttactcttacgggtccgggttgggcgtgggaggaggcttctcctcctccagcggccgggccaccggaggcgggctttccagcgttggcggcgggagtagcaccatcaagtacacaaccacctcttcatcaagtcgcaaaagttataagcactag

SEQ ID NO: 157330 - DNA, 1695 bp, Artificial Sequence
  derived and/or modified sequence
atggcttctacgtctacgacaattcgctctcatagcagtagcaggcggggattcagcgccaatagcgccaggctgccgggagtctcccgctcagggttctcgagcatatccgtatcgcggtcgagagggtcaggagggctaggaggagcatgtggtggagccggattcggcagtcgctccttatatggcctcggtggaagcaagagaattagcatcggagggggtagttgcgccatttccggaggatacggaagccgcgcaggaggaagctatgggtttgggggagcaggcagcggattcgggttcggaggaggggcaggcattgggtttgggttgggagggggtgccggactggctgggggattcggaggtccagggtttccagtgtgcccgccaggtggcattcaagaagtgacagttaatcagtccctgctcacaccactgaaccttcaaatcgaccccgctattcagcgcgtgagagccgaggaacgcgagcagataaagactttgaacaacaaattcgcgtcttttattgataaggttagattcttggagcagcagaataaggtcctggacactaaatggaccctgctgcaagagcaagggactaaaacggtcagacagaacctggagcctctattcgagcaatacatcaataatctgagacgtcagttagataacatcgtgggcgagaggggcagactggactctgagctgcggaatatgcaggatctcgtcgaggacctcaaaaataagtacgaagatgagataaacaagcggacagcggcagagaacgagtttgtcactctaaaaaaggacgttgatgcggcttacatgaataaggtggagttgcaagcaaaagccgatactctcactgatgagatcaacttcctgagagctctgtacgacgccgaactgagtcagatgcaaacacacatttctgatacatccgtggtgttgtccatggataacaatagaaatctggacctggattcaatcattgccgaagtgaaggcccaatatgaagaaattgcgcagaggtctcgcgctgaagccgaatcctggtatcagacaaagtatgaagagttacagattactgccggtcggcatggggacgacctgcggaacaccaagcaagagatagcagagataaaccggatgatccaaaggctgcgtagtgagattgaccatgttaagaagcagtgcgcaaatctacaggcggcaattgcagatgccgagcaaagaggcgaaatggctttgaaggacgccaagaacaagttagagggtctggaggatgcgctgcaaaaggcaaagcaggatctggcccgtctgttgaaggagtatcaagagctcatgaatgttaagctcgcactggatgtggagatcgccacttatcgaaagttgttggaaggcgaggagtgccgattgaacggggagggggtggggcaagtaaacatcagtgtcgtccagtcgacagtgagctcagggtacggcggtgcatctggcgttggaagcggtttagggctgggaggaggctcctcctacagctacgggtcaggcctcggggtaggtgggggattttcaagctcttctggtagagcaactggcggtgggctttcttccgtgggtggtggtagttcaacgatcaaatacacgactacaagttcatccagtcgtaaatcgtacaagcattag

SEQ ID NO: 157331 - DNA, 1575 bp, Artificial Sequence
  derived and/or modified sequence
atggcttcaacctccacaacaatcagatcccactccagtagccggagaggatttagtgccaactctgcaagactgcctggagtgtcgcgttccggtttcagctccattagcgttagcagatctagagggagtggcggattgggtggagcctgtggcggagcgggtttcggcagccggagtctctacggcctaggaggcagtaaaaggatttcgatcggcggaggctcctgtgccatcagcggcggttatggtagtagagcgggaggaagctacggattcgggggagctggatctgggttcgggttcggcggaggcgcaggaatcggcttcggcttgggaggtggcgctggtcttgcagggggttttggtggaccaggctttccagtttgtcccccaggtggaatccaagaggtaacagtgaatcagtcactccttaccccccttaacctccagattgaccccgcaattcagcgcgtgcgcgcagaggagagagaacagatcaagacgttaaataacaaatttgccagctttatcgataaggtccggttcctggagcagcagaataaggtgctggacacaaagtggaccttgttacaggagcaggggacgaaaaccgtccggcagaacttagaacccctctttgagcaatatatcaataacttgagacgccagctggataacattgtaggtgaaaggggacgacttgactcagaactccgaaacatgcaggacttggtggaggatcttaagaacaaggacgaaatcaatttcttacgagctttgtacgacgctgagctgagccagatgcagacccacatttcagatacgtctgtagtgctttcaatggataacaataggaatctagacctggattccatcatcgccgaggtcaaggcccagtatgaagaaattgcccaacgatctagggcagaagcagaatcttggtaccagaccaaatacgaagagctgcagatcaccgctggacggcacggcgacgatctgcgcaatactaaacaggaaatcgccgaaataaacaggatgatacagcggctgagatcggaaattgatcatgtcaagaagcagtgtgcaaatttgcaggcggcaattgcagatgctgagcagcgaggcgagatggcactgaaggatgccaagaataagctggagggcttggaggatgcactccagaaggcgaaacaagacctcgctaggctcctgaaagaatatcaggagctcatgaacgtcaagctggcgttggatgtcgaaatcgcaacatacagaaagcttcttgaaggtgaagagtgcaggcttaacggagagggggtcggccaagtgaacatcagcgtggtccagtctactgttagtagtggctacggcggagcatctggtgtaggcagcggtctcgggctggggggagggagttcatactcctacggaagtggactcggtgtcggcggaggtttcagtagctccagtgggcgtgcaacagggggagggctctcttcggtcgggggaggctcttccaccatcaagtatacaacgaccagcagtagtagtagaaaaagttacaaacactag

SEQ ID NO: 157332 - DNA, 1695 bp, Artificial Sequence
  derived and/or modified sequence
atggccagcaccagcaccaccatcagaagccacagcagcagcagaagaggcttcagcgccaacagcgccagactgcccggcgtgagcagaagcggcttcagcagcatcagcgtgagcagaagcagaggcagcggcggcctgggcggcgcctgcggcggcgccggcttcggcagcagaagcctgtacggcctgggcggcagcaagagaatcagcatcggcggcggcagctgcgccatcagcggcggctacggcagcagagccggcggcagctacggcttcggcggcgccggcagcggcttcggcttcggcggcggcgccggcatcggcttcggcctgggcggcggcgccggcctggccggcggcttcggcggccccggcttccccgtgtgcccccccggcggcatccaggaggtgaccgtgaaccagagcctgctgacccccctgaacctgcagatcgaccccgccatccagagagtgagagccgaggagagagagcagatcaagaccctgaacaacaagttcgccagcttcatcgacaaggtgagattcctggagcagcagaacaaggtgctggacaccaagtggaccctgctgcaggagcagggcaccaagaccgtgagacagaacctggagcccctgttcgagcagtacatcaacaacctgagaagacagctggacaacatcgtgggcgagagaggcagactggacagcgagctgagaaacatgcaggacctggtggaggacctgaagaacaagtacgaggacgagatcaacaagagaaccgccgccgagaacgagttcgtgaccctgaagaaggacgtggacgccgcctacatgaacaaggtggagctgcaggccaaggccgacaccctgaccgacgagatcaacttcctgagagccctgtacgacgccgagctgagccagatgcagacccacatcagcgacaccagcgtggtgctgagcatggacaacaacagaaacctggacctggacagcatcatcgccgaggtgaaggcccagtacgaggagatcgcccagagaagcagagccgaggccgagagctggtaccagaccaagtacgaggagctgcagatcaccgccggcagacacggcgacgacctgagaaacaccaagcaggagatcgccgagatcaacagaatgatccagagactgagaagcgagatcgaccacgtgaagaagcagtgcgccaacctgcaggccgccatcgccgacgccgagcagagaggcgagatggccctgaaggacgccaagaacaagctggagggcctggaggacgccctgcagaaggccaagcaggacctggccagactgctgaaggagtaccaggagctgatgaacgtgaagctggccctggacgtggagatcgccacctacagaaagctgctggagggcgaggagtgcagactgaacggcgagggcgtgggccaggtgaacatcagcgtggtgcagagcaccgtgagcagcggctacggcggcgccagcggcgtgggcagcggcctgggcctgggcggcggcagcagctacagctacggcagcggcctgggcgtgggcggcggcttcagcagcagcagcggcagagccaccggcggcggcctgagcagcgtgggcggcggcagcagcaccatcaagtacaccaccaccagcagcagcagcagaaagagctacaagcactag

SEQ ID NO: 157333 - DNA, 1575 bp, Artificial Sequence
  derived and/or modified sequence
atggccagcaccagcaccaccatcagaagccacagcagcagcagaagaggcttcagcgccaacagcgccagactgcccggcgtgagcagaagcggcttcagcagcatcagcgtgagcagaagcagaggcagcggcggcctgggcggcgcctgcggcggcgccggcttcggcagcagaagcctgtacggcctgggcggcagcaagagaatcagcatcggcggcggcagctgcgccatcagcggcggctacggcagcagagccggcggcagctacggcttcggcggcgccggcagcggcttcggcttcggcggcggcgccggcatcggcttcggcctgggcggcggcgccggcctggccggcggcttcggcggccccggcttccccgtgtgcccccccggcggcatccaggaggtgaccgtgaaccagagcctgctgacccccctgaacctgcagatcgaccccgccatccagagagtgagagccgaggagagagagcagatcaagaccctgaacaacaagttcgccagcttcatcgacaaggtgagattcctggagcagcagaacaaggtgctggacaccaagtggaccctgctgcaggagcagggcaccaagaccgtgagacagaacctggagcccctgttcgagcagtacatcaacaacctgagaagacagctggacaacatcgtgggcgagagaggcagactggacagcgagctgagaaacatgcaggacctggtggaggacctgaagaacaaggacgagatcaacttcctgagagccctgtacgacgccgagctgagccagatgcagacccacatcagcgacaccagcgtggtgctgagcatggacaacaacagaaacctggacctggacagcatcatcgccgaggtgaaggcccagtacgaggagatcgcccagagaagcagagccgaggccgagagctggtaccagaccaagtacgaggagctgcagatcaccgccggcagacacggcgacgacctgagaaacaccaagcaggagatcgccgagatcaacagaatgatccagagactgagaagcgagatcgaccacgtgaagaagcagtgcgccaacctgcaggccgccatcgccgacgccgagcagagaggcgagatggccctgaaggacgccaagaacaagctggagggcctggaggacgccctgcagaaggccaagcaggacctggccagactgctgaaggagtaccaggagctgatgaacgtgaagctggccctggacgtggagatcgccacctacagaaagctgctggagggcgaggagtgcagactgaacggcgagggcgtgggccaggtgaacatcagcgtggtgcagagcaccgtgagcagcggctacggcggcgccagcggcgtgggcagcggcctgggcctgggcggcggcagcagctacagctacggcagcggcctgggcgtgggcggcggcttcagcagcagcagcggcagagccaccggcggcggcctgagcagcgtgggcggcggcagcagcaccatcaagtacaccaccaccagcagcagcagcagaaagagctacaagcactag

SEQ ID NO: 157334 - protein, 469 aa, Artificial Sequence
  derived and/or modified sequence
MSIHFSSPVFTSRSAAFSGRGAQVRLSSARPGGLGSSSLYGLGASRPRVAVRSAYGGPVGAGIREVTINQSLLAPLRLDADPSLQRVRQEESEQIKTLNNKFASFIDKVRFLEQQNKLLETKWTLLQEQKSAKSSRLPDIFEAQIAGLRGQLEALQVDGGRLEAELRSMQDVVEDFKNKYEDEINHRTAAENEFVVLKKDVDAAYMSKVELEAKVDALNDEINFLRTLNETELTELQSQISDTSVVLSMDNSRSLDLDGIIAEVKAQYEEMAKCSRAEAEAWYQTKFETLQAQAGKHGDDLRNTRNEISEMNRAIQRLQAEIDNIKNQRAKLEAAIAEAEERGELALKDARAKQEELEAALQRGKQDMARQLREYQELMSVKLALDIEIATYRKLLEGEESRLAGDGVGAVNISVMNSTGGSSSGGGIGLTLGGTMGSNALSFSSSAGPGLLKAYSIRTASASRRSARD

SEQ ID NO: 157335 - protein, 445 aa, Artificial Sequence
  derived and/or modified sequence
MSIHFSSPVFTSRSAAFSGRGAQVRLSSARPGGLGSSSLYGLGASRPRVAPLRLDADPSLQRVRQEESEQIKTLNNKFASFIDKVRFLEQQNKLLETKWTLLQEQKSAKSSRLPDIFEAQIAGLRGQLEALQVDGGRLEAELRSMQDVVEDFKNRYEDEINHRTAAENEFVVLKKDVDAAYMSKVELEAKVDALNDEINFLRTLNETELTELQSQISDTSVVLSMDNSRSLDLDGIIAEVKAQYEEMAKCSRAEAEAWYQTKFETLQAQAGKHGDDLRNTRNEISEMNRAIQRLQAEIDNIKNQRAKLEAAIAEAEERGELALKDARAKQEELEAALQRGKQDMARQLREYQELMSVKLALDIEIATYRKLLEGEESRLAGDGVGAVNISVMNSTGGSSSGGGIGLTLGGTMGSNALSFSSSAGPGLLKAYSIRTASASRRSARD

SEQ ID NO: 157336 - protein, 403 aa, Artificial Sequence
  derived and/or modified sequence
MSIHFSSPVFTSRSAAFSGRGAQVRLSSARPGGLGSSSLYGLGASRPRVAVRSAYGGPVGAGIREVTINQSLLAPLRLDADPSLQRVRQEESEQIKTLNNKFASFIDKVRFLEQQNKLLETKWTLLQEQKSAKSSRLPDIFEAQIAGLRGQLEALQVDGGRLEAELRSMQDVVEDFKNKYEDEINHRTAAENEFVVLKKDVDAAYMSKVELEAKVDALNDEINFLRTLNETEIHVLQSHISDTSVVVKLDNSQDLNMDCIIAEIKAQYDDIVTCSWAKAESWYHGCLEMKATVIWHGETVGCTKEEIKELTHMIQRLMAKVENAKCQNSKLEVEVTQSEQQGEVALSDNRCKLVELEGTMQKARQYQEVMNSKLGLNVKAASSCHLLDGEEQRLCDGISAVNI

SEQ ID NO: 157337 - DNA, 1410 bp, Artificial Sequence
  derived and/or modified sequence
atgagcatccacttcagcagccccgtgttcaccagcagaagcgccgccttcagcggcagaggcgcccaggtgagactgagcagcgccagacccggcggcctgggcagcagcagcctgtacggcctgggcgccagcagacccagagtggccgtgagaagcgcctacggcggccccgtgggcgccggcatcagagaggtgaccatcaaccagagcctgctggcccccctgagactggacgccgaccccagcctgcagagagtgagacaggaggagagcgagcagatcaagaccctgaacaacaagttcgccagcttcatcgacaaggtgagattcctggagcagcagaacaagctgctggagaccaagtggaccctgctgcaggagcagaagagcgccaagagcagcagactgcccgacatcttcgaggcccagatcgccggcctgagaggccagctggaggccctgcaggtggacggcggcagactggaggccgagctgagaagcatgcaggacgtggtggaggacttcaagaacaagtacgaggacgagatcaaccacagaaccgccgccgagaacgagttcgtggtgctgaagaaggacgtggacgccgcctacatgagcaaggtggagctggaggccaaggtggacgccctgaacgacgagatcaacttcctgagaaccctgaacgagaccgagctgaccgagctgcagagccagatcagcgacaccagcgtggtgctgagcatggacaacagcagaagcctggacctggacggcatcatcgccgaggtgaaggcccagtacgaggagatggccaagtgcagcagagccgaggccgaggcctggtaccagaccaagttcgagaccctgcaggcccaggccggcaagcacggcgacgacctgagaaacaccagaaacgagatcagcgagatgaacagagccatccagagactgcaggccgagatcgacaacatcaagaaccagagagccaagctggaggccgccatcgccgaggccgaggagagaggcgagctggccctgaaggacgccagagccaagcaggaggagctggaggccgccctgcagagaggcaagcaggacatggccagacagctgagagagtaccaggagctgatgagcgtgaagctggccctggacatcgagatcgccacctacagaaagctgctggagggcgaggagagcagactggccggcgacggcgtgggcgccgtgaacatcagcgtgatgaacagcaccggcggcagcagcagcggcggcggcatcggcctgaccctgggcggcaccatgggcagcaacgccctgagcttcagcagcagcgccggccccggcctgctgaaggcctacagcatcagaaccgccagcgccagcagaagaagcgccagagactag

SEQ ID NO: 157338 - DNA, 1338 bp, Artificial Sequence
  derived and/or modified sequence
atgagcatccacttcagcagccccgtgttcaccagcagaagcgccgccttcagcggcagaggcgcccaggtgagactgagcagcgccagacccggcggcctgggcagcagcagcctgtacggcctgggcgccagcagacccagagtggcccccctgagactggacgccgaccccagcctgcagagagtgagacaggaggagagcgagcagatcaagaccctgaacaacaagttcgccagcttcatcgacaaggtgagattcctggagcagcagaacaagctgctggagaccaagtggaccctgctgcaggagcagaagagcgccaagagcagcagactgcccgacatcttcgaggcccagatcgccggcctgagaggccagctggaggccctgcaggtggacggcggcagactggaggccgagctgagaagcatgcaggacgtggtggaggacttcaagaacagatacgaggacgagatcaaccacagaaccgccgccgagaacgagttcgtggtgctgaagaaggacgtggacgccgcctacatgagcaaggtggagctggaggccaaggtggacgccctgaacgacgagatcaacttcctgagaaccctgaacgagaccgagctgaccgagctgcagagccagatcagcgacaccagcgtggtgctgagcatggacaacagcagaagcctggacctggacggcatcatcgccgaggtgaaggcccagtacgaggagatggccaagtgcagcagagccgaggccgaggcctggtaccagaccaagttcgagaccctgcaggcccaggccggcaagcacggcgacgacctgagaaacaccagaaacgagatcagcgagatgaacagagccatccagagactgcaggccgagatcgacaacatcaagaaccagagagccaagctggaggccgccatcgccgaggccgaggagagaggcgagctggccctgaaggacgccagagccaagcaggaggagctggaggccgccctgcagagaggcaagcaggacatggccagacagctgagagagtaccaggagctgatgagcgtgaagctggccctggacatcgagatcgccacctacagaaagctgctggagggcgaggagagcagactggccggcgacggcgtgggcgccgtgaacatcagcgtgatgaacagcaccggcggcagcagcagcggcggcggcatcggcctgaccctgggcggcaccatgggcagcaacgccctgagcttcagcagcagcgccggccccggcctgctgaaggcctacagcatcagaaccgccagcgccagcagaagaagcgccagagactag

SEQ ID NO: 157339 - DNA, 1212 bp, Artificial Sequence
  derived and/or modified sequence
atgagcatccacttcagcagccccgtgttcaccagcagaagcgccgccttcagcggcagaggcgcccaggtgagactgagcagcgccagacccggcggcctgggcagcagcagcctgtacggcctgggcgccagcagacccagagtggccgtgagaagcgcctacggcggccccgtgggcgccggcatcagagaggtgaccatcaaccagagcctgctggcccccctgagactggacgccgaccccagcctgcagagagtgagacaggaggagagcgagcagatcaagaccctgaacaacaagttcgccagcttcatcgacaaggtgagattcctggagcagcagaacaagctgctggagaccaagtggaccctgctgcaggagcagaagagcgccaagagcagcagactgcccgacatcttcgaggcccagatcgccggcctgagaggccagctggaggccctgcaggtggacggcggcagactggaggccgagctgagaagcatgcaggacgtggtggaggacttcaagaacaagtacgaggacgagatcaaccacagaaccgccgccgagaacgagttcgtggtgctgaagaaggacgtggacgccgcctacatgagcaaggtggagctggaggccaaggtggacgccctgaacgacgagatcaacttcctgagaaccctgaacgagaccgagatccacgtgctgcagagccacatcagcgacaccagcgtggtggtgaagctggacaacagccaggacctgaacatggactgcatcatcgccgagatcaaggcccagtacgacgacatcgtgacctgcagctgggccaaggccgagagctggtaccacggctgcctggagatgaaggccaccgtgatctggcacggcgagaccgtgggctgcaccaaggaggagatcaaggagctgacccacatgatccagagactgatggccaaggtggagaacgccaagtgccagaacagcaagctggaggtggaggtgacccagagcgagcagcagggcgaggtggccctgagcgacaacagatgcaagctggtggagctggagggcaccatgcagaaggccagacagtaccaggaggtgatgaacagcaagctgggcctgaacgtgaaggccgccagcagctgccacctgctggacggcgaggagcagagactgtgcgacggcatcagcgccgtgaacatctag

SEQ ID NO: 157340 - DNA, 1410 bp, Artificial Sequence
  derived and/or modified sequence
atgagcattcacttctcatcccccgttttcacaagtcgctcggccgcatttagtggtcggggcgcccaggtccgactcagcagtgcaaggccaggcggtctggggagctcgagtctgtacgggttgggggcttcccgccctagagtggccgtgagaagtgcttatggaggacctgtgggagcagggattcgggaagtgacaattaaccagtcactgttagctcctcttcgactggacgccgatccttctctacagagagtgagacaggaagagtctgagcagattaaaactctcaataataaattcgcctcgtttatcgacaaggtcaggttcctggagcaacagaataagctgctcgagacaaagtggacactgctgcaggaacagaaatcagcaaagtcaagccggctgccagacatctttgaggctcaaatagccgggctgcgtgggcagttggaggctttgcaagtagacggggggagactcgaagcggagctccggtccatgcaggatgttgttgaagattttaaaaacaaatacgaggacgaaatcaaccatcggaccgctgccgaaaacgaatttgtggtgctgaagaaagatgtggatgcggcctacatgtccaaggtagagttggaggctaaagtcgatgccctgaacgatgagatcaacttcttgcgcacccttaatgagaccgagctcaccgagcttcaaagtcaaatttcagataccagtgtggtgctgagtatggataatagcaggtccctggatctggacgggataatcgcagaggtgaaagcacagtatgaggaaatggctaaatgctcccgagccgaagctgaggcctggtatcagaccaaattcgaaacactgcaggctcaggccggcaaacacggcgatgatttgagaaatacgcggaacgagatctcagagatgaatagagcaattcaacgactgcaggctgagatagataatataaagaatcagagggctaaactggaagcggccattgcagaagccgaggaaagaggtgaactggccctaaaagacgcaagggctaaacaggaggagttagaggcggcccttcagagaggtaaacaggatatggcaagacagctgcgagaataccaggaactcatgagcgtaaaactggctttggacattgagatcgcaacatatcgcaagttactggaaggggaggaatctaggcttgccggtgacggggtcggggcagtgaacatctccgtgatgaactcaacagggggctcgtcaagcggcggcggaatcggcctgaccttgggcggtacgatgggctctaatgctctcagtttttctagctcagcagggcctggtttgcttaaggcttactccattaggaccgcttccgcttcaaggaggtctgctagagactag

SEQ ID NO: 157341 - DNA, 1338 bp, Artificial Sequence
  derived and/or modified sequence
atgtcaatacatttcagtagtcccgtgttcacaagcagatcagctgcattctcaggacgcggggcccaggttcgcttgagctccgcgcgacctggcggattgggatcgagcagcctgtacggtttaggggcatctcgccctcgcgtggccccactgcggctcgacgcagacccatccttgcagcgggtgagacaagaagagtcagaacagattaaaacgctgaataacaaattcgccagcttcatagacaaagtcagattcttggaacaacaaaacaaactcctggagactaagtggactctactccaagagcaaaagtccgccaagagttcccggctgccagacatcttcgaggcccagatcgccggcctccggggccagttagaggccttgcaggttgacggaggccggcttgaggcagagttaaggagcatgcaggatgtggtggaagactttaaaaatagatatgaagacgagatcaatcaccgcactgctgcggagaacgaattcgtggtgctgaagaaggacgtcgatgctgcctatatgtccaaagttgagctggaggccaaagtagacgcactcaacgatgagatcaattttttaagaactctgaatgagacagagcttaccgagctacagtctcaaattagcgacacaagcgtggtactctcgatggataacagccgcagcctggacctggacggtataatcgctgaggtgaaagctcagtatgaagagatggctaaatgctcacgagctgaggcagaggcctggtatcagacgaaattcgaaaccctacaagcccaagccggcaagcatggagacgatcttcggaacaccagaaatgagatctctgagatgaaccgagctattcagaggctacaagctgagatagataacataaagaaccagagggctaagctagaagccgccatagccgaggccgaggaaagaggtgagctggctctaaaagatgctagagccaaacaagaagagctggaggccgctcttcagcggggcaagcaggatatggcgcggcaactaagagagtaccaggaactaatgtcagtgaaactagctttggacatcgagattgccacctaccgaaaacttctggagggcgaagagagccggcttgccggcgatggagtgggagctgtcaacatctctgtcatgaatagcacaggcggtagcagctcaggaggcggcattggactgaccctgggtggaaccatgggtagcaacgccctgtccttcagcagcagcgccggccctgggctgctgaaagcatatagcatacggaccgcctccgcttccaggcgttctgcacgggactag

SEQ ID NO: 157342 - DNA, 1212 bp, Artificial Sequence
  derived and/or modified sequence
atgtccattcacttctcatccccagtgtttaccagtagatccgcagctttttctggtagaggcgctcaggttagacttagttccgcccggccagggggactgggctcaagctcactgtacgggctcggagcctcccgtcctcgggtagccgtacgctcagcttatggcggtccggtcggcgctggaataagagaagtaaccattaaccaatcactcctggcaccactgcgtctggatgcagatccgtccttgcagcgggtacggcaggaagaatccgaacagataaagacattaaacaacaagttcgcttccttcatcgacaaagtgagattcctagaacaacagaacaagctcctcgagactaagtggacactcctgcaggaacagaagtccgcaaagagttctagactccccgacatttttgaggctcagattgcagggctacgtgggcagctagaagccctccaggtcgatggaggaaggctggaagcagaactgcgttccatgcaggatgttgttgaggattttaaaaataagtacgaggacgaaataaaccaccgcacagcggctgagaatgagttcgtggtgctaaaaaaagatgtcgatgcagcgtatatgagcaaagtagagctagaggctaaagtggatgcactcaatgacgagatcaattttctgaggacacttaatgaaactgaaattcacgttctgcaatcccatatatctgatacttctgtggtggtgaagttggacaattcacaggacttgaatatggattgtatcatcgcagaaatcaaggcacaatatgacgatattgtcacatgttcctgggccaaagccgagtcatggtatcacggatgcttggagatgaaagcaacagtcatatggcacggcgagacggtaggatgtaccaaggaggagataaaagagctgactcacatgatccagaggcttatggcgaaggttgaaaacgcgaagtgtcagaactctaaactggaggtggaagtcacccaaagtgaacagcagggagaggttgcgctgtccgataatagatgcaaactggtggaactggaagggacaatgcagaaagctaggcagtaccaggaggtcatgaacagcaagctcggcctgaatgtgaaagctgcttccagctgccacctgcttgacggcgaggagcagaggttgtgcgacggaatcagcgccgtcaacatctag

SEQ ID NO: 157343 - DNA, 1410 bp, Artificial Sequence
  derived and/or modified sequence
atgagcatccacttcagcagccctgtgttcaccagccgctctgctgccttcagcggccgcggggcccaggtgcggctgagcagcgcccggcctgggggcctgggcagcagcagcctgtatggcctgggcgccagccggccccgggtggccgtgcgcagcgcctatggaggccctgtgggcgccggcatccgggaggtgaccatcaaccagagcctgctggcccccctgcggctggatgctgaccccagcctgcagagggtgcggcaggaggagagcgagcagatcaagaccctgaacaacaagtttgccagcttcatcgacaaggtgcgcttcctggagcagcagaacaagctgctggagaccaagtggaccctgctgcaggagcagaagagcgccaagagcagccggctgcctgacatctttgaggcccagattgctggcctgcggggccagctggaggccctgcaggtggatggcggccgcctggaggccgagctgcgctccatgcaggatgtggtggaggacttcaagaacaagtatgaagatgagatcaaccacaggacagctgctgaaaatgaatttgtggtgctgaagaaggatgtggatgctgcctacatgagcaaggtggagctggaggccaaggtggatgccctgaatgatgagatcaacttcctgcggaccctgaatgaaacagagctgacagagctgcagagccagatcagtgacacctctgtggtgctgtccatggacaacagccgcagcctggacctggatggcatcatcgccgaggtgaaggcccagtatgaggagatggccaagtgcagcagagctgaggccgaggcctggtaccagaccaagtttgagaccctgcaggcccaggccggcaagcatggagatgacctgaggaacaccagaaatgagatcagcgagatgaacagagccatccagaggctgcaggccgagattgacaacatcaagaaccagagggccaagctggaggccgccatcgccgaggccgaggagcggggggagctggccctgaaggatgcccgggccaagcaggaggagctggaggccgccctgcagaggggcaagcaggacatggcccggcagctgcgggagtaccaggagctgatgtctgtgaagctggccctggacattgaaattgccacctacaggaagctgctggagggggaggagagccggctggccggagatggagtgggcgctgtgaacatctctgtgatgaacagcactggaggcagcagcagcggcggcggcatcggcctgaccctgggcggcaccatgggcagcaatgccctgtccttcagcagcagcgctggccctggcctgctgaaggcctacagcatcagaacagccagcgccagccgccgcagcgcccgggactag

SEQ ID NO: 157344 - DNA, 1338 bp, Artificial Sequence
  derived and/or modified sequence
atgagcatccacttcagcagccctgtgttcaccagccgctctgctgccttcagcggccgcggggcccaggtgcggctgagcagcgcccggcctgggggcctgggcagcagcagcctgtatggcctgggcgccagccggccccgggtggcccccctgcggctggatgctgaccccagcctgcagagggtgcggcaggaggagagcgagcagatcaagaccctgaacaacaagtttgccagcttcatcgacaaggtgcgcttcctggagcagcagaacaagctgctggagaccaagtggaccctgctgcaggagcagaagagcgccaagagcagccggctgcctgacatctttgaggcccagattgctggcctgcggggccagctggaggccctgcaggtggatggcggccgcctggaggccgagctgcgctccatgcaggatgtggtggaggacttcaagaacagatatgaagatgagatcaaccacaggacagctgctgaaaatgaatttgtggtgctgaagaaggatgtggatgctgcctacatgagcaaggtggagctggaggccaaggtggatgccctgaatgatgagatcaacttcctgcggaccctgaatgaaacagagctgacagagctgcagagccagatcagtgacacctctgtggtgctgtccatggacaacagccgcagcctggacctggatggcatcatcgccgaggtgaaggcccagtatgaggagatggccaagtgcagcagagctgaggccgaggcctggtaccagaccaagtttgagaccctgcaggcccaggccggcaagcatggagatgacctgaggaacaccagaaatgagatcagcgagatgaacagagccatccagaggctgcaggccgagattgacaacatcaagaaccagagggccaagctggaggccgccatcgccgaggccgaggagcggggggagctggccctgaaggatgcccgggccaagcaggaggagctggaggccgccctgcagaggggcaagcaggacatggcccggcagctgcgggagtaccaggagctgatgtctgtgaagctggccctggacattgaaattgccacctacaggaagctgctggagggggaggagagccggctggccggagatggagtgggcgctgtgaacatctctgtgatgaacagcactggaggcagcagcagcggcggcggcatcggcctgaccctgggcggcaccatgggcagcaatgccctgtccttcagcagcagcgctggccctggcctgctgaaggcctacagcatcagaacagccagcgccagccgccgcagcgcccgggactag

SEQ ID NO: 157345 - DNA, 1212 bp, Artificial Sequence
  derived and/or modified sequence
atgagcatccacttcagcagccctgtgttcaccagccgctctgctgccttcagcggccgcggggcccaggtgcggctgagcagcgcccggcctgggggcctgggcagcagcagcctgtatggcctgggcgccagccggccccgggtggccgtgcgcagcgcctatggaggccctgtgggcgccggcatccgggaggtgaccatcaaccagagcctgctggcccccctgcggctggatgctgaccccagcctgcagagggtgcggcaggaggagagcgagcagatcaagaccctgaacaacaagtttgccagcttcatcgacaaggtgcgcttcctggagcagcagaacaagctgctggagaccaagtggaccctgctgcaggagcagaagagcgccaagagcagccggctgcctgacatctttgaggcccagattgctggcctgcggggccagctggaggccctgcaggtggatggcggccgcctggaggccgagctgcgctccatgcaggatgtggtggaggacttcaagaacaagtatgaagatgagatcaaccacaggacagctgctgaaaatgaatttgtggtgctgaagaaggatgtggatgctgcctacatgagcaaggtggagctggaggccaaggtggatgccctgaatgatgagatcaacttcctgcggaccctgaatgaaacagagatccacgtgctgcagagccacatcagtgacacctctgtggtggtgaagctggacaacagccaggacctgaacatggactgcatcatcgccgagatcaaggcccagtatgatgacatcgtgacctgctcctgggccaaggccgagagctggtaccacggctgcctggagatgaaggccaccgtcatctggcacggggagaccgtgggctgcaccaaggaggagatcaaggagctgacccacatgatccagaggctgatggccaaggtggagaatgccaagtgccagaacagcaagctggaggtggaggtgacccagagcgagcagcagggcgaggtggccctgagtgacaaccgctgcaagctggtggagctggagggcaccatgcagaaggcccggcagtaccaggaggtgatgaacagcaagctgggcctgaatgtgaaggccgccagcagctgccacctgctggatggagaggagcagaggctgtgtgatggcatctctgctgtgaacatctag

SEQ ID NO: 157346 - DNA, 1754 bp, Artificial Sequence
  derived and/or modified sequence
agagggcggagggcggccccaggaggggcctggcagcagagaaaggtggcccgcggcagccccgcccctacctgtggaagcccagccgcccgctcccgcggataaaaggcgcggagtgtccccgaggtcagcgagtgcgcgctcctcctcgcccgccgctaggtccatcccggcccagccaccatgtccatccacttcagctccccggtattcacctcgcgctcagccgccttctcgggccgcggcgcccaggtgcgcctgagctccgctcgccccggcggccttggcagcagcagcctctacggcctcggcgcctcacggccgcgcgtggccgtgcgctctgcctatgggggcccggtgggcgccggcatccgcgaggtcaccattaaccagagcctgctggccccgctgcggctggacgccgacccctccctccagcgggtgcgccaggaggagagcgagcagatcaagaccctcaacaacaagtttgcctccttcatcgacaaggtgcggtttctggagcagcagaacaagctgctggagaccaagtggacgctgctgcaggagcagaagtcggccaagagcagccgcctcccagacatctttgaggcccagattgctggccttcggggtcagcttgaggcactgcaggtggatgggggccgcctggaggcggagctgcggagcatgcaggatgtggtggaggacttcaagaataagtacgaagatgaaattaaccaccgcacagctgctgagaatgagtttgtggtgctgaagaaggatgtggatgctgcctacatgagcaaggtggagctggaggccaaggtggatgccctgaatgatgagatcaacttcctcaggaccctcaatgagacggagttgacagagctgcagtcccagatctccgacacatctgtggtgctgtccatggacaacagtcgctccctggacctggacggcatcatcgctgaggtcaaggcgcagtatgaggagatggccaaatgcagccgggctgaggctgaagcctggtaccagaccaagtttgagaccctccaggcccaggctgggaagcatggggacgacctccggaatacccggaatgagatttcagagatgaaccgggccatccagaggctgcaggctgagatcgacaacatcaagaaccagcgtgccaagttggaggccgccattgccgaggctgaggagcgtggggagctggcgctcaaggatgctcgtgccaagcaggaggagctggaagccgccctgcagcggggcaagcaggatatggcacggcagctgcgtgagtaccaggaactcatgagcgtgaagctggccctggacatcgagatcgccacctaccgcaagctgctggagggcgaggagagccggttggctggagatggagtgggagccgtgaatatctctgtgatgaattccactggtggcagtagcagtggcggtggcattgggctgaccctcgggggaaccatgggcagcaatgccctgagcttctccagcagtgcgggtcctgggctcctgaaggcttattccatccggaccgcatccgccagtcgcaggagtgcccgcgactgagccgcctcccaccactccactcctccagccaccacccacaatcacaagaagattcccacccctgcctcccatgcctggtcccaagacagtgagacagtctggaaagtgatgtcagaatagcttccaataaagcagcctcattctgaggcctgagtgatcca

SEQ ID NO: 157347 - DNA, 1550 bp, Artificial Sequence
  derived and/or modified sequence
agcgagtgcgcgctcctcctcgcccgccgctaggtccatcccggcccagccaccatgtccatccacttcagctccccggtattcacctcgcgctcagccgccttctcgggccgcggcgcccaggtgcgcctgagctccgctcgccccggcggccttggcagcagcagcctctacggcctcggcgcctcacggccgcgcgtggccccgctgcggctggacgccgacccctccctccagcgggtgcgccaggaggagagcgagcagatcaagaccctcaacaacaagtttgcctccttcatcgacaaggtgcggtttctggagcagcagaacaagctgctggagaccaagtggacgctgctgcaggagcagaagtcggccaagagcagccgcctcccagacatctttgaggcccagattgctggccttcggggtcagcttgaggcactgcaggtggatgggggccgcctggaggcggagctgcggagcatgcaggatgtggtggaggacttcaagaataggtacgaagatgaaattaaccaccgcacagctgctgagaatgagtttgtggtgctgaagaaggatgtggatgctgcctacatgagcaaggtggagctggaggccaaggtggatgccctgaatgatgagatcaacttcctcaggaccctcaatgagacggagttgacagagctgcagtcccagatctccgacacatctgtggtgctgtccatggacaacagtcgctccctggacctggacggcatcatcgctgaggtcaaggcgcagtatgaggagatggccaaatgcagccgggctgaggctgaagcctggtaccagaccaagtttgagaccctccaggcccaggctgggaagcatggggacgacctccggaatacccggaatgagatttcagagatgaaccgggccatccagaggctgcaggctgagatcgacaacatcaagaaccagcgtgccaagttggaggccgccattgccgaggctgaggagcgtggggagctggcgctcaaggatgctcgtgccaagcaggaggagctggaagccgccctgcagcggggcaagcaggatatggcacggcagctgcgtgagtaccaggaactcatgagcgtgaagctggccctggacatcgagatcgccacctaccgcaagctgctggagggcgaggagagccggttggctggagatggagtgggagccgtgaatatctctgtgatgaattccactggtggcagtagcagtggcggtggcattgggctgaccctcgggggaaccatgggcagcaatgccctgagcttctccagcagtgcgggtcctgggctcctgaaggcttattccatccggaccgcatccgccagtcgcaggagtgcccgcgactgagccgcctcccaccactccactcctccagccaccacccacaatcacaagaagattcccacccctgcctcccatgcctggtcccaagacagtgagacagtctggaaagtgatgtcagaatagcttccaataaagcagcctcattctgaggcctgagtgat

SEQ ID NO: 157348 - DNA, 1336 bp, Artificial Sequence
  derived and/or modified sequence
cagccccgcccctacctgtggaagcccagccgcccgctcccgcggataaaaggcgcggagtgtccccgaggtcagcgagtgcgcgctcctcctcgcccgccgctaggtccatcccggcccagccaccatgtccatccacttcagctccccggtattcacctcgcgctcagccgccttctcgggccgcggcgcccaggtgcgcctgagctccgctcgccccggcggccttggcagcagcagcctctacggcctcggcgcctcacggccgcgcgtggccgtgcgctctgcctatgggggcccggtgggcgccggcatccgcgaggtcaccattaaccagagcctgctggccccgctgcggctggacgccgacccctccctccagcgggtgcgccaggaggagagcgagcagatcaagaccctcaacaacaagtttgcctccttcatcgacaaggtgcggtttctggagcagcagaacaagctgctggagaccaagtggacgctgctgcaggagcagaagtcggccaagagcagccgcctcccagacatctttgaggcccagattgctggccttcggggtcagcttgaggcactgcaggtggatgggggccgcctggaggcggagctgcggagcatgcaggatgtggtggaggacttcaagaataagtacgaagatgaaattaaccaccgcacagctgctgagaatgagtttgtggtgctgaagaaggatgtggatgctgcctacatgagcaaggtggagctggaggccaaggtggatgccctgaatgatgagatcaacttcctcaggaccctcaatgagacggagatccatgttctccaatcccacatctcagacacctctgtggttgtcaagctggacaacagccaggacctgaacatggactgcatcattgccgagatcaaggcacagtatgacgacattgtcacctgcagctgggccaaggctgagtcttggtaccatggctgcctggagatgaaggccacggtgatctggcacggggagactgtgggctgcaccaaggaggagatcaaggagctgacccacatgatccagaggctgatggccaaggtggagaatgccaagtgccagaactccaagctggaggtggaggtgacccagtctgagcagcagggtgaggtggcccttagcgataaccgctgcaagctggttgagctggagggcaccatgcagaaggccaggcagtaccaggaggtgatgaactccaagctgggcctcaatgtgaaggctgcctcttcttgccaccttctagatggtgaggagcagaggctgtgtgatggcatcagtgctgtgaatatc

SEQ ID NO: 157349 - DNA, 1410 bp, Artificial Sequence
  derived and/or modified sequence
atgagcatccacttcagcagccccgtgttcaccagccggagcgccgccttcagcgggagaggagcacaggtccggctcagctcagccagacccggagggctgggttctagctcactgtatggacttggcgcatctcgccccagggtggccgtgagatccgcttacgggggccctgttggtgcgggtatacgtgaggtaaccataaatcagagtcttctagcgccgctgcgtctcgatgccgatccttccttgcagcgggttagacaggaagagagcgagcagataaaaacactcaataacaagttcgcttcttttatcgataaggtgcggtttctcgagcagcaaaataaactcctagagaccaaatggacactgctccaagagcagaaaagcgctaagagctcccgcctgccagacatattcgaagcccagattgccgggctgagaggccaacttgaggccctccaagtggatggcggtcgactggaggccgagcttcgatctatgcaggatgtggtcgaagatttcaagaataagtacgaagatgagatcaatcataggaccgcggccgaaaacgaattcgtggtgctgaaaaaagatgtagacgcggcgtatatgagtaaagtggagcttgaggccaaagtcgatgcgctgaatgatgaaataaatttcttgcggacactgaatgagactgaacttaccgaactccagtctcagataagcgatacgtctgtagtactgtccatggacaatagcaggagtttagacctggacggaattattgccgaagtgaaggcccagtatgaagaaatggccaagtgtagtagagcagaggccgaagcctggtaccagacaaaattcgaaacactgcaagctcaggccggaaagcacggagatgacctacggaacaccaggaacgagatcagcgaaatgaatcgtgctatccagagattacaagctgaaatcgacaacattaagaatcagagagcaaagctggaggctgcgatcgcggaggctgaagagaggggagaacttgccctaaaagacgccagagcaaaacaggaggagctcgaagctgctctgcagaggggcaagcaggacatggcacgtcagctgcgagaataccaggagctcatgtctgtgaagcttgctttggacatcgaaatagctacctaccgaaagcttctggagggcgaggaatccaggcttgcaggggacggtgttggtgctgttaatatttcagtgatgaatagcacaggcgggtctagttctggaggtggaattggcctgacccttggcggaacgatggggagcaacgccctgtcatttagctcctccgccggccccgggcttctgaaggcctactcaattaggaccgcctctgccagccggcgatctgctagggactag

SEQ ID NO: 157350 - DNA, 1338 bp, Artificial Sequence
  derived and/or modified sequence
atgagcatccacttcagcagccccgtgttcaccagccggagcgccgcctttagcgggaggggggcccaagtcaggctctcttctgcccgccctgggggcctgggcagctcatcactgtatggcctgggagccagccggccacgggtcgcccctctccgccttgacgctgatccaagtctacagagggtcaggcaggaggaaagcgagcaaataaaaaccctcaataataagtttgcatcttttatcgataaagtccgcttccttgaacagcagaataaattgctggagaccaagtggacattgttacaggagcagaaatccgccaaatccagtcggttgcctgacatcttcgaagcccagattgccggactgcgcggccaactggaagccttacaagtggacggcggccgattggaagcagagttgagatcaatgcaagacgtggtggaagactttaagaatcgctacgaagatgaaatcaaccacagaacagctgcagagaatgagttcgtggtcctgaaaaaagatgtggatgccgcatacatgagcaaagttgagctggaggcgaaagtggacgccctgaacgacgagatcaattttctaagaactttaaatgaaaccgaactcactgaacttcaatcacagatctccgacacaagcgtggtgctgtcaatggataactccaggtccctggatttagacggaatcatcgcggaggttaaggcgcagtatgaggaaatggctaagtgctcacgcgcggaggcagaggcctggtaccagaccaagtttgaaacattgcaagcacaggcaggcaaacacggcgacgacctgagaaatactcgtaatgagatcagcgagatgaatcgagccattcagcgactgcaggcagaaatagacaacattaaaaatcagagggcaaaattggaggcggcgattgccgaggccgaggagagaggagaattagccctgaaggacgcccgggcgaaacaggaagagctggaggccgccctgcaacgaggcaagcaggacatggccaggcagttgcgcgagtaccaggagctgatgagcgtgaaactagccctcgatattgaaatcgcaacttatcgtaagctgctggaaggagaagagtctcgcctggcaggcgacggggttggtgccgtgaatataagtgtcatgaattctactggcggcagttcctccgggggtggaattggcctgacccttggtggcactatgggctccaatgcgctgagcttttctagttccgctgggcctgggctgttgaaggcctatagtattcgcaccgcgagcgcctcaagaaggagcgctagggactag

SEQ ID NO: 157351 - DNA, 1212 bp, Artificial Sequence
  derived and/or modified sequence
atgagcatccacttcagcagccccgtgttcaccagccggagcgccgccttttccggtagaggcgcccaggttcgcttatccagcgcacggccaggcggattaggaagctcatctctctacgggcttggcgcgtcaaggcccagagttgctgttagatcagcgtacgggggccctgtgggggctggcatcagagaggtgactatcaaccagtccctcctggctcctctgcgccttgacgcagaccctagtctacagcgcgtgcgccaggaagagtccgagcagattaagacacttaataataaattcgccagcttcatcgataaagttagattcttagagcaacagaataagctgctggaaactaagtggacgttactccaggagcaaaagtcggcaaagtccagtcgtttgccggacatcttcgaggcccagatagccgggttgcgaggtcagttggaggctcttcaggtagacggaggtagactcgaggccgagttgcggtccatgcaggatgttgtggaagattttaagaacaagtatgaggatgaaattaaccatcggaccgctgcggaaaacgaattcgtcgtactgaaaaaggacgtggatgcagcctacatgtctaaggtggaactggaagctaaggtcgacgcactcaatgatgagattaacttccttaggaccctcaatgaaacagaaattcacgtgttgcaatcccacatctcagatactagcgtggtggtgaagttggacaatagccaggatctgaacatggattgcatcatagctgagataaaagcacaatacgatgatatcgtgacatgttcctgggccaaggcagagagctggtaccacggatgtctggagatgaaagctacagttatttggcacggagagaccgttggttgcacaaaggaagagatcaaggaactgactcacatgattcagcggctaatggctaaagtggaaaatgcaaaatgtcagaactcaaaactggaggtcgaagtgacgcaatccgaacagcagggcgaggtggcgctgtcggataacagatgcaagctagttgaactggagggaacaatgcagaaggccaggcagtatcaagaagtgatgaattcaaagcttgggctgaacgtcaaagccgcaagctcttgccacttgctggacggggaagagcaacgactgtgcgatggcatctccgcagtgaatatatag

SEQ ID NO: 157352 - DNA, 1410 bp, Artificial Sequence
  derived and/or modified sequence
atgagtattcatttctcatcccctgttttcactagtcgaagcgcagcgttttccggcaggggcgcacaggtacgactgagctcggccagaccaggaggattaggaagttcctctttgtacggtctaggggcttctaggccccgagtcgcggttaggtccgcctatggaggccctgttggcgcaggcatcagagaagtgacaattaaccagagtcttctcgcacctctccgtcttgacgcggatccatccttacagagggtcagacaggaggaatccgagcaaatcaaaacactgaacaataaattcgcttcattcatcgacaaggtccgatttcttgagcagcagaacaaattactggagacaaagtggacgttgttgcaagaacagaagtctgctaagagcagccgtctcccggatatctttgaagcccagattgctgggcttagagggcaactggaagcgttacaagttgatggtggcagactggaggccgagctgcgtagcatgcaggatgtggtggaggattttaagaacaagtacgaagacgagataaatcatagaaccgcggctgaaaacgagttcgtggtcctgaaaaaagatgtggacgctgcctacatgagtaaggtggagctggaagccaaagtggacgccctgaacgatgagattaatttcctgcgaacactgaacgaaaccgaactcactgagcttcagtcccaaatttccgacacatctgtggttctatctatggataacagtagatcgctggatttagatgggatcatcgctgaagtcaaagctcagtacgaggagatggcgaaatgctccagagccgaggcagaggcttggtaccaaacgaagttcgaaaccctgcaggcgcaggccggaaaacacggggatgatctgagaaatacacgaaatgagatttcagaaatgaatagagcaatccagcgcttacaggctgagatagacaacataaaaaatcaacgcgctaagctcgaagccgctatagccgaggccgaagagcggggagagctggccttaaaagacgcccgtgccaagcaagaagagctggaggctgccctccagcgtggcaagcaggatatggcacggcaactgagggaataccaagagcttatgtcagtcaagctggctttggatattgaaatcgctacttatagaaagttgctggaaggagaagaaagtagactggctggcgacggtgtgggagccgtgaacattagtgtgatgaattcaactggcggaagctcttccggtggtggcatagggttgacccttgggggaaccatgggatccaatgcgctctcattctcgagttcagcaggccctgggctgcttaaggcttattcaatacggaccgcctctgcctctcggcgttcagccagggactag

SEQ ID NO: 157353 - DNA, 1338 bp, Artificial Sequence
  derived and/or modified sequence
atgtctatccacttctcaagccctgtgttcaccagccgctccgctgctttctcgggacgcggtgcccaagtgaggttaagttctgcgagaccaggaggcctcggaagctcatcactttatggcctgggcgcatcccgtccacgggtagccccactcaggctagatgctgacccttcactccaacgcgtacggcaagaagagagcgaacagatcaaaactctgaacaacaaattcgcgtctttcatcgataaagtcaggtttcttgagcagcagaacaaattgctggagacgaagtggacgctcctgcaggaacaaaaaagtgctaaatccagcagactaccagatattttcgaagcgcagattgctggccttcgtggacagcttgaggccctgcaggtggacggcggaaggttggaggccgagctgagaagtatgcaggacgtagtggaagactttaaaaaccggtatgaagatgagattaaccacaggacagcagctgaaaacgagtttgttgttttaaaaaaagacgtcgacgcagcatatatgtcaaaagtagagttagaagcgaaggtcgatgcgttgaatgacgagattaacttcctccgcacccttaacgagactgagcttaccgagctgcaatcacagatctccgacacctctgtggtcctcagtatggacaattcgcgctctctagaccttgatgggatcatcgctgaggtcaaggctcaatatgaggagatggctaagtgttctcgggcagaagccgaggcttggtaccagacgaagtttgaaaccttacaggcccaggctggaaagcatggcgatgacttaagaaacacaagaaatgaaatatccgaaatgaaccgggctattcagcgtctccaggccgagatcgataacattaaaaatcagagggctaagcttgaagccgctattgctgaagccgaggaacggggtgagctggccctcaaggatgccagagcaaagcaggaagagctggaggccgctctgcaacgtggcaaacaggatatggcacgccagctgagagagtatcaagagctgatgagcgtgaagttggcattggacatcgaaatcgccacctatagaaaactgctggagggagaggaatctcgattggctggtgacggtgtcggggcagtcaatataagtgttatgaacagtactggtggcagtagcagtggtggaggcattggcctgaccttgggcggaactatgggaagcaacgcattatcgttctctagctccgctggacctggacttctgaaagcctacagcatacgcaccgcttctgccagtcgtcgctccgcaagggattag

SEQ ID NO: 157354 - DNA, 1212 bp, Artificial Sequence
  derived and/or modified sequence
atgagcatacacttctccagtcctgtgtttacatcgcggagtgccgcattttcaggaagaggtgcgcaagtgcggttatcatcagccaggcccggtggactgggtagctcatcattatacgggctaggcgcatcacgccctcgggtggctgtgcgatccgcttacggcggtccggtgggggctggcatacgcgaagttaccatcaaccagagcctcctggctcctttaaggctcgacgcggacccatcgctgcagagagtgaggcaggaggagtctgagcagatcaaaacactcaataacaaattcgcatcgttcattgacaaagtaaggttcctcgaacagcagaataaactactggagacaaaatggactctgctgcaagaacagaagtccgctaaatctagccgcctcccagacatctttgaagcacagattgccggtttgcgcggacagctagaggctctccaggtagacgggggtcggttggaggcggagcttcggagcatgcaggatgtggtcgaggatttcaaaaacaaatatgaagacgaaattaatcaccgcactgcggctgaaaatgaattcgtagtcttgaagaaagacgtggatgccgcttacatgtccaaagttgagctcgaagcaaaagttgacgccctgaacgacgaaattaattttctcagaaccttgaacgagactgagatccacgtgcttcagtctcacatcagcgatactagcgtggttgtaaagctcgataacagtcaggatctgaacatggactgtattattgccgaaattaaagcccagtacgacgacatcgtgacatgctcctgggctaaggctgagtcttggtaccacggatgtctggaaatgaaggcgacagtcatttggcatggagagaccgtcggttgcaccaaggaggagattaaggagttaacgcatatgatccagcggctgatggccaaggtagaaaacgcaaagtgtcagaacagcaagctggaagtcgaagtgacacagagtgagcagcagggggaggtcgctctgtctgacaatagatgcaagttggtggagctggaagggactatgcagaaggccaggcaataccaggaggtaatgaattccaaactgggactgaatgtgaaagcggcttcatcttgccatctgctggacggggaggaacagagattgtgcgacggtatcagtgctgtgaacatttag

SEQ ID NO: 157355 - protein, 473 aa, Artificial Sequence
  derived and/or modified sequence
MTTCSRQFTSSSSMKGSCGIGGGIGGGSSRISSVLAGGSCRAPSTYGGGLSVSSRFSSGGACGLGGGYGGGFSSSSSFGSGFGGGYGGGLGAGFGGGLGAGFGGGFAGGDGLLVGSEKVTMQNLNDRLASYLDKVRALEEANADLEVKIRDWYQRQRPSEIKDYSPYFKTIEDLRNKIIAATIENAQPILQIDNARLAADDFRTKYEHELALRQTVEADVNGLRRVLDELTLARTDLEMQIEGLKEELAYLRKNHEEEMLALRGQTGGDVNVEMDAAPGVDLSRILNEMRDQYEQMAEKNRRDAETWFLSKTEELNKEVASNSELVQSSRSEVTELRRVLQGLEIELQSQLSMKASLENSLEETKGRYCMQLSQIQGLIGSVEEQLAQLRCEMEQQSQEYQILLDVKTRLEQEIATYRRLLEGEDAHLSSQQASGQSYSSREVFTSSSSSSSRQTRPILKEQSSSSFSQGQSS

SEQ ID NO: 157356 - DNA, 1422 bp, Artificial Sequence
  derived and/or modified sequence
atgaccacttgtagccgccagttcaccagtagcagcagcatgaaagggagctgtggaattggtggcggtatagggggtggatcaagcaggattagttccgtcctggccggaggtagttgccgtgctcctagcacttacgggggcggcctatcagtatcaagccggttctcttctggaggagcctgcggcttaggtggtggctatggcggcgggttctcgtcatcgagttccttcggtagtggatttggtgggggctatggaggcggccttggggcaggcttcggaggaggtcttggtgccggtttcggtggcgggtttgccggcggagatggccttcttgtggggtctgaaaaggtgactatgcagaacctgaacgatcggcttgcctcatatctcgacaaagtccgcgctctcgaagaggccaacgcggacctggaggtcaagatacgggactggtatcagcgacagaggccttctgagattaaagattattctccgtactttaaaactattgaagacctgcgcaataagattatcgctgctaccatcgagaatgcccagccaatcctgcagatcgataacgcgaggttagccgctgatgatttccgcactaagtatgaacacgaactggcccttcggcagactgtggaagcagacgtgaacggcctgaggcgcgtccttgacgagctcacactcgccaggacagacctcgagatgcagatcgagggcctgaaggaggaacttgcttacctacgtaagaatcacgaggaggagatgcttgctctgcggggccaaaccggaggcgatgtcaacgtggagatggacgcggctccgggagtggatctatcccgcatcctcaacgagatgcgcgaccagtatgaacagatggctgaaaaaaatcgaagagacgctgagacttggtttctgtccaaaactgaggagctcaataaggaggtggctagcaatagtgaattagtacaatcttcccgcagcgaggtaaccgaactgcgcagagtgctacagggcctcgagatcgagctccagtcgcagttgagcatgaaggcctccctggagaattccctggaagaaaccaaggggaggtactgcatgcaattgtctcagatccagggactaatcgggtcagtcgaagaacagctcgctcagcttcggtgtgaaatggagcagcaatctcaggagtatcagattctgttggacgtcaagactcgcctggaacaggagatagctacctatcgtagactgctagaaggcgaagacgcccatctctcttcccagcaggcgtcggggcagtcatacagcagcagggaagtcttcacatcttcctcgagtagttcctcccggcagaccagacccatcttgaaggagcagtcttcaagctccttctctcagggccagagctcatag

SEQ ID NO: 157357 - DNA, 1644 bp, Artificial Sequence
  derived and/or modified sequence
gccttcctgagcacctttccttctttcagccaactgctcactcgctcacctccctccttggcaccatgaccacctgcagccgccagttcacctcctccagctccatgaagggctcctgcggcatcggaggcggcatcgggggcggctccagccgcatctcctccgtcctggccggagggtcctgccgtgcccccagcacctacgggggcggcctgtctgtctcctctcgcttctcctctgggggagcctgcgggctggggggcggctatggcggtggcttcagcagcagcagcagctttggtagtggcttcgggggaggatatggtggtggccttggtgctggcttcggtggtggcttgggtgctggctttggtggtggttttgctggtggtgatgggcttctggtgggcagtgagaaggtgaccatgcagaacctcaatgaccgcctggcctcctacctggacaaggtgcgtgctctggaggaggccaacgccgacctggaagtgaagatccgtgactggtaccagaggcagcggcccagtgagatcaaagactacagtccctacttcaagaccatcgaggacctgaggaacaagatcattgcggccaccattgagaatgcgcagcccattttgcagattgacaatgccaggctggcagccgatgacttcaggaccaagtatgagcatgaactggccctgcggcagactgtggaggccgacgtcaatggcctgcgccgggtgttggatgagctgaccctggccaggactgacctggagatgcagatcgaaggcctgaaggaggagctggcctacctgaggaagaaccacgaggaggagatgcttgctctgagaggtcagaccggcggagatgtgaacgtggagatggatgctgcacctggcgtggacctgagccgcatcctgaatgagatgcgtgaccagtacgagcagatggcagagaaaaaccgcagagacgctgagacctggttcctgagcaagaccgaggagctgaacaaagaagtggcctccaacagcgaactggtacagagcagccgcagtgaggtgacggagctccggagggtgctccagggcctggagattgagctgcagtcccagctcagcatgaaagcatccctggagaacagcctggaggagaccaaaggccgctactgcatgcagctgtcccagatccagggactgattggcagtgtggaggagcagctggcccagctacgctgtgagatggagcagcagagccaggagtaccagatcttgctggatgtgaagacgcggctggagcaggagattgccacctaccgccgcctgctggagggcgaggatgcccacctttcctcccagcaagcatctggccaatcctattcttcccgcgaggtcttcacctcctcctcgtcctcttcgagccgtcagacccggcccatcctcaaggagcagagctcatccagcttcagccagggccagagctcctagaactgagctgcctctaccacagcctcctgcccaccagctggcctcacctcctgaaggcccgggtcaggaccctgctctcctggcgcagttcccagctatctcccctgctcctctgctggtggtgggctaataaagctgactttctggttgatgcaaa

SEQ ID NO: 157358 - DNA, 1422 bp, Artificial Sequence
  derived and/or modified sequence
atgaccacctgcagccggcagttcaccagcagcagctccatgaagggcagctgtggcatcggcggcggcatcggcggcggcagcagccgcatcagctctgtgctggccggcggcagctgccgggcccccagcacctacggcggcggcctgtctgtgagcagccgcttcagcagcggcggggcctgtggcctgggcggcggctacggcggcggcttcagcagcagcagcagctttggcagcggctttggaggcggctacggcggcggcctgggcgccggctttggaggcggcctgggcgccggctttggaggcggctttgctggaggagatggcctgctggtgggcagcgagaaggtgaccatgcagaacctgaatgaccggctggccagctacctggacaaggtgcgggccctggaggaggccaatgctgacctggaggtgaagatccgggactggtaccagaggcagaggccttctgagatcaaggactacagcccctacttcaagaccatcgaggacctgaggaacaagatcatcgccgccaccattgaaaatgcccagcccatcctgcagattgacaatgcccggctggccgcagatgacttccgcaccaagtatgagcacgagctggccctgcggcagacagtggaggctgatgtgaatggcctgcggcgggtgctggatgagctgaccctggccaggacagacctggagatgcagatcgagggcctgaaggaggagctggcctacctgaggaagaaccacgaggaggagatgctggccctgcggggccagacaggaggagatgtgaatgtggagatggatgctgcccctggggtggacctgagccgcatcctgaatgagatgagggaccagtatgagcagatggccgagaagaacagaagagatgctgagacctggttcctgagcaagacagaggagctgaacaaggaggtggccagcaacagcgagctggtgcagagcagccgctctgaggtgacagagctgcggcgggtgctgcagggcctggagattgagctgcagagccagctgtccatgaaggccagcctggagaacagcctggaggagaccaagggccgctactgcatgcagctgagccagatccagggcctgattggctctgtggaggagcagctggcccagctgcgctgtgagatggagcagcagagccaggagtaccagatcctgctggatgtgaagacccggctggagcaggagatcgccacctaccgccgcctgctggagggggaggatgcccacctgagcagccagcaggccagcggccagagctacagcagccgggaggtgttcaccagcagcagcagcagcagcagccggcagacccggcccatcctgaaggagcagagcagcagcagcttcagccagggccagagcagctag

SEQ ID NO: 157359 - DNA, 1422 bp, Artificial Sequence
  derived and/or modified sequence
atgaccacctgcagccggcagttcaccagcagcagcagcatgaagggctcctgtggaattggaggcggtatcggcggtggctcctcccgcatcagctccgtccttgcgggtggaagctgtagagcaccctctacttacggcggcggtctgagcgtgtcatcaaggttctccagtgggggagcatgtggcctcggaggcgggtatggcggtggattcagcagcagcagcagctttggaagcggcttcggaggtggttatggtggaggtctcggcgccgggttcggtggaggcctgggcgcaggattcgggggaggtttcgcaggaggggatgggcttttggtgggcagcgagaaagtaacaatgcagaacctgaacgaccgcctggcctcctatttagacaaggtgagagcccttgaagaggctaacgcagacttggaagtcaaaattagggactggtatcagaggcagagaccttctgaaatcaaggactattctccttatttcaaaacaattgaggacttacgaaataaaatcattgccgcaaccatcgagaatgctcagccaatcctgcaaatagacaacgcacgcctcgcggccgatgactttcggacaaaatacgagcatgaactggcacttcgacagaccgtagaggccgatgtcaatggcctacgaagagtgttggacgagctaaccctggctagaacagatctggagatgcagatcgagggcttgaaagaggaactggcctatctgcgtaagaatcacgaggaggaaatgctagccctgaggggccaaaccggaggagatgtgaacgtggaaatggacgccgcccctggggttgacctgtccagaattcttaacgaaatgagggatcagtatgaacagatggcagagaagaacaggcgagacgctgagacttggtttctgagcaaaaccgaggaactgaataaggaagtggcatctaacagcgaactggtgcagagctcccgcagcgaggtgacagagttgcgtcgggttttgcaggggctggagattgaactccagagccagctttcaatgaaagcctcgctggaaaattcgctcgaggaaacaaaaggccgatactgtatgcagctctcccagatacagggcctcattggttctgtggaggagcaactagcccagcttcggtgcgagatggaacagcagtcacaggagtaccaaattctccttgacgtaaaaacccgcctcgaacaagagattgcaacctaccgcagactgctagaaggcgaagacgcacaccttagcagtcagcaagcctcaggacagagctacagcagtcgtgaggtgtttacgtccagctcctccagttctagccgccagactcgcccaatcctgaaggagcaatcctccagtagctttagccagggacaatcttcttag

SEQ ID NO: 157360 - DNA, 1422 bp, Artificial Sequence
  derived and/or modified sequence
atgacaacatgctcaaggcagttcactagctcgtcctctatgaaagggtcttgtggcattggcggaggcattggcggaggatccagccgcatctcctccgtcttggcgggagggagctgcagagcaccctccacttatggtggagggctgagtgttagttcccgcttttctagcggaggggcatgtggactaggcggaggatacggtggcggattcagctcaagcagcagtttcggatctgggttcggtgggggttatggtggtggcttgggagcaggttttggcggtggtcttggagccggatttgggggtggattcgctggaggggatggcttactcgttgggagtgaaaaagtaaccatgcagaacctcaacgatcggctcgcttcttatctggataaggtccgcgctctggaggaagccaatgctgaccttgaggtcaaaatccgagattggtatcagcggcagcggccatcagaaattaaggactattctccctacttcaagaccatcgaggatctgaggaataagataatcgcagccacaatcgaaaacgcacagcctatactgcagattgataatgcaaggctggctgcggacgacttccgcacaaagtatgagcacgagctggcactgcgccagacagtggaagcagacgtgaatgggctcagacgtgtgttagacgaactgacacttgcaagaaccgacctggagatgcaaatagaagggctcaaagaagagttggcctatctaagaaaaaaccatgaggaggaaatgctggcactcagaggtcaaactggaggagacgtcaatgtggagatggacgctgcaccaggcgtcgatttgagccgcatcttaaacgagatgcgagaccagtatgagcagatggcggaaaaaaaccgccgtgacgccgaaacgtggtttttaagtaaaacggaggagctcaacaaagaagtagcttcgaattcagagctcgtccaatcaagcaggtctgaagttactgagcttaggcgggtacttcaaggtctagagatagaactgcagtcacaactgagcatgaaagcttctctggagaactcattagaagaaaccaaaggtagatactgcatgcagctgagccaaatccagggtctcattgggtcggtggaggagcagttagcacagttgaggtgtgaaatggaacaacagagtcaggagtaccagattctgctcgatgtgaagacgcggctcgagcaggaaattgccacttatcgcaggctcctggagggtgaggatgctcatttatcctcacaacaggcctcaggccaatcatactcctcccgcgaagtgtttacgagttcttcctcttcctcttctcgacagacacgccctattctaaaagagcagagctcttcctccttttcacagggtcagagctcctag

SEQ ID NO: 157361 - DNA, 1422 bp, Artificial Sequence
  derived and/or modified sequence
atgaccacctgcagcagacagttcaccagcagcagcagcatgaagggcagctgcggcatcggcggcggcatcggcggcggcagcagcagaatcagcagcgtgctggccggcggcagctgcagagcccccagcacctacggcggcggcctgagcgtgagcagcagattcagcagcggcggcgcctgcggcctgggcggcggctacggcggcggcttcagcagcagcagcagcttcggcagcggcttcggcggcggctacggcggcggcctgggcgccggcttcggcggcggcctgggcgccggcttcggcggcggcttcgccggcggcgacggcctgctggtgggcagcgagaaggtgaccatgcagaacctgaacgacagactggccagctacctggacaaggtgagagccctggaggaggccaacgccgacctggaggtgaagatcagagactggtaccagagacagagacccagcgagatcaaggactacagcccctacttcaagaccatcgaggacctgagaaacaagatcatcgccgccaccatcgagaacgcccagcccatcctgcagatcgacaacgccagactggccgccgacgacttcagaaccaagtacgagcacgagctggccctgagacagaccgtggaggccgacgtgaacggcctgagaagagtgctggacgagctgaccctggccagaaccgacctggagatgcagatcgagggcctgaaggaggagctggcctacctgagaaagaaccacgaggaggagatgctggccctgagaggccagaccggcggcgacgtgaacgtggagatggacgccgcccccggcgtggacctgagcagaatcctgaacgagatgagagaccagtacgagcagatggccgagaagaacagaagagacgccgagacctggttcctgagcaagaccgaggagctgaacaaggaggtggccagcaacagcgagctggtgcagagcagcagaagcgaggtgaccgagctgagaagagtgctgcagggcctggagatcgagctgcagagccagctgagcatgaaggccagcctggagaacagcctggaggagaccaagggcagatactgcatgcagctgagccagatccagggcctgatcggcagcgtggaggagcagctggcccagctgagatgcgagatggagcagcagagccaggagtaccagatcctgctggacgtgaagaccagactggagcaggagatcgccacctacagaagactgctggagggcgaggacgcccacctgagcagccagcaggccagcggccagagctacagcagcagagaggtgttcaccagcagcagcagcagcagcagcagacagaccagacccatcctgaaggagcagagcagcagcagcttcagccagggccagagcagctag

SEQ ID NO: 157362 - protein, 531 aa, Artificial Sequence
  derived and/or modified sequence
MRLCLGRPHPRGHSRVGKSERGRGARGLARQRTLEDEEEQERERRRRHRNLSSTTDDEAPRLSQNGDRQASASERLPSVEEAEVPKPLPPASKDEDEDIQSILRTRQERRQRRQVVEAAQAPIQERLEAEEGRNSLSPVQATQKPLVSKKELEIPPRRRLSREQRGPWALEEESLVGREPEERKKGVPEKSPVLEKSSMPKKTAPEKSLVSDKTSISEKVLASEKTSLSEKIAVSEKRNSSEKKSVLEKTSVSEKSLAPGMALGSGRRLVSEKASIFEKALASEKSPTADAKPAPKRATASEQPLAQEPPASGGSPATTKEQRGRALPGKNLPSLAKQGASDPPTVASRLPPVTLQVKIPSKEEEADMSSPTQRTYSSSLKRSSPRTISFRMKPKKENSETTLTRSASMKLPDNTVKLGEKLERYHTAIRRSESVKSRGLPCTELFVAPVGVASKRHLFEKELAGQSRAEPASSRKENLRLSGVVTSRLNLWISRTQESGDQDPQEAQKASSATERTQWGQKSDSSLDAEV

SEQ ID NO: 157363 - protein, 517 aa, Artificial Sequence
  derived and/or modified sequence
MAVSRKDWSALSSLARQRTLEDEEEQERERRRRHRNLSSTTDDEAPRLSQNGDRQASASERLPSVEEAEVPKPLPPASKDEDEDIQSILRTRQERRQRRQVVEAAQAPIQERLEAEEGRNSLSPVQATQKPLVSKKELEIPPRRRLSREQRGPWALEEESLVGREPEERKKGVPEKSPVLEKSSMPKKTAPEKSLVSDKTSISEKVLASEKTSLSEKIAVSEKRNSSEKKSVLEKTSVSEKSLAPGMALGSGRRLVSEKASIFEKALASEKSPTADAKPAPKRATASEQPLAQEPPASGGSPATTKEQRGRALPGKNLPSLAKQGASDPPTVASRLPPVTLQVKIPSKEEEADMSSPTQRTYSSSLKRSSPRTISFRMKPKKENSETTLTRSASMKLPDNTVKLGEKLERYHTAIRRSESVKSRGLPCTELFVAPVGVASKRHLFEKELAGQSRAEPASSRKENLRLSGVVTSRLNLWISRTQESGDQDPQEAQKASSATERTQWGQKSDSSLDAEV

SEQ ID NO: 157364 - DNA, 1596 bp, Artificial Sequence
  derived and/or modified sequence
atgaggctctgcctgggcagaccgcatcccagaggccacagccgggtgggcaagagtgagagaggccgtggcgctcggggactagcaaggcagaggactcttgaagatgaggaggaacaggagcgcgaaagacgcaggcggcaccgtaacctgtctagtactaccgatgatgaggccccaaggctgtctcagaacggcgatagacaggcctctgcatcggagaggcttccctccgttgaagaggcagaagtgccgaaacctctgccccctgcatcaaaagacgaagacgaagacattcagtctattctgagaacaaggcaggagagacggcagcggaggcaagtggtagaggccgcacaagcccctattcaggagagactggaggcagaggagggccgaaactccctgagccccgtccaggcaacccaaaagccactggtctctaagaaggaacttgagatcccacctcggaggaggctgtcaagagagcagagaggaccttgggccctggaagaagaaagcttggtgggacgcgagcctgaagagaggaaaaagggcgtgccagagaaatcccccgtgctcgaaaaaagtagtatgccaaagaagacagctcccgagaagtcacttgtgtccgacaaaactagcattagcgagaaagtactggcatccgaaaaaacctccttgtctgagaagatagctgttagtgagaagaggaacagctcggagaaaaagagtgtgctcgagaagaccagcgtttccgagaagagtttggcacctggaatggccttaggctccggacggagactggtgtccgagaaggcatccatttttgaaaaggcgcttgcatctgaaaaaagccccaccgctgatgctaaacctgctcccaaaagggcgacagcttctgaacagcctctggcccaggagccccctgcaagtggagggtcgcccgctacaactaaggagcaacgtggaagagccctgcctggcaaaaaccttccaagtcttgccaagcaaggcgctagcgatcctccaacagtagcaagtcgcctcccacctgtgactctccaggtcaaaattccatcgaaggaagaagaagccgacatgtcgagccccacacagagaacttattcaagcagcctcaagcgctcatcacccagaacaatctcctttaggatgaaacctaagaaggagaattcggagacaacactgacaaggtcagcaagtatgaagctgcctgataatactgtgaagcttggcgaaaagctggaaaggtaccatacagcaattcgtcggagcgagtctgtaaagtctcggggtctcccatgtaccgagttatttgtcgcccctgtgggtgttgccagcaagaggcacctgttcgagaaggaactggcagggcaatcaagggccgagcctgcctcttcaagaaaggaaaatctgagactgagcggggtagtcacctcaaggcttaatctgtggatatcccgaacacaggagagtggggatcaagatcctcaggaggctcagaaagcctcgtccgccaccgaaagaacccagtggggccagaagtctgactctagtctggacgccgaagtgtag

SEQ ID NO: 157365 - DNA, 1554 bp, Artificial Sequence
  derived and/or modified sequence
atggctgtaagccgaaaagattggtccgctctaagttccctagcaagacagcgaactctggaagacgaggaagaacaggagcgggagcgccgacgtcgacaccgtaacctgagttctacaacggacgacgaggcccctcgccttagtcagaacggggatcggcaggcttccgcctccgagagactgccgagtgtggaagaagccgaagtgccgaagcccctccccccagctagcaaggatgaggacgaggatatacagtctattctgcgcacccggcaagaacggcgacaaaggagacaggttgtggaggctgcccaagcacccatccaagagcggctggaggctgaggagggcaggaatagcctgtctcccgtccaggctacgcaaaaacccctcgtgagtaagaaagaactcgaaatacctcctagaaggcgtctgtctcgggagcagcgcggtccatgggcgctggaagaagaatctctcgtgggcagggagccagaggagcgcaagaagggcgtgcctgagaagagccccgtactcgagaaatcatctatgcccaagaagacagccccagaaaagtcccttgtctcagacaagactagcatttcagagaaggtcctggcttccgaaaagacatccctgtctgaaaagattgccgtttccgagaagcggaattcttctgagaaaaaatcagtactggagaaaacgtctgtctcagaaaagtccttagcgccagggatggccttgggctctggaaggcggctcgtcagcgaaaaggcttccattttcgagaaagccctggctagtgaaaagagccccaccgctgatgccaaacctgcacctaagcgcgctacagcttccgagcaaccgctggctcaggaaccgcctgcgtcgggtggctcccctgccaccacaaaggaacagcggggaagggcattacccggaaagaacctcccgtccctagccaaacagggcgcttccgacccgcctacagtggcgagcagattaccacctgtaacactacaggtgaagattcccagtaaggaagaggaagcagatatgtccagtcctactcagagaacctactcttcctcattaaagaggagcagcccacgtacgataagcttcagaatgaaaccgaaaaaggaaaatagcgagaccacccttacacgaagcgcttctatgaagcttcccgacaacactgttaaactcggagaaaaactcgaaagatatcacacagcgattaggcggtcagagagcgttaaaagcagaggcctcccttgtactgagctgttcgttgcacctgtgggggttgctagcaaaagacatctttttgaaaaggaactagccggacaaagtagggctgaacccgctagttcgcggaaagaaaatctgcggctttctggagtagtaacgagccgcctgaacctgtggatcagtcgcacccaagaaagtggtgaccaggatccacaggaggcacagaaggccagctcagctacagagcgaacccaatggggacaaaagtctgactcctccttagacgccgaggtctag

SEQ ID NO: 157366 - DNA, 1596 bp, Artificial Sequence
  derived and/or modified sequence
atgcggttgtgtctgggacgcccacacccaagaggtcactccagggttggtaaatcagaacgcggtcgaggagcacgtggtctggccaggcagaggaccctcgaagatgaagaggaacaggagagggaaagaagacgccgtcatagaaatttatcaagcacgaccgatgacgaggctcctcgtctttcacaaaacggtgacagacaggcatcagcttccgaacgccttccctcagttgaagaagctgaagtgcctaagcccctcccacctgccagcaaggatgaagacgaggacatccagtcaatactcaggactcgacaggaacgcagacagcgcaggcaggtagtggaagcagcacaagctccaatccaggagcggctggaggccgaagaaggccgaaactctctaagcccagttcaggcaacgcaaaagcctcttgtgagcaaaaaggaactcgagatccctccccggcggcgtctgagtagagaacagaggggcccctgggcccttgaagaagagagcctcgttgggcgagaacccgaagagaggaaaaagggtgtgcctgagaaatctcctgtgctagagaaatcatctatgcctaagaagacagcaccagaaaaatctctggtgtctgataaaacctctatttcagaaaaggttttggcgtcggaaaaaacatccctgtctgagaagatcgccgtcagtgaaaaacgcaactcttccgagaagaaaagtgtgctagagaagacctcagtctccgaaaaatctttggcacccggaatggcattagggtcaggccggcgcctggtgagtgaaaaagccagcatttttgagaaagccctggcctcagaaaagtctcctacagctgatgccaaaccagcccccaagagagctaccgctagtgagcagcctctagctcaagaaccacccgcatcaggcggtagccccgcgactactaaagagcaacggggcagagcattgccagggaagaatttaccctcccttgccaaacaaggcgcatctgacccaccgactgtcgcctcaagactgcctcccgtgaccttacaagtgaagataccgtcaaaggaggaggaggcggacatgtctagccctacgcagcgtacgtattcctccagtctgaaacgttcaagtccaagaacgatatcctttagaatgaaacccaaaaaagagaattcggaaactaccctgacccgctctgcctcgatgaaacttcccgataatacagttaagctcggggagaaattggaaagataccacaccgcaatcaggagatccgagagcgtgaaatctaggggtctgccatgtaccgaactattcgtggcgcctgttggtgtagcaagtaaaaggcacctgtttgagaaggagctggcgggccagtcacgggccgaacctgcatcttctcggaaggaaaacctgagactttctggtgtggtaacttcgagactgaatttgtggattagccggacccaggaaagtggagatcaagacccccaggaggcccagaaagcttctagcgctaccgaaaggacacaatggggacagaaatcagatagtagcctggacgctgaagtgtag

SEQ ID NO: 157367 - DNA, 1554 bp, Artificial Sequence
  derived and/or modified sequence
atggccgtgagcagaaaggattggagcgcattgagctccttggctcggcagagaacactagaagacgaagaggaacaggagagagagcgtaggcggcgccaccgaaacttgtccagcaccactgatgatgaagcccctagattgtctcaaaatggggatcgccaagctagtgcaagtgaaagacttccttccgtcgaagaagctgaggtgcctaagcctctcccaccagccagcaaagacgaagatgaagatatacagagcatactaagaacacgccaagagaggcgacaacgacggcaggtagttgaggctgcacaggctccaattcaggagagactggaagcggaggagggacgaaacagtctgtctccagttcaggcaacacagaaacctttggttagtaaaaaggaattagagattccaccgagaagacgtctgagccgtgagcagaggggcccctgggcactggaggaagaatcccttgtaggacgcgagccagaagaacgaaagaagggcgtgccagagaagagccccgttttggaaaagtcctcgatgcccaagaaaaccgctcccgagaagagcctggtgagcgacaaaacatcaatctctgagaaggtgctggcaagcgagaagacctcactttcagaaaaaatcgccgtctccgaaaaacgtaattcttcggagaaaaagagtgtgttggaaaagacaagtgtttccgaaaaaagccttgcgcctggaatggccctgggctctggacgaaggctcgtgagcgagaaggcctcaatttttgagaaagccctggcttctgagaaaagccccacagccgatgcaaagccagcacctaaacgggccacggcctcggagcagccactcgcccaagaaccacctgcctcaggagggtcaccagcgacgaccaaggaacagcgcgggagagcactgcccggaaagaatctcccttcgctcgctaaacagggggcctccgacccacctactgtagcatctcgcctcccacccgtgactcttcaggtgaaaatcccttctaaagaagaggaggcagacatgtcttcccccactcagagaacatacagtagctctttgaagaggtcaagccccagaacgatatccttccgtatgaaaccaaaaaaagagaattccgaaaccaccctgacacggagcgcatctatgaagctgcccgataatactgtcaaattaggagagaagctagaaagatatcatacagcaattcggcggtcagaaagtgttaagagcaggggtttgccttgcacagagctgttcgtggcgccggtgggagttgcttctaagcgccacctgttcgagaaggaacttgctgggcagtctcgcgccgagcccgcctcatcgagaaaagagaacctccggctgagcggtgtggtgacctctagactcaacctgtggatttccagaacacaagagtctggtgaccaggacccacaggaggcccagaaggcaagctccgccactgagagaacacaatggggccagaaatctgactcaagtcttgatgccgaggtgtag

SEQ ID NO: 157368 - DNA, 1596 bp, Artificial Sequence
  derived and/or modified sequence
atgaggttatgtcttggaagaccccatcctcggggccattctcgagtaggaaaatccgaacgtggtcgtggagcgaggggcttggcccgacagcgcaccctggaggacgaagaggagcaggagagggaacggaggagaaggcatcggaatctttcatcaaccacggacgatgaggcccctagacttagccagaatggcgacagacaagctagcgcctctgaaagactgcccagcgtggaggaagctgaggttccaaagccattgccaccagcctccaaggacgaagatgaagatattcagagtattttacggactagacaagaacgacgacagagaaggcaggtagttgaggccgctcaggcccccatccaggagagactagaagcagaggaagggcgaaattctctcagcccagtgcaagctactcaaaaaccactggtctccaaaaaggagttagagattccgcctcgaagacgacttagtagggaacagcggggtccttgggccctcgaagaagaatcactggtcggccgtgagccagaagagaggaagaaaggtgtgccagagaaaagcccagtgctggaaaaatcgagcatgccaaagaaaacagctcccgagaagagccttgtctccgataagacatctataagtgagaaggtgctggcgtccgagaaaacatctttatccgaaaagattgcagtctccgaaaaacgcaatagcagcgagaagaagtcggttttagaaaagacaagtgttagtgaaaaaagtctcgcaccaggaatggctctggggagcggcagacggctcgtgtcagaaaaagcaagtattttcgagaaggcactagcttcagagaagtcaccgacagccgacgcgaaaccagcccctaagcgcgcaacagcttccgaacagccactagctcaagaaccacctgcaagcggcggatctcctgcaactaccaaggaacaacggggtcgcgctctccctgggaagaatctgccttctctcgcaaagcagggcgcttccgatcctccaacagtcgcctccaggttgccacccgtgactttgcaagtgaagatcccttccaaagaggaggaagccgatatgagtagtccaacacagagaacatacagcagcagcctgaagcggtctagccctaggactataagtttccgaatgaaacccaaaaaagagaacagcgagactaccttgacacggtccgcttctatgaaattgcctgacaatacggtcaaactgggcgagaagctggagagataccacaccgccatccgtcgcagcgaatctgttaaatcaaggggtttgccatgcacagaactattcgtggcacctgtcggggttgcgtccaaaagacatctattcgaaaaggaattggcaggacagagcagagctgagccagcttcaagcaggaaagaaaatctaagattgagtggggtggtcacaagccggttaaacttatggatctccagaacccaagagtctggagaccaagatcctcaggaagcacagaaagccagttcagctacggagagaacccagtggggacagaaaagcgactccagcctggatgcagaagtgtag

SEQ ID NO: 157369 - DNA, 1554 bp, Artificial Sequence
  derived and/or modified sequence
atggccgtgagcagaaaggattggagcgcattgagctccttggctcggcagagaacactagaagacgaagaggaacaggagagagagcgtaggcggcgccaccgaaacttgtccagcaccactgatgatgaagcccctagattgtctcaaaatggggatcgccaagctagtgcaagtgaaagacttccttccgtcgaagaagctgaggtgcctaagcctctcccaccagccagcaaagacgaagatgaagatatacagagcatactaagaacacgccaagagaggcgacaacgacggcaggtggtcgaggccgcacaagccccaattcaggaacggttggaggctgaggaagggcgaaactcactcagtcccgtgcaagcaacacagaaaccattagtcagtaagaaggagcttgaaattccaccacggagacgtctcagcagagagcaaaggggcccttgggcactcgaggaggagtctctggttggccgcgaacccgaagaacgcaagaagggcgtccccgagaagtcacctgttctggaaaaaagcagcatgcctaaaaaaactgcccccgagaagagccttgtttccgacaagacctctatcagcgaaaaggtcctagcatccgaaaagactagtctgagcgagaaaatcgcggtcagtgagaagcgcaattcatcagaaaagaagagcgtcctggagaaaacttcagttagcgagaaaagccttgcccctggaatggccctgggctcaggaagacggcttgtatccgaaaaagccagcatttttgagaaagcattggcttctgaaaagagtcctactgcagatgctaagcccgcccctaagagagccaccgcatccgaacagccattagcgcaggagccgcccgctagcggggggtcgcctgccactacaaaggagcagcggggaagagccctacctggtaaaaacctcccttcactcgctaagcagggcgcttctgatccccccacggtagctagtcgattacctcctgtgacacttcaggtgaaaataccatccaaagaggaggaggccgatatgagctccccaacacagcggacatactcatctagtctaaagcgctcttctccacgcaccattagctttcgtatgaagcccaagaaagagaactctgagaccacacttacacgcagcgcctctatgaaattgccagataataccgtgaaacttggggaaaagctggaaagatatcacaccgctatcagaagatcagaaagtgtgaagagtagggggctgccatgcaccgaactcttcgttgctcccgtgggcgtggcttccaagagacacctgtttgagaaagagcttgcaggacagtcccgcgccgaaccagcatcatcacgtaaggagaatctccgcctgtccggtgttgtgaccagcaggctcaacctatggatttctaggactcaagaatcaggcgaccaggatcctcaagaagctcaaaaagcctctagcgcaaccgagagaacacagtggggccaaaaatcagattcttcgttggacgcagaagtctag

SEQ ID NO: 157370 - DNA, 1596 bp, Artificial Sequence
  derived and/or modified sequence
atgagactgtgcctgggcagaccccaccccagaggccacagcagagtgggcaagagcgagagaggcagaggcgccagaggcctggccagacagagaaccctggaggacgaggaggagcaggagagagagagaagaagaagacacagaaacctgagcagcaccaccgacgacgaggcccccagactgagccagaacggcgacagacaggccagcgccagcgagagactgcccagcgtggaggaggccgaggtgcccaagcccctgccccccgccagcaaggacgaggacgaggacatccagagcatcctgagaaccagacaggagagaagacagagaagacaggtggtggaggccgcccaggcccccatccaggagagactggaggccgaggagggcagaaacagcctgagccccgtgcaggccacccagaagcccctggtgagcaagaaggagctggagatcccccccagaagaagactgagcagagagcagagaggcccctgggccctggaggaggagagcctggtgggcagagagcccgaggagagaaagaagggcgtgcccgagaagagccccgtgctggagaagagcagcatgcccaagaagaccgcccccgagaagagcctggtgagcgacaagaccagcatcagcgagaaggtgctggccagcgagaagaccagcctgagcgagaagatcgccgtgagcgagaagagaaacagcagcgagaagaagagcgtgctggagaagaccagcgtgagcgagaagagcctggcccccggcatggccctgggcagcggcagaagactggtgagcgagaaggccagcatcttcgagaaggccctggccagcgagaagagccccaccgccgacgccaagcccgcccccaagagagccaccgccagcgagcagcccctggcccaggagccccccgccagcggcggcagccccgccaccaccaaggagcagagaggcagagccctgcccggcaagaacctgcccagcctggccaagcagggcgccagcgacccccccaccgtggccagcagactgccccccgtgaccctgcaggtgaagatccccagcaaggaggaggaggccgacatgagcagccccacccagagaacctacagcagcagcctgaagagaagcagccccagaaccatcagcttcagaatgaagcccaagaaggagaacagcgagaccaccctgaccagaagcgccagcatgaagctgcccgacaacaccgtgaagctgggcgagaagctggagagataccacaccgccatcagaagaagcgagagcgtgaagagcagaggcctgccctgcaccgagctgttcgtggcccccgtgggcgtggccagcaagagacacctgttcgagaaggagctggccggccagagcagagccgagcccgccagcagcagaaaggagaacctgagactgagcggcgtggtgaccagcagactgaacctgtggatcagcagaacccaggagagcggcgaccaggacccccaggaggcccagaaggccagcagcgccaccgagagaacccagtggggccagaagagcgacagcagcctggacgccgaggtgtag

SEQ ID NO: 157371 - DNA, 1554 bp, Artificial Sequence
  derived and/or modified sequence
atggccgtgagcagaaaggactggagcgccctgagcagcctggccagacagagaaccctggaggacgaggaggagcaggagagagagagaagaagaagacacagaaacctgagcagcaccaccgacgacgaggcccccagactgagccagaacggcgacagacaggccagcgccagcgagagactgcccagcgtggaggaggccgaggtgcccaagcccctgccccccgccagcaaggacgaggacgaggacatccagagcatcctgagaaccagacaggagagaagacagagaagacaggtggtggaggccgcccaggcccccatccaggagagactggaggccgaggagggcagaaacagcctgagccccgtgcaggccacccagaagcccctggtgagcaagaaggagctggagatcccccccagaagaagactgagcagagagcagagaggcccctgggccctggaggaggagagcctggtgggcagagagcccgaggagagaaagaagggcgtgcccgagaagagccccgtgctggagaagagcagcatgcccaagaagaccgcccccgagaagagcctggtgagcgacaagaccagcatcagcgagaaggtgctggccagcgagaagaccagcctgagcgagaagatcgccgtgagcgagaagagaaacagcagcgagaagaagagcgtgctggagaagaccagcgtgagcgagaagagcctggcccccggcatggccctgggcagcggcagaagactggtgagcgagaaggccagcatcttcgagaaggccctggccagcgagaagagccccaccgccgacgccaagcccgcccccaagagagccaccgccagcgagcagcccctggcccaggagccccccgccagcggcggcagccccgccaccaccaaggagcagagaggcagagccctgcccggcaagaacctgcccagcctggccaagcagggcgccagcgacccccccaccgtggccagcagactgccccccgtgaccctgcaggtgaagatccccagcaaggaggaggaggccgacatgagcagccccacccagagaacctacagcagcagcctgaagagaagcagccccagaaccatcagcttcagaatgaagcccaagaaggagaacagcgagaccaccctgaccagaagcgccagcatgaagctgcccgacaacaccgtgaagctgggcgagaagctggagagataccacaccgccatcagaagaagcgagagcgtgaagagcagaggcctgccctgcaccgagctgttcgtggcccccgtgggcgtggccagcaagagacacctgttcgagaaggagctggccggccagagcagagccgagcccgccagcagcagaaaggagaacctgagactgagcggcgtggtgaccagcagactgaacctgtggatcagcagaacccaggagagcggcgaccaggacccccaggaggcccagaaggccagcagcgccaccgagagaacccagtggggccagaagagcgacagcagcctggacgccgaggtgtag

SEQ ID NO: 157372 - DNA, 1596 bp, Artificial Sequence
  derived and/or modified sequence
atgagactgtgtctcggccggccccaccctaggggacacagccgggtgggcaagagtgagagaggccgaggcgcacgcgggttagccagacagcgaacgcttgaggacgaggaagagcaggaacgtgaaagaaggcgacgacaccggaatctttccagcaccacggatgacgaggctcccaggctctcccagaacggtgaccgccaggcttccgccagtgaacggctcccatcagtggaagaagctgaagttcctaaacctctaccacctgctagcaaggatgaggatgaggatattcagagtatactgcggaccagacaggaaagacggcaaagacggcaggtagtggaggctgctcaagctccaatacaggagaggcttgaggctgaagagggtcggaactcgttgagcccagtccaagctacccagaaacccctggtaagtaagaaggaattagaaatcccaccgcggcgcagactatcacgggaacagaggggcccctgggccttagaggaagagagccttgtaggccgggagccggaggagcgcaagaagggcgtgcctgagaagtcccctgttctcgagaaaagctcaatgcctaaaaagaccgcacccgagaaatccctcgtgagtgataagacctccatttcagagaaggtccttgccagcgaaaagacaagcctgagtgagaagattgccgtgagtgagaaacggaactcaagtgaaaagaagagtgtgctcgagaagacaagtgtatctgagaaaagtttagcacctggaatggctctgggttccggtaggcggttagtctcggagaaggcatcaatcttcgaaaaagcactagcctctgagaaaagtccaactgccgacgccaagcctgcccccaaaagggcaaccgccagtgagcagccacttgctcaggagccaccagcctctggtggttctcctgcaacaacaaaggaacagagaggtagagctcttccagggaaaaatctccccagtctggccaagcagggcgcatctgacccccccacagtggcctcgcggctgccacctgtcaccctgcaggtcaagatcccaagtaaggaggaagaagctgatatgagcagcccgacccaacggacctactcatcttctcttaagcgcagctctcccaggactatcagctttcgaatgaagcccaaaaaagagaattcagaaactactctcaccagatccgcatccatgaagttgccagacaacacagtgaagctgggtgagaagctggaacggtatcacacagcaattagaaggagcgagtcagttaagagtcgggggctcccctgcacggaactattcgtggctccggtaggagtggcgtcaaagaggcacctgtttgaaaaagaacttgcaggacaaagccgcgctgagcctgcttctagcaggaaggaaaacctgcgcctgtccggcgtcgtgaccagccgcctcaacctttggatcagccgcacacaggaatctggcgaccaggatccccaagaggctcagaaggcctccagtgccaccgagcgcacccagtggggccagaagagcgatagttcactcgatgccgaagtctag

SEQ ID NO: 157373 - DNA, 1554 bp, Artificial Sequence
  derived and/or modified sequence
atggccgtttctagaaaggattggtcagctctgagctcacttgctcgtcagcggacactggaagatgaagaagaacaggagcgagagagaaggcgaagacatcgcaacctatcctcgacaacagatgacgaggccccgaggctctcccagaacggggaccggcaggcaagcgcttcagaaaggctgccatccgtcgaggaggccgaggtgcctaagccgctgcctcccgcctcaaaggacgaggatgaagatattcagtccatcctgagaacaagacaagaaagacgccagaggcgacaggtggtggaggcagcccaagcacccatccaggagaggcttgaggctgaggaagggcggaacagtctgagtccagtgcaggcaactcagaaaccgctggtgagcaagaaggagctggagattcctcctcgtcgcaggctgtctcgcgagcagagagggccttgggctctggaagaagaaagcctggtgggcagagaacccgaggaacggaagaagggcgtcccggagaagtcccccgttctggagaagtccagtatgccaaagaagacagctcctgagaagtctctcgtgtctgacaaaacttcaatctcagagaaagtactggcctccgaaaagacctctctatccgagaaaatcgcagtcagcgagaagagaaactctagtgagaaaaagagtgtactagaaaaaacctcagtgtccgagaagtctctggcgccagggatggccctcgggagcggcaggcggctcgttagcgagaaagctagcatcttcgagaaagcattagcctcagagaaatcccctaccgcggacgcgaaacctgcgcctaagcgtgccaccgcatccgagcagccactcgcccaggaacctccagcatctggaggctccccggccacaactaaagagcaacgtgggagggcactccctggcaaaaatttgccaagcctcgcaaaacagggcgccagtgacccacccaccgtggcctctcgactgccacctgttacactacaggtgaagatcccaagcaaagaggaggaagcagatatgagctcccccactcaacgcacatactcttccagcctgaagagaagctccccaagaacaataagtttccgaatgaaaccgaagaaagagaacagcgagaccactcttactcgcagcgcctccatgaaactgcccgacaacaccgtgaagttaggggagaagctggaacggtaccacaccgctattaggagaagtgagtcggtcaagagtcggggactgccttgcacagagctgtttgtggcacccgttggcgtagcctcgaagcgccatctttttgaaaaagagttggcagggcagagccgggctgaacctgcaagctcacgcaaggagaacctcagactgtctggggtcgttacttcacgcctgaacctgtggatctctcgaacccaggaatccggagatcaggaccctcaagaagcccagaaggcctcctcagcaactgaaaggacacagtggggacagaagtcagatagtagcctcgatgcagaagtgtag

SEQ ID NO: 157374 - DNA, 2336 bp, Artificial Sequence
  derived and/or modified sequence
gtccgacggtccacccagtgcttgcggcctcgcggccgggccggcctgggctgcaatcaatgcggctttgtctgggacgcccacatcccagaggccattcccgggtcggcaaatcggagcgcggccggggcgcgcggggccttgcccggcagaggactctggaggatgaggaggaacaggagcgcgagcgcaggcggcggcaccgcaacctgagctccaccacggacgatgaggctcccaggctcagccagaatggagaccggcaggcctctgcttctgagagactaccgagcgtggaagaagcagaggtgcccaagccactgcccccagcctccaaagatgaggacgaggacatccagagcatcctcagaacacggcaggagcggaggcagaggcggcaggtggtggaggctgcacaggcccccatccaggagaggctggaggcagaggaggggaggaacagcttgagccctgtgcaggccacacagaaacccctagtctccaagaaggaactggaaatcccacctcgccggagactgagtcgggaacagcggggcccctgggccctggaggaggagagcttggtgggcagggagccagaagagaggaagaaaggggttccagaaaagtccccagtcttggagaagtcctccatgccaaagaagacggcacctgaaaagagcctggtctccgataaaacctccatctctgagaaggtgctggcctcagagaagacatctctatcagagaagatagcagtgtcagagaaaagaaacagctcagagaagaagtctgttctagaaaaaaccagtgtctctgagaagtcgctggccccagggatggcactgggctcaggaaggaggctggtgtctgagaaagcttccatctttgagaaggcactggcctcagagaagagcccaactgcagatgctaagccggccccaaagagggccacagcctcagagcagcccctggcgcaggagccgccagcctctgggggaagcccagccaccaccaaggagcagagaggaagggccctccctgggaagaacctgccctctttggcaaagcagggggcttcagaccctccgactgtggcctcccgcctcccacccgtcacactccaggtgaaaatccccagcaaggaggaagaggcagatatgtcctcacccacacagcgaacctacagcagctccctcaaacgctccagccccaggaccatctcctttcggatgaaacccaagaaagaaaactcggaaacaaccctaactcgcagtgccagcatgaagctcccagacaacacagtgaagttgggagagaagctggagagataccacacggccatacggagatcagaatctgtcaagtctcggggtctgccttgcactgagttattcgtggctcctgtgggtgtagccagcaagcgccacctctttgagaaggaactggcgggccagagccgagcagaaccagcctccagccggaaggagaacttgaggctctcaggggttgtgacatcaaggctcaacctgtggatcagcaggacccaggaatctggagatcaggacccccaggaggcacagaaagcatcatctgcaaccgagaggactcagtggggacagaaatctgactcctcgctggacgctgaggtgtgacaagccccgccaagacagacctgcaagtcttcgtctcaagggacctccctcatgccaggcccctgcctctcacagcagcaccctttcctctcattgtccctgttccctttttgcctgtggatctgtttggccagggtccctggggtcaggaatatttgcaagactcagccagctccttcccagcccagcctcttggggctgggactttctcaccctgcggcaggcacaacagatgctgggacccagtctctgcccaggtcacagcacaagtgcacatcagcactatggggcctatgtcctgcccagagacctctgctccttcctgctcacatccacagtcagggcacggcgcccctcaagaactccagagtcacctgtctcatcggctcccagcaagtgcctctttgtctatgatgtcccccttctctgaggcctggacccacccatctttgtccctggggcctgctcccagccactgaggcccgctctggccaggggagaaggagctgccgtgcgtcttccctgtgccccgtctccctgcttggttctcccctcccttccctggccggctgccatggccaggagctaagtgcctttttgtgtgcaaccacttaccctttctctgaaaaacctgttctcaggaaggatctgataaactcatttactctcaggtgtaagaga

SEQ ID NO: 157375 - DNA, 1596 bp, Artificial Sequence
  derived and/or modified sequence
atgaggctgtgcctgggccggccccacccccggggccacagccgggtgggcaagtctgagcggggccgcggggcccggggcctggcccggcagaggaccctggaggatgaggaggagcaggagcgggagaggagaagaagacacaggaacctgagcagcaccacagatgatgaggccccccggctgagccagaatggagaccggcaggccagcgccagcgagcggctgcccagcgtggaggaggccgaggtgcccaagcccctgcccccagccagcaaggatgaagatgaggacatccagagcatcctgcggacccggcaggagcggcggcagaggcggcaggtggtggaggccgcccaggcccccatccaggagcggctggaggccgaggagggcaggaacagcctgagccctgtgcaggccacccagaagcccctggtgtccaagaaggagctggagatccccccaagaagaaggctgagccgggagcagaggggcccctgggccctggaggaggagagcctggtgggccgggagcctgaggagaggaagaagggcgtgcctgagaagagccctgtgctggagaagagctccatgcccaagaagacagcccctgagaagagcctggtgtctgacaagaccagcatcagcgagaaggtgctggccagcgagaagaccagcctgtctgagaagattgctgtgtctgagaagaggaacagcagcgagaagaagtctgtgctggagaagacctctgtgtctgagaagagcctggcccctggcatggccctgggcagcggccgccgcctggtgtctgagaaggccagcatctttgagaaggccctggccagcgagaagagccccacagcagatgccaagccagcccccaagagggccacagccagcgagcagcccctggcccaggagcccccagccagcggcggcagccctgccaccaccaaggagcagaggggccgggccctgcccgggaagaacctgcccagcctggccaagcagggcgccagtgaccccccaacagtggccagccggctgccccctgtgaccctgcaggtgaagatccccagcaaggaggaggaggccgacatgagcagccccacccagaggacctacagcagcagcctgaagaggagcagccccaggaccatctccttcaggatgaagcccaagaaggaaaattctgagaccaccctgaccaggtctgcctccatgaagctgcctgacaacacagtgaagctgggggagaagctggagcgctaccacacagccatccgccgctctgagagcgtgaagagccggggcctgccctgcacagagctgtttgtggcccctgtgggcgtggccagcaagaggcacctgtttgagaaggagctggccggccagagcagagctgagcccgccagcagcaggaaagaaaacctgcggctgagcggcgtggtgaccagccggctgaacctgtggatcagcaggacccaggagagcggggaccaggacccccaggaggcccagaaggccagcagcgccacagagaggacccagtggggccagaagagtgacagcagcctggatgctgaggtgtag

SEQ ID NO: 157376 - DNA, 1554 bp, Artificial Sequence
  derived and/or modified sequence
atggctgtgtccaggaaggactggagcgccctgagcagcctggcccggcagaggaccctggaggatgaggaggagcaggagcgggagaggagaagaagacacaggaacctgagcagcaccacagatgatgaggccccccggctgagccagaatggagaccggcaggccagcgccagcgagcggctgcccagcgtggaggaggccgaggtgcccaagcccctgcccccagccagcaaggatgaagatgaggacatccagagcatcctgcggacccggcaggagcggcggcagaggcggcaggtggtggaggccgcccaggcccccatccaggagcggctggaggccgaggagggcaggaacagcctgagccctgtgcaggccacccagaagcccctggtgtccaagaaggagctggagatccccccaagaagaaggctgagccgggagcagaggggcccctgggccctggaggaggagagcctggtgggccgggagcctgaggagaggaagaagggcgtgcctgagaagagccctgtgctggagaagagctccatgcccaagaagacagcccctgagaagagcctggtgtctgacaagaccagcatcagcgagaaggtgctggccagcgagaagaccagcctgtctgagaagattgctgtgtctgagaagaggaacagcagcgagaagaagtctgtgctggagaagacctctgtgtctgagaagagcctggcccctggcatggccctgggcagcggccgccgcctggtgtctgagaaggccagcatctttgagaaggccctggccagcgagaagagccccacagcagatgccaagccagcccccaagagggccacagccagcgagcagcccctggcccaggagcccccagccagcggcggcagccctgccaccaccaaggagcagaggggccgggccctgcccgggaagaacctgcccagcctggccaagcagggcgccagtgaccccccaacagtggccagccggctgccccctgtgaccctgcaggtgaagatccccagcaaggaggaggaggccgacatgagcagccccacccagaggacctacagcagcagcctgaagaggagcagccccaggaccatctccttcaggatgaagcccaagaaggaaaattctgagaccaccctgaccaggtctgcctccatgaagctgcctgacaacacagtgaagctgggggagaagctggagcgctaccacacagccatccgccgctctgagagcgtgaagagccggggcctgccctgcacagagctgtttgtggcccctgtgggcgtggccagcaagaggcacctgtttgagaaggagctggccggccagagcagagctgagcccgccagcagcaggaaagaaaacctgcggctgagcggcgtggtgaccagccggctgaacctgtggatcagcaggacccaggagagcggggaccaggacccccaggaggcccagaaggccagcagcgccacagagaggacccagtggggccagaagagtgacagcagcctggatgctgaggtgtag

SEQ ID NO: 157377 - DNA, 1596 bp, Artificial Sequence
  derived and/or modified sequence
atgcggctgtgcctgggccggccccacccccggggccacagccgggtggggaagagcgagagaggtaggggcgcccggggactggccaggcagcgtactttggaagacgaggaagaacaggagagagagcgacggagaaggcacagaaatctttcctccacgaccgatgatgaagcaccacgcttgagccagaacggggatcgacaggcatcggcatcagaaagactgccctccgttgaggaggcagaggtgcctaaacccttgccaccagccagcaaagacgaggacgaagatatccagtctatcctgaggaccagacaggagagaagacagaggcgccaggtggtggaagcagcccaggctcctattcaggaacggctggaggcagaggaggggagaaatagcctgagtccagtgcaggccacgcagaagcctctcgtatccaagaaggaactcgaaatcccaccccgacgtagactgagccgtgagcagagaggaccgtgggcactcgaggaggagtcactggtgggtcgagaacctgaggagagaaagaagggtgtgcctgaaaagtctccagtcctggagaaatcctcaatgcctaagaagaccgcgcctgagaagtcattagtgagcgacaaaacctctataagtgaaaaggtgctggcttcggaaaagactagcctctctgagaaaattgccgtatcggaaaaacgtaactcttccgagaaaaaatctgtgctggaaaagacaagcgtcagtgagaagagtctggcacctggaatggccctaggaagcggacgccggttggtgagcgagaaagctagcatatttgagaaagccctggccagtgagaaaagcccgactgccgacgcgaagccagcgcccaaaagagctaccgcaagtgagcagccactggctcaagagcctcctgcctccggcggctccccggccaccacgaaggagcagaggggccgggcactccccggtaagaatctgcctagtctcgctaaacaaggagcaagtgatcccccgaccgtggcctcccgccttcccccagtgacacttcaggtgaaaattccctccaaagaggaagaggcagacatgtcatctcccacccaaaggacttacagctcatcactgaaacggagcagccccagaaccattagttttagaatgaagcctaagaaggaaaactcggaaaccacgctgacgaggtccgccagcatgaagctgccagacaacactgtgaagctgggggaaaagctggagcgctatcatacggctattcgaagatctgagagcgttaaaagccgtggtctgccctgtaccgagctctttgtcgctcccgtgggtgttgcctcaaagcggcatctcttcgaaaaggaactcgctggccagagtagggccgaacccgcgtcaagtcgtaaagaaaacttgaggctttccggcgtggtgacatctagactgaacctttggatcagtagaacccaagagagtggagatcaggaccctcaggaggctcagaaggcttcttccgcaaccgagcgcactcagtgggggcagaagtctgactcatccctggacgccgaggtgtag

SEQ ID NO: 157378 - DNA, 1554 bp, Artificial Sequence
  derived and/or modified sequence
atggccgtgagccggaaggactggagcgccctgagcagcctggccaggcagaggactcttgaggacgaagaggagcaggaacgcgaaagaaggagaaggcacaggaacctatcctcaacgactgacgacgaagccccacggctcagccaaaacggagaccggcaggcaagcgcatccgagcgactgccaagtgtcgaagaagctgaggtcccaaaacccctacctcccgcttccaaggacgaagatgaggatatccaatccatccttcgaacacgacaggaacggaggcagaggaggcaggtggtggaagctgcacaggccccaatccaggagagactcgaggcagaggagggccgcaactcactctcacctgtccaggccacacagaagcccctggtatcaaagaaggagctggagataccgcctcgccgacgattgtcaagagaacagagagggccttgggccctggaagaagaaagcctggtcggtcgcgagcctgaggagaggaagaagggagtacccgagaagagtcctgtgctagagaagtcgtccatgcccaagaagacggccccagaaaaaagcctggtgagcgacaagacctccatcagcgagaaagtgctggccagtgagaaaacctctctgtctgaaaaaatcgctgtctctgagaagaggaattcaagtgagaagaaaagcgtgctcgagaaaacttcagtgtcagaaaagtccctagcacccgggatggcactcggatccggccgacggcttgtgtccgaaaaggcgtccatattcgagaaagccctggcctctgagaagtctcccacggccgacgcaaagcctgcgccgaaaagggccaccgccagtgagcagcctcttgcccaggaacccccagccagcggtgggtctcccgcgacaaccaaggagcagagagggcgcgccctgccaggaaagaacctaccttctctggcgaagcagggcgccagcgatcctcccaccgtggcatccagactgcctcccgtgacactgcaggtgaaaatccccagtaaggaagaggaggcggatatgtccagccctactcagcggacttatagtagcagcctgaaacgatcttcgccacggacaatctcctttcgtatgaagcccaaaaaagagaatagcgagactacactaacacgcagtgcaagcatgaagttgcccgacaacaccgtgaagctgggtgagaagctcgaacgctaccatactgctatacgccgcagtgagagcgtgaaatcgcgaggccttccttgcaccgaactgttcgttgcccctgttggagtggcttccaaaagacatctgttcgaaaaagagctggccggccagagtcgcgccgaaccagcctcttctcggaaagagaatctacgcttgtcaggggtggttacttcccggctgaacctgtggatatcacgaactcaggaaagcggagaccaggacccgcaggaggctcaaaaggcatcaagcgctaccgaacgtacacaatggggtcagaaaagtgattcatcgctcgatgcagaagtttag

SEQ ID NO: 157379 - DNA, 2906 bp, Artificial Sequence
  derived and/or modified sequence
cccgggcagccgaccagccccacgccggccccgggcgtccgtcgttcggtcccgcgatccgtccgacggtccacccagtgcttgcggcctcgcggccgggccggcctgggctgcaatcaatgcggctttgtctgggacgcccacatcccagaggccattcccgggtcggcaaatcggagcgcggccggggcgcgcgggggtgagataagcggccatgtgatcccacctgggctggaaggggaggggcgccaggtgaggcggcggccggcggggcgcgggcggccacgcggggctcctgcagcatggctgtcagcaggaaggactggtccgcgctgtccagccttgcccggcagaggactctggaggatgaggaggaacaggagcgcgagcgcaggcggcggcaccgcaacctgagctccaccacggacgatgaggctcccaggctcagccagaatggagaccggcaggcctctgcttctgagagactaccgagcgtggaagaagcagaggtgcccaagccactgcccccagcctccaaagatgaggacgaggacatccagagcatcctcagaacacggcaggagcggaggcagaggcggcaggtggtggaggctgcacaggcccccatccaggagaggctggaggcagaggaggggaggaacagcttgagccctgtgcaggccacacagaaacccctagtctccaagaaggaactggaaatcccacctcgccggagactgagtcgggaacagcggggcccctgggccctggaggaggagagcttggtgggcagggagccagaagagaggaagaaaggggttccagaaaagtccccagtcttggagaagtcctccatgccaaagaagacggcacctgaaaagagcctggtctccgataaaacctccatctctgagaaggtgctggcctcagagaagacatctctatcagagaagatagcagtgtcagagaaaagaaacagctcagagaagaagtctgttctagaaaaaaccagtgtctctgagaagtcgctggccccagggatggcactgggctcaggaaggaggctggtgtctgagaaagcttccatctttgagaaggcactggcctcagagaagagcccaactgcagatgctaagccggccccaaagagggccacagcctcagagcagcccctggcgcaggagccgccagcctctgggggaagcccagccaccaccaaggagcagagaggaagggccctccctgggaagaacctgccctctttggcaaagcagggggcttcagaccctccgactgtggcctcccgcctcccacccgtcacactccaggtgaaaatccccagcaaggaggaagaggcagatatgtcctcacccacacagcgaacctacagcagctccctcaaacgctccagccccaggaccatctcctttcggatgaaacccaagaaagaaaactcggaaacaaccctaactcgcagtgccagcatgaagctcccagacaacacagtgaagttgggagagaagctggagagataccacacggccatacggagatcagaatctgtcaagtctcggggtctgccttgcactgagttattcgtggctcctgtgggtgtagccagcaagcgccacctctttgagaaggaactggcgggccagagccgagcagaaccagcctccagccggaaggagaacttgaggctctcaggggttgtgacatcaaggctcaacctgtggatcagcaggacccaggaatctggagatcaggacccccaggaggcacagaaagcatcatctgcaaccgagaggactcagtggggacagaaatctgactcctcgctggacgctgaggtgtgacaagccccgccaagacagacctgcaagtcttcgtctcaagggacctccctcatgccaggcccctgcctctcacagcagcaccctttcctctcattgtccctgttccctttttgcctgtggatctgtttggccagggtccctggggtcaggaatatttgcaagactcagccagctccttcccagcccagcctcttggggctgggactttctcaccctgcggcaggcacaacagatgctgggacccagtctctgcccaggtcacagcacaagtgcacatcagcactatggggcctatgtcctgcccagagacctctgctccttcctgctcacatccacagtcagggcacggcgcccctcaagaactccagagtcacctgtctcatcggctcccagcaagtgcctctttgtctatgatgtcccccttctctgaggcctggacccacccatctttgtccctggggcctgctcccagccactgaggcccgctctggccaggggagaaggagctgccgtgcgtcttccctgtgccccgtctccctgcttggttctcccctcccttccctggccggctgccatggccaggagctaagtgcctttttgtgtgcaaccacttaccctttctctgaaaaacctgttctcaggaaggatctgataaactcatttactctcaggtgtaagagactgatgagaccttagaagcgaattcctctctggaggccttgctttctagcagaggtcacctgaagtgtgtgaggaggatcatcattttcctcatcccccctcttctcacattaaggtggtggcttgccactcagcagtcctagcttggtgactgggaactgccacatacagggccaggcctaccctccttccccacaagccccctccaacccccacccccatgctctggacctcatggctcctatgagcttggagcatggtgaaccatcagagaatctagaaccaaccaagctaggaacatcagcctggtgccctgttaaccccttaaagctgtggtttacaacttttcaaaaatttaaatcattagaa

SEQ ID NO: 157380 - RNA, 1596 nt, Artificial Sequence
  derived and/or modified sequence
augcgguugugucugggacgcccacacccaagaggucacuccaggguugguaaaucagaacgcggucgaggagcacguggucuggccaggcagaggacccucgaagaugaagaggaacaggagagggaaagaagacgccgucauagaaauuuaucaagcacgaccgaugacgaggcuccucgucuuucacaaaacggugacagacaggcaucagcuuccgaacgccuucccucaguugaagaagcugaagugccuaagccccucccaccugccagcaaggaugaagacgaggacauccagucaauacucaggacucgacaggaacgcagacagcgcaggcagguaguggaagcagcacaagcuccaauccaggagcggcuggaggccgaagaaggccgaaacucucuaagcccaguucaggcaacgcaaaagccucuugugagcaaaaaggaacucgagaucccuccccggcggcgucugaguagagaacagaggggccccugggcccuugaagaagagagccucguugggcgagaacccgaagagaggaaaaagggugugccugagaaaucuccugugcuagagaaaucaucuaugccuaagaagacagcaccagaaaaaucucuggugucugauaaaaccucuauuucagaaaagguuuuggcgucggaaaaaacaucccugucugagaagaucgccgucagugaaaaacgcaacucuuccgagaagaaaagugugcuagagaagaccucagucuccgaaaaaucuuuggcacccggaauggcauuagggucaggccggcgccuggugagugaaaaagccagcauuuuugagaaagcccuggccucagaaaagucuccuacagcugaugccaaaccagcccccaagagagcuaccgcuagugagcagccucuagcucaagaaccacccgcaucaggcgguagccccgcgacuacuaaagagcaacggggcagagcauugccagggaagaauuuacccucccuugccaaacaaggcgcaucugacccaccgacugucgccucaagacugccucccgugaccuuacaagugaagauaccgucaaaggaggaggaggcggacaugucuagcccuacgcagcguacguauuccuccagucugaaacguucaaguccaagaacgauauccuuuagaaugaaacccaaaaaagagaauucggaaacuacccugacccgcucugccucgaugaaacuucccgauaauacaguuaagcucggggagaaauuggaaagauaccacaccgcaaucaggagauccgagagcgugaaaucuaggggucugccauguaccgaacuauucguggcgccuguugguguagcaaguaaaaggcaccuguuugagaaggagcuggcgggccagucacgggccgaaccugcaucuucucggaaggaaaaccugagacuuucuggugugguaacuucgagacugaauuuguggauuagccggacccaggaaaguggagaucaagacccccaggaggcccagaaagcuucuagcgcuaccgaaaggacacaauggggacagaaaucagauaguagccuggacgcugaaguguag

SEQ ID NO: 157381 - RNA, 1554 nt, Artificial Sequence
  derived and/or modified sequence
auggccgugagcagaaaggauuggagcgcauugagcuccuuggcucggcagagaacacuagaagacgaagaggaacaggagagagagcguaggcggcgccaccgaaacuuguccagcaccacugaugaugaagccccuagauugucucaaaauggggaucgccaagcuagugcaagugaaagacuuccuuccgucgaagaagcugaggugccuaagccucucccaccagccagcaaagacgaagaugaagauauacagagcauacuaagaacacgccaagagaggcgacaacgacggcagguaguugaggcugcacaggcuccaauucaggagagacuggaagcggaggagggacgaaacagucugucuccaguucaggcaacacagaaaccuuugguuaguaaaaaggaauuagagauuccaccgagaagacgucugagccgugagcagaggggccccugggcacuggaggaagaaucccuuguaggacgcgagccagaagaacgaaagaagggcgugccagagaagagccccguuuuggaaaaguccucgaugcccaagaaaaccgcucccgagaagagccuggugagcgacaaaacaucaaucucugagaaggugcuggcaagcgagaagaccucacuuucagaaaaaaucgccgucuccgaaaaacguaauucuucggagaaaaagaguguguuggaaaagacaaguguuuccgaaaaaagccuugcgccuggaauggcccugggcucuggacgaaggcucgugagcgagaaggccucaauuuuugagaaagcccuggcuucugagaaaagccccacagccgaugcaaagccagcaccuaaacgggccacggccucggagcagccacucgcccaagaaccaccugccucaggagggucaccagcgacgaccaaggaacagcgcgggagagcacugcccggaaagaaucucccuucgcucgcuaaacagggggccuccgacccaccuacuguagcaucucgccucccacccgugacucuucaggugaaaaucccuucuaaagaagaggaggcagacaugucuucccccacucagagaacauacaguagcucuuugaagaggucaagccccagaacgauauccuuccguaugaaaccaaaaaaagagaauuccgaaaccacccugacacggagcgcaucuaugaagcugcccgauaauacugucaaauuaggagagaagcuagaaagauaucauacagcaauucggcggucagaaaguguuaagagcagggguuugccuugcacagagcuguucguggcgccggugggaguugcuucuaagcgccaccuguucgagaaggaacuugcugggcagucucgcgccgagcccgccucaucgagaaaagagaaccuccggcugagcgguguggugaccucuagacucaaccuguggauuuccagaacacaagagucuggugaccaggacccacaggaggcccagaaggcaagcuccgccacugagagaacacaauggggccagaaaucugacucaagucuugaugccgagguguag

SEQ ID NO: 157382 - RNA, 1596 nt, Artificial Sequence
  derived and/or modified sequence
augagguuaugucuuggaagaccccauccucggggccauucucgaguaggaaaauccgaacguggucguggagcgaggggcuuggcccgacagcgcacccuggaggacgaagaggagcaggagagggaacggaggagaaggcaucggaaucuuucaucaaccacggacgaugaggccccuagacuuagccagaauggcgacagacaagcuagcgccucugaaagacugcccagcguggaggaagcugagguuccaaagccauugccaccagccuccaaggacgaagaugaagauauucagaguauuuuacggacuagacaagaacgacgacagagaaggcagguaguugaggccgcucaggcccccauccaggagagacuagaagcagaggaagggcgaaauucucucagcccagugcaagcuacucaaaaaccacuggucuccaaaaaggaguuagagauuccgccucgaagacgacuuaguagggaacagcgggguccuugggcccucgaagaagaaucacuggucggccgugagccagaagagaggaagaaaggugugccagagaaaagcccagugcuggaaaaaucgagcaugccaaagaaaacagcucccgagaagagccuugucuccgauaagacaucuauaagugagaaggugcuggcguccgagaaaacaucuuuauccgaaaagauugcagucuccgaaaaacgcaauagcagcgagaagaagucgguuuuagaaaagacaaguguuagugaaaaaagucucgcaccaggaauggcucuggggagcggcagacggcucgugucagaaaaagcaaguauuuucgagaaggcacuagcuucagagaagucaccgacagccgacgcgaaaccagccccuaagcgcgcaacagcuuccgaacagccacuagcucaagaaccaccugcaagcggcggaucuccugcaacuaccaaggaacaacggggucgcgcucucccugggaagaaucugccuucucucgcaaagcagggcgcuuccgauccuccaacagucgccuccagguugccacccgugacuuugcaagugaagaucccuuccaaagaggaggaagccgauaugaguaguccaacacagagaacauacagcagcagccugaagcggucuagcccuaggacuauaaguuuccgaaugaaacccaaaaaagagaacagcgagacuaccuugacacgguccgcuucuaugaaauugccugacaauacggucaaacugggcgagaagcuggagagauaccacaccgccauccgucgcagcgaaucuguuaaaucaagggguuugccaugcacagaacuauucguggcaccugucgggguugcguccaaaagacaucuauucgaaaaggaauuggcaggacagagcagagcugagccagcuucaagcaggaaagaaaaucuaagauugagugggguggucacaagccgguuaaacuuauggaucuccagaacccaagagucuggagaccaagauccucaggaagcacagaaagccaguucagcuacggagagaacccaguggggacagaaaagcgacuccagccuggaugcagaaguguag

SEQ ID NO: 157383 - RNA, 1554 nt, Artificial Sequence
  derived and/or modified sequence
auggccgugagcagaaaggauuggagcgcauugagcuccuuggcucggcagagaacacuagaagacgaagaggaacaggagagagagcguaggcggcgccaccgaaacuuguccagcaccacugaugaugaagccccuagauugucucaaaauggggaucgccaagcuagugcaagugaaagacuuccuuccgucgaagaagcugaggugccuaagccucucccaccagccagcaaagacgaagaugaagauauacagagcauacuaagaacacgccaagagaggcgacaacgacggcagguggucgaggccgcacaagccccaauucaggaacgguuggaggcugaggaagggcgaaacucacucagucccgugcaagcaacacagaaaccauuagucaguaagaaggagcuugaaauuccaccacggagacgucucagcagagagcaaaggggcccuugggcacucgaggaggagucucugguuggccgcgaacccgaagaacgcaagaagggcguccccgagaagucaccuguucuggaaaaaagcagcaugccuaaaaaaacugcccccgagaagagccuuguuuccgacaagaccucuaucagcgaaaagguccuagcauccgaaaagacuagucugagcgagaaaaucgcggucagugagaagcgcaauucaucagaaaagaagagcguccuggagaaaacuucaguuagcgagaaaagccuugccccuggaauggcccugggcucaggaagacggcuuguauccgaaaaagccagcauuuuugagaaagcauuggcuucugaaaagaguccuacugcagaugcuaagcccgccccuaagagagccaccgcauccgaacagccauuagcgcaggagccgcccgcuagcggggggucgccugccacuacaaaggagcagcggggaagagcccuaccugguaaaaaccucccuucacucgcuaagcagggcgcuucugauccccccacgguagcuagucgauuaccuccugugacacuucaggugaaaauaccauccaaagaggaggaggccgauaugagcuccccaacacagcggacauacucaucuagucuaaagcgcucuucuccacgcaccauuagcuuucguaugaagcccaagaaagagaacucugagaccacacuuacacgcagcgccucuaugaaauugccagauaauaccgugaaacuuggggaaaagcuggaaagauaucacaccgcuaucagaagaucagaaagugugaagaguagggggcugccaugcaccgaacucuucguugcucccgugggcguggcuuccaagagacaccuguuugagaaagagcuugcaggacagucccgcgccgaaccagcaucaucacguaaggagaaucuccgccuguccgguguugugaccagcaggcucaaccuauggauuucuaggacucaagaaucaggcgaccaggauccucaagaagcucaaaaagccucuagcgcaaccgagagaacacaguggggccaaaaaucagauucuucguuggacgcagaagucuag

SEQ ID NO: 157384 - protein, 3075 aa, Artificial Sequence
  derived and/or modified sequence
MRGGVLLVLLLCVAAQCRQRGLFPAILNLASNAHISTNATCGEKGPEMFCKLVEHVPGRPVRNPQCRICDGNSANPRERHPISHAIDGTNNWWQSPSIQNGREYHWVTITLDLRQVFQVAYVIIKAANAPRPGNWILERSLDGTTFSPWQYYAVSDSECLSRYNITPRRGPPTYRADDEVICTSYYSRLVPLEHGEIHTSLINGRPSADDLSPKLLEFTSARYIRLRLQRIRTLNADLMTLSHREPKELDPIVTRRYYYSIKDISVGGMCICYGHASSCPWDETTKKLQCQCEHNTCGESCNRCCPGYHQQPWRPGTVSSGNTCEACNCHNKAKDCYYDESVAKQKKSLNTAGQFRGGGVCINCLQNTMGINCETCIDGYYRPHKVSPYEDEPCRPCNCDPVGSLSSVCIKDDLHSDLHNGKQPGQCPCKEGYTGEKCDRCQLGYKDYPTCVSCGCNPVGSASDEPCTGPCVCKENVEGKACDRCKPGFYNLKEKNPRGCSECFCFGVSDVCSSLSWPVGQVNSMSGWLVTDLISPRKIPSQQDALGGRHQVSINNTAVMQRLAPKYYWAAPEAYLGNKLTAFGGFLKYTVSYDIPVETVDSNLMSHADVIIKGNGLTLSTQAEGLSLQPYEEYLNVVRLVPENFQDFHSKRQIDRDQLMTVLANVTHLLIRANYNSAKMALYRLESVSLDIASSNAIDLVVAADVEHCECPQGYTGTSCESCLSGYYRVDGILFGGICQPCECHGHAAECNVHGVCIACAHNTTGVHCEQCLPGFYGEPSRGTPGDCQPCACPLTIASNNFSPTCHLNDGDEVVCDWCAPGYSGAWCERCADGYYGNPTVPGESCVPCDCSGNVDPSEAGHCDSVTGECLKCLGNTDGAHCERCADGFYGDAVTAKNCRACECHVKGSHSAVCHLETGLCDCKPNVTGQQCDQCLHGYYGLDSGHGCRPCNCSVAGSVSDGCTDEGQCHCVPGVAGKRCDRCAHGFYAYQDGSCTPCDCPHTQNTCDPETGECVCPPHTQGVKCEECEDGHWGYDAEVGCQACNCSLVGSTHHRCDVVTGHCQCKSKFGGRACDQCSLGYRDFPDCVPCDCDLRGTSGDACNLEQGLCGCVEETGACPCKENVFGPQCNECREGTFALRADNPLGCSPCFCSGLSHLCSELEDYVRTPVTLGSDQPLLRVVSQSNLRGTTEGVYYQAPDFLLDAATVRQHIRAEPFYWRLPQQFQGDQLMAYGGKLKYSVAFYSLDGVGTSNFEPQVLIKGGRIRKQVIYMDAPAPENGVRQEQEVAMRENFWKYFNSVSEKPVTREDFMSVLSDIEYILIKASYGQGLQQSRISDISMEVGRKAEKLHPEEEVASLLENCVCPPGTVGFSCQDCAPGYHRGKLPAGSDRGPRPLVAPCVPCSCNNHSDTCDPNTGKCLNCGDNTAGDHCDVCTSGYYGKVTGSASDCALCACPHSPPASFSPTCVLEGDHDFRCDACLLGYEGKHCERCSSSYYGNPQTPGGSCQKCDCNPHGSVHGDCDRTSGQCVCRLGASGLRCDECEPRHILMETDCVSCDDECVGVLLNDLDEIGDAVLSLNLTGIIPVPYGILSNLENTTKYLQESLLKENMQKDLGKIKLEGVAEETDNLQKKLTRMLASTQKVNRATERIFKESQDLAIAIERLQMSITEIMEKTTLNQTLDEDFLLPNSTLQNMQQNGTSLLEIMQIRDFTQLHQNATLELKAAEDLLSQIQENYQKPLEELEVLKEAASHVLSKHNNELKAAEALVREAEAKMQESNHLLLMVNANLREFSDKKLHVQEEQNLTSELIVQGRGLIDAAAAQTDAVQDALEHLEDHQDKLLLWSAKIRHHIDDLVMHMSQRNAVDLVYRAEDHAAEFQRLADVLYSGLENIRNVSLNATSAAYVHYNIQSLIEESEELARDAHRTVTETSLLSESLVSNGKAAVQRSSRFLKEGNNLSRKLPGIALELSELRNKTNRFQENAVEITRQTNESLLILRAIPKGIRDKGAKTKELATSASQSAVSTLRDVAGLSQELLNTSASLSRVNTTLRETHQLLQDSTMATLLAGRKVKDVEIQANLLFDRLKPLKMLEENLSRNLSEIKLLISQARKQAASIKVAVSADRDCIRAYQPQISSTNYNTLTLNVKTQEPDNLLFYLGSSTASDFLAVEMRRGRVAFLWDLGSGSTRLEFPDFPIDDNRWHSIHVARFGNIGSLSVKEMSSNQKSPTKTSKSPGTANVLDVNNSTLMFVGGLGGQIKKSPAVKVTHFKGCLGEAFLNGKSIGLWNYIEREGKCRGCFGSSQNEDPSFHFDGSGYSVVEKSLPATVTQIIMLFNTFSPNGLLLYLGSYGTKDFLSIELFRGRVKVMTDLGSGPITLLTDRRYNNGTWYKIAFQRNRKQGVLAVIDAYNTSNKETKQGETPGASSDLNRLDKDPIYVGGLPRSRVVRRGVTTKSFVGCIKNLEISRSTFDLLRNSYGVRKGCLLEPIRSVSFLKGGYIELPPKSLSPESEWLVTFATTNSSGIILAALGGDVEKRGDREEAHVPFFSVMLIGGNIEVHVNPGDGTGLRKALLHAPTGTCSDGQAHSISLVRNRRIITVQLDENNPVEMKLGTLVESRTINVSNLYVGGIPEGEGTSLLTMRRSFHGCIKNLIFNLELLDFNSAVGHEQVDLDTCWLSERPKLAPDAEDSKLLPEPRAFPEQCVVDAALEYVPGAHQFGLTQNSHFILPFNQSAVRKKLSVELSIRTFASSGLIYYMAHQNQADYAVLQLHGGRLHFMFDLGKGRTKVSHPALLSDGKWHTVKTDYVKRKGFITVDGRESPMVTVVGDGTMLDVEGLFYLGGLPSQYQARKIGNITHSIPACIGDVTVNSKQLDKDSPVSAFTVNRCYAVAQEGTYFDGSGYAALVKEGYKVQSDVNITLEFRTSSQNGVLLGISTAKVDAIGLELVDGKVLFHVNNGAGRITAAYEPKTATVLCDGKWHTLQANKSKHRITLIVDGNAVGAESPHTQSTSVDTNNPIYVGGYPAGVKQKCLRSQTSFRGCLRKLALIKSPQVQSFDFSRAFELHGVFLHSCPGTES

SEQ ID NO: 157385 - DNA, 9228 bp, Artificial Sequence
  derived and/or modified sequence
atgaggggcggggtgctgctcgtgctccttctgtgcgttgcggcacagtgcaggcaacggggactatttcccgcaatcctcaatctcgcgagcaatgctcatatttcaaccaacgccacttgtggagagaaaggccctgaaatgttttgcaaacttgttgagcatgttcctggccgcccggtacggaaccctcagtgccgtatttgcgacgggaattccgcgaaccctcgggagcgacaccctatctcccatgctattgatggcactaataattggtggcagagcccttctatccagaacggccgggaatatcattgggtgaccatcactctggatctccgccaggtgttccaagttgcatacgttatcattaaggcggccaacgcgccgcgtccaggcaattggattttggaaaggtctctagatggtacaacattttctccctggcagtactatgcggtgagcgacagcgaatgtctgtcccggtataacatcactccgaggcgcgggcccccgacttacagagccgacgatgaggtgatctgtacatcatactacagtcgactggtgccactagagcatggtgaaattcacacatccctgattaatgggcgaccctctgcagacgacctgtccccaaagctcctggagtttacttccgcacgctatatcaggctgcgattacagcggatcaggaccttgaacgccgacctgatgactctgtctcaccgagaacctaaggagttggatccgatcgtgaccaggcgttactactacagcataaaggacataagtgtgggggggatgtgcatctgttatgggcacgcgtccagttgcccatgggacgagactaccaaaaaattacagtgtcaatgtgagcacaatacttgtggagagagctgtaaccgctgctgccccggataccatcagcagccttggcgacctggcaccgtgagcagcggtaacacctgcgaggcctgcaattgtcataacaaggcaaaggattgttattacgacgagtcagttgctaaacaaaagaagtcacttaacactgctggccaattcaggggcggaggtgtctgcatcaattgcctccagaacacaatgggcattaactgcgaaacctgtatcgacggctactacaggcctcataaggtttctccttatgaggacgagccctgtcgcccctgcaattgcgatccagtcgggtctctgtccagtgtttgtatcaaggacgacctgcactccgacttgcataacggcaagcagccaggtcaatgtccatgcaaggaggggtataccggcgaaaaatgcgataggtgtcaactgggatataaggattacccaacctgcgtatcttgcggctgcaatccagtggggtcagcttccgacgaaccctgcaccggcccatgtgtctgcaaggagaatgtggagggaaaagcttgcgatagatgtaaacccggattttataacctgaaagagaaaaatccccgcgggtgctctgaatgtttctgctttggcgtgagcgacgtgtgctcatctctgtcctggcctgtgggccaggttaattcaatgtccggctggctcgtcacagatctgattagtccaagaaagataccatcacagcaggacgccctggggggtagacatcaagtctctattaacaacaccgcagtgatgcagcggcttgccccaaaatattattgggctgcccctgaggcctacttgggaaacaagctaacagcttttggaggttttctgaagtacacagtctcgtatgacatccccgtggagaccgtggacagcaacctgatgtcacacgcggacgtcattatcaagggaaacggactgaccttgtctactcaggccgaggggctcagcctgcagccgtatgaggaatatctgaatgtcgtgaggttagtgccagagaattttcaggattttcacagcaagaggcaaatcgatagagatcaactcatgaccgtcctggctaatgtgactcatctgcttatccgagctaattacaactcggcaaaaatggctctttataggctggaaagcgtgtcactcgatatcgcaagcagcaatgctattgacttggtggttgccgctgacgtggagcattgcgagtgccctcagggatacacagggacgtcttgtgagagttgtctgtcaggctactatcgagtggatgggatcttattcggtggtatttgccaaccttgcgagtgccacggccatgctgctgagtgcaatgtgcacggggtgtgtatagcttgcgctcacaacactacgggtgttcactgtgagcagtgcctgcccggtttttatggtgagccttctcgtggtacccctggggattgccagccctgtgcttgccctttaacaatcgcctctaacaacttctctcccacatgtcatctgaatgatggcgatgaagtcgtgtgcgattggtgtgcacctggttactcaggggcttggtgcgagagatgcgccgatggatactatgggaatcccaccgtacctggggaaagttgtgtgccctgtgactgtagcggaaatgttgatccaagcgaggctggtcactgcgacagcgtgaccggggaatgtctaaagtgcttgggaaataccgatggtgcccactgcgagcgatgtgccgacggcttttacggcgatgccgtcaccgctaaaaattgccgggcctgtgaatgtcacgtaaaaggcagtcatagtgcagtctgccatctggaaacagggctgtgcgattgcaagcctaacgtgacaggccagcaatgcgatcagtgtctgcacggctactacggcttggattctggccacggctgtagaccctgtaactgcagtgtggccggaagcgtcagcgacggctgcactgacgaaggacagtgccattgcgttccaggagttgctggaaagagatgcgatagatgtgctcacgggttctatgcctatcaggacggatcatgcaccccctgtgattgcccccacactcagaacacctgtgacccggagaccggagaatgtgtatgccctccccacacgcagggagtcaaatgcgaggagtgcgaggacggccactgggggtatgatgccgaggtcggatgccaagcctgcaactgttccctggtggggtcaacacatcaccggtgcgacgtggtgacgggacattgccaatgcaaatctaaattcggtggaagggcttgtgatcagtgctcactgggataccgagatttccctgactgtgttccctgcgactgtgacctccgtggaacctcaggagatgcctgcaaccttgaacagggactgtgcgggtgcgtggaggaaacaggggcatgcccctgtaaagaaaacgtcttcggaccccagtgtaatgaatgccgtgagggcacatttgccctccgggcagacaatcctctggggtgctccccttgcttctgctcagggctttcacacctctgtagcgaactggaggactacgtgcggacacctgtgacactggggtctgaccagccccttctccgggttgtgtctcagagcaatctaaggggaaccaccgagggcgtctattatcaggctccggatttcttgctggacgctgctaccgtccgccagcacatccgcgctgagcctttttattggcggctgccacagcagtttcagggcgaccagctcatggcttatggtggcaaacttaagtactccgtcgctttctacagcttagatggagtgggaacgagcaacttcgagcctcaggttctcataaagggcgggaggataaggaagcaggtgatttacatggatgcgcccgccccagagaacggcgtacggcaggaacaggaggtggctatgcgtgaaaatttctggaaatacttcaatagtgtatcagagaagcccgtgacaagggaggacttcatgtccgtgctttcggatatcgaatacatcctgatcaaggccagttacggccagggcctccagcaaagcaggatcagcgatataagtatggaggtcggaagaaaggcagaaaaattacacccggaggaagaggtggcctcgctgcttgaaaactgtgtgtgcccaccagggacagtgggtttctcctgccaagactgtgctcctggttaccatagagggaaacttccggcggggtccgaccgcggtccaaggccgctggtggccccgtgtgtgccatgtagctgtaataaccactcagacacctgcgacccaaacactggcaaatgcctcaattgcggagataacacagcaggagaccactgcgatgtgtgtaccagtggttactacgggaaagtcaccggcagcgcatccgactgcgctctctgcgcatgtccccactccccgccagctagcttttcccctacatgcgtgctagaaggggaccacgattttcggtgcgacgcatgcctattgggatacgagggcaagcattgtgagagatgctcctcctcatactatggaaatcctcagacgcctggaggttcctgtcagaagtgtgactgtaatccccatggcagcgtgcacggagactgcgataggacgagcggacagtgcgtgtgtagattgggggcttcaggcctgcggtgtgacgaatgcgagccccggcacatccttatggaaactgattgcgtgagctgcgacgacgagtgcgtgggcgtgctattgaacgacctggacgaaattggagacgcagtactgagcttgaacttgaccgggattatcccagtcccttacggaatactctcaaacctcgagaacacaacgaagtacctgcaggagtcactcctcaaggagaatatgcagaaagacttgggcaagattaaactggagggggtggcggaagagacggacaatttacagaagaagctgactaggatgttggcctccacgcagaaagttaatcgggctaccgagaggatcttcaaggaatcccaggatctagccatcgccatcgagcgtcttcagatgtctattaccgaaatcatggagaaaaccacgttaaaccagaccctcgatgaagactttctgttgccaaattctactctgcagaacatgcaacagaacggtacaagtcttctcgagatcatgcagatacgtgatttcacgcagctgcaccaaaacgccaccttagaattgaaggctgccgaagacctgctgtctcagatccaggaaaactaccagaaacccctggaggaactggaagtgcttaaagaagcagcatcacatgtgttgtccaaacataacaacgagctcaaggctgctgaggccctggtgcgcgaggcagaggctaaaatgcaggaaagcaaccatcttctgctgatggttaatgcgaacttgcgggagttcagcgacaaaaaactgcacgtgcaggaagaacagaatcttacctccgagctcattgtgcagggtagaggactcatcgacgccgccgcagctcagacagacgccgtgcaggatgccctggaacaccttgaggatcaccaggataagcttctgctctggtcagccaagattcgccaccacattgacgacctagttatgcacatgtctcagagaaacgctgtggacctggtgtacagggcagaagaccacgccgcggagttccagagattggccgatgtgctgtatagtggattggaaaacatccgaaacgtgtcacttaacgccactagcgccgcatatgtgcattataacatacagagtctcatcgaagaaagcgaggaactcgctcgtgacgcacaccggaccgtgacagaaacatccctcttgtccgaatccctggtgtctaatggcaaagcggccgttcagcgatccagtagattcctgaaagagggtaacaatctgtctcgcaagctgcctggcattgctttggagctctctgagcttagaaacaagacaaacaggtttcaagagaacgctgtcgaaattactagacagacgaatgaatcactgctgatcctgcgggcgattcctaaaggtatccgggataaaggagctaaaactaaggagttggcgacaagcgctagtcagtccgccgtgtcaaccctgcgcgacgtagccgggttgtctcaagaactgctcaatacctcagcatcgctgagccgtgtcaacactactctgcgcgaaacccaccagctgctgcaggactccactatggccactctgctggcgggtagaaaagttaaagacgtcgaaatccaggctaaccttctctttgataggctgaaacccctgaagatgttagaggaaaacttgtcgcggaatttgtcagagatcaagcttctgattagccaagctaggaaacaggccgcctcaattaaggtggcggtcagcgctgaccgcgattgtatccgggcataccagcctcagatcagttcaaccaattacaacactctgactttaaatgttaagacccaggagcccgacaatctcttgttttacctcggatcaagtaccgcttccgactttcttgctgtggagatgaggaggggccgtgtggcatttctctgggacctgggatccggcagcactcggttggagttccctgactttcctattgacgacaatcggtggcactccatacatgtcgcaagattcggcaacattgggtcgctatccgtgaaggagatgtcaagtaatcagaagagcccaacaaaaactagcaagtcaccaggcacggctaacgtcttggatgtgaataatagtacccttatgttcgttggcggactcggagggcagattaagaagtccccagccgttaaagttacccacttcaagggatgccttggcgaagcattcctgaatgggaagagtattggcctctggaattacattgagcgagaaggcaagtgtcggggctgtttcggcagctctcaaaacgaggacccatcctttcactttgacggatcaggatattcagtggtagaaaagagcctgcctgcaacggtgactcagataatcatgctctttaatactttctcccccaacggcttgctgctctatcttggaagttacggtacaaaggattttctgtcaatcgagctatttagagggcgcgtgaaagttatgaccgatctgggaagcggccccatcaccctcttaacagaccggcgctacaataacgggacttggtacaagatagctttccagcgcaatcgaaagcaaggggtcctagctgtcatagacgcctataacacttcaaataaggaaacaaaacaaggggaaacccccggtgcctcctctgatctaaatcggcttgataaggaccctatttacgtgggcgggttgcctcggtctcgggtagtgcgccggggcgtgactaccaaaagcttcgtcggctgtataaagaatcttgagatttccaggtcaacatttgatctgctacgaaattcctatggggtgcgcaaggggtgtctgctggagcccatcagaagcgtgtcttttcttaagggaggctatattgagttacctcctaaatcgctgagtccagagtcagagtggctcgttacgtttgcaaccacaaactcatccgggattatcctggcagccctggggggcgatgtcgaaaagaggggggaccgcgaagaagctcatgtgcccttcttttcagtcatgttaatcggggggaacatagaggtccacgtcaacccaggggacggaaccggacttagaaaggccctactgcatgcgccgaccggaacctgctcggatgggcaggcccactcgatctccctcgttcgcaatcgcaggatcatcactgtccagttggacgaaaataatcccgtggagatgaagctcgggactctggtggagtctcggaccatcaacgtaagcaacctgtacgtggggggtattcctgagggcgaaggcaccagccttctcactatgaggcgttctttccatggctgtatcaagaacttgatttttaacctcgagctcctagattttaactccgctgttgggcacgagcaggtggacctggatacttgctggctttctgagaggccaaagctggctcctgatgctgaggattccaaacttctgccagaacccagagctttccccgaacaatgtgtggttgatgcagccctggagtatgtgccaggggcccatcagttcgggctaacccagaattcgcattttatcctcccattcaatcagtcggcagttcgcaagaagctaagcgtggaattgagcattcggacatttgcttcttcagggctgatttattacatggcccatcagaatcaggcagactacgctgtactgcagttgcacggcggtaggctccacttcatgtttgacttaggaaagggaaggacaaaggtctcgcacccagcattgctgagtgatgggaagtggcatactgtgaaaacagattatgttaaaagaaagggctttatcaccgtggatggcagagaatcgcccatggtgactgtggttggtgacggcaccatgctcgatgttgaaggtctgttctatctcggtggcttgccaagtcagtaccaggcccggaagatcggaaatataacacacagcatccccgcctgtatcggcgatgtcaccgtgaattccaagcagcttgacaaagacagccctgtcagcgcctttaccgtgaataggtgctacgctgttgctcaagaaggcacctatttcgatggatctggatacgctgctttggttaaagaaggctacaaggtccagtctgatgtgaacattaccctggaatttaggacatcaagccaaaacggggtgctgcttgggataagcactgcgaaagtggatgcaatcggattagagctggtagacggcaaagtgctttttcacgtcaataatggagcagggcgtattaccgctgcgtacgaacctaagacagccacagtactttgcgatggtaaatggcacactctgcaagccaacaagtctaaacatagaattactctgatcgtggatggcaatgctgtgggtgccgaatcaccccatacacagtcgacctccgtggatactaataatccgatttatgtggggggctatccggccggggtgaagcagaaatgtctgcgtagccagacttcctttcgcggctgcctgcggaagctcgccctcattaagtcgcctcaggtccagtcttttgacttctcgagggctttcgaactgcacggcgttttcctgcactcttgccccgggactgagtcatag

SEQ ID NO: 157386 - DNA, 9657 bp, Artificial Sequence
  derived and/or modified sequence
cggggccagggcagcgcggactcgcgtcccgtggagcgttccaggcgggcgcgcggctttctccccagacccaccgagtggcggcggaggcgagatgcgcgggggcgtgctcctggtcttgctgctgtgtgtcgccgcgcagtgccggcagagaggcctgtttcctgccattctcaatcttgccagcaatgctcacatcagcaccaatgccacctgtggcgagaaggggccggagatgttctgcaaacttgtggagcatgtgccaggtcggcccgtccgaaacccacagtgccggatctgtgatggcaacagcgcaaaccccagagaacgccatccaatatcacatgccatagatggcaccaataactggtggcaaagtcccagcattcagaatgggagagaatatcactgggtcacaatcactctggacttaagacaggtctttcaagttgcatatgtcatcattaaagctgccaatgcccctcgacctggaaactggattttggagcgttctctggatggcaccacgttcagcccctggcagtattatgcagtcagcgactcagagtgtttgtctcgttacaatataactccaagacgagggccacccacctacagggctgatgatgaagtgatctgcacctcctattattccagattggtgccacttgagcatggagagattcatacatcactcatcaatggcagaccaagcgctgacgatctttcacccaagttgttggaattcacttctgcacgatatattcgccttcgcttgcaacgcattagaacgctcaatgcagatctcatgacccttagccaccgggaacctaaagaactggatcctattgttaccagacgctattattattcaataaaggacatttctgttggaggcatgtgtatctgctatggccatgctagtagctgcccatgggatgaaactacaaagaaactgcagtgtcaatgtgagcataatacttgcggggagagctgtaacaggtgctgtcctgggtaccatcagcagccctggaggccgggaaccgtgtcctccggcaatacatgtgaagcatgtaattgtcacaataaagccaaagactgttactatgatgaaagtgttgcaaagcagaagaaaagtttgaatactgctggacagttcagaggaggaggggtttgcataaattgcttgcagaacaccatgggaatcaactgtgaaacctgtattgatggatattatagaccacacaaagtgtctccttatgaggatgagccttgccgcccctgtaattgtgaccctgtggggtccctcagttctgtctgtattaaggatgacctccattctgacttacacaatgggaagcagccaggtcagtgcccatgtaaggaaggttatacaggagaaaaatgtgatcgctgccaacttggctataaggattacccgacctgtgtctcctgtgggtgcaacccagtgggcagtgccagtgatgagccctgcacagggccctgtgtttgtaaggaaaacgttgaggggaaggcctgtgatcgctgcaagccaggattctataacttgaaggaaaaaaacccccggggctgctccgagtgcttctgctttggcgtttctgatgtctgcagcagcctctcttggcctgttggtcaggtaaacagtatgtccgggtggctggtcaccgacttgatcagtcccaggaagatcccgtctcagcaagatgcactaggcgggcgccatcaggtcagcatcaacaacaccgcggtcatgcagagactggctcccaagtactactgggcagcccccgaggcctaccttggaaataagctgactgcgtttggcggattcctgaaatacacggtgtcctacgatattccggtagagacggtagacagtaacctcatgtcgcatgctgacgtcatcattaagggaaacggactcactttaagcacacaggctgagggtctgtcattgcagccttatgaagagtacctaaacgtggttagacttgtgcctgaaaacttccaagattttcacagcaaaaggcagattgatcgtgaccagctgatgactgtccttgccaatgtgacacatcttttgatcagagccaactacaattctgcaaaaatggctctttacaggttggagtccgtctctctggacatagccagctctaatgccatcgacctggtggtggccgctgatgtggagcactgtgaatgtccgcaaggctacacagggacctcctgtgagtcgtgcctctctggctattaccgcgtggatggaatactctttggaggaatttgtcaaccctgtgaatgccacggccatgcagctgagtgtaatgttcacggcgtttgcattgcgtgtgcgcacaacaccaccggcgtccactgtgagcagtgcttgcccggcttctacggggagccttcccgagggacacctggggactgccagccctgcgcctgccctctcaccatagcctccaacaatttcagccccacctgccacctcaatgatggagatgaagtggtctgtgactggtgtgccccgggctactcaggagcttggtgtgagagatgtgcagatggttactatggaaacccaacagtgcctggcgaatcttgtgttccctgtgactgcagcggcaacgtggacccctcggaggctggtcactgtgactcagtcaccggggagtgcctgaagtgcctggggaacacagatggcgcccactgtgaaaggtgtgctgacgggttctatggggacgctgtgacagccaagaactgccgcgcctgtgaatgccatgtgaaaggctcccattctgccgtgtgccatcttgagaccgggctctgtgactgcaaaccaaacgtgactggacagcagtgtgaccagtgcttgcatggctattatgggctggactcaggccatggctgccggccctgcaactgcagcgtggcaggctccgtgtcagatggctgcacggatgaaggccagtgtcactgtgtcccaggtgtggcagggaaaaggtgtgacaggtgtgcccatggcttctacgcctaccaggatggtagctgtacaccctgtgactgcccacacactcagaatacctgcgacccagaaactggagagtgtgtctgcccccctcacacacagggtgtgaagtgtgaagaatgtgaggatgggcactggggctacgatgcggaggtggggtgccaggcctgcaattgcagtctcgtggggtcgactcatcatcggtgcgatgtggtcaccggccattgccagtgcaagtcaaaatttggtggccgggcctgcgatcagtgttccttgggttacagagactttcccgactgtgttccctgtgactgtgacctgagggggacgtcgggggacgcctgcaacctggagcagggtctctgcggctgtgtggaggaaaccggggcctgcccttgcaaggaaaatgtctttggtcctcagtgcaacgaatgtcgagagggcaccttcgctctccgcgcagacaaccccctgggctgcagcccgtgcttctgctccgggctgtcccacctctgctcagagctggaggactacgtgaggaccccagtaacgctgggctccgatcagcctcttctgcgtgtggtttctcagagtaacttgaggggcacgaccgagggggtttactaccaggcccccgacttcctgctggatgccgccaccgtccggcagcacatccgtgcagagccgttttactggcggctgccgcagcagttccaaggagaccagctcatggcctatggtggcaaactgaagtacagcgtggccttctattctttggatggcgtcggcacctccaattttgagcctcaagttctcatcaaaggtggtcggatcagaaagcaagtcatttacatggatgcaccagccccagagaatggagtgagacaggaacaagaagtagcaatgagagagaatttttggaaatattttaactctgtttctgaaaaacctgtcacgcgagaggattttatgtctgtcctcagcgatattgagtacatcctcatcaaggcatcgtatggtcaaggattacagcagagcagaatctcagacatttcaatggaggttggcagaaaggctgaaaagctgcacccagaagaagaggttgcatctcttttagagaattgtgtctgtcctcctggcactgtgggattctcatgtcaggactgcgcccctgggtaccacagagggaagctcccagcagggagtgacaggggaccacgccctctggttgctccttgtgttccctgcagttgcaacaaccacagtgacacctgtgaccccaacaccgggaagtgtctgaactgtggcgataacacagcaggtgaccattgtgatgtgtgtacttctggctactacgggaaggtgactggctcagcaagtgactgtgctctgtgtgcctgtcctcacagccctcctgccagttttagtcccacttgtgtcttggaaggggaccacgatttccgttgtgacgcctgtctcctgggctatgaaggaaaacactgtgaaaggtgctcctcaagctattatgggaaccctcaaacaccaggtggcagttgccagaagtgtgactgcaacccgcacggctctgtccacggtgactgtgaccgcacatctgggcagtgcgtttgcaggctgggggcctcggggctccggtgcgatgagtgtgaaccgaggcacattctgatggaaacagattgtgtttcctgtgatgatgagtgtgtaggtgtgctgctgaatgacttggatgagattggtgatgccgttctttctctgaacctcactggcattatccctgtcccatatggaattttgtcaaacctggaaaatacaactaaatatctccaggaatctttattaaaagaaaatatgcaaaaggacctgggaaaaattaagcttgaaggtgttgcagaagaaacggacaacctgcaaaagaagctcactaggatgttagcgagtacccaaaaggtgaatagggcaactgagagaatcttcaaggagagtcaagacctggccatagccattgagaggctgcagatgagcatcacagaaattatggaaaagacaactttaaatcagactttggatgaagatttcctactacccaattctactcttcagaacatgcaacagaatggtacatctttgctagaaatcatgcagataagagacttcacacagttgcaccaaaatgccacccttgaactcaaggctgctgaagatttattgtcacaaattcaggaaaattaccagaagccgctggaagaattggaggtattgaaagaagcagcaagccacgtcctttcaaagcacaacaatgaactaaaggcggctgaggcgctcgtgagggaagctgaggcaaagatgcaggaaagcaaccacctgctgctcatggtcaatgctaatctgagagaattcagtgataaaaagctgcatgttcaagaagaacaaaatctgacctcagagctcattgtccaaggaagaggattgatagatgctgctgctgcacaaacagatgctgtacaagatgctctagagcacttagaggatcaccaggataagctacttttatggtctgccaaaatcaggcaccacatagatgacctggtcatgcacatgtcccaaaggaacgcagtcgacctggtctacagagctgaggaccatgccgctgagttccagagactagcagatgttctgtacagtggccttgaaaacatcagaaatgtgtccctgaatgccaccagtgcagcctatgtccattacaacatccagagcctgattgaagaatcggaggaactggccagagatgctcacaggactgtgactgagacgagcctgctctcagaatcccttgtttctaacgggaaagcggccgtgcagcgcagctccagatttctaaaagaaggcaacaacctcagcaggaagcttccaggtattgcattggaactgagtgaattgagaaataagacaaacagatttcaagagaatgctgttgaaattaccaggcaaaccaatgaatcactcttgatacttagagcaattcctaaaggtataagagacaagggagccaaaaccaaagagctggccacgtctgcaagccagagcgcggtgagcacgctgagggacgtggcggggctgagccaggagctgctgaacacatctgccagcctgtccagggtcaacaccacattacgagagacacaccagcttctgcaggactccaccatggccactctgttggctggaagaaaagtcaaagacgtggaaattcaagccaaccttttgtttgatcggttgaagcctttgaagatgttagaggagaatctgagcagaaacctatcagaaattaaactgttgatcagccaggcccgcaaacaagcagcttctattaaagtcgccgtgtctgcagacagagattgcatccgggcctaccagcctcagatttcctctaccaactacaataccttaacactaaatgttaagacacaggaacccgataatcttctcttctacctcggtagcagcaccgcttctgatttccttgcagtggagatgcggcgagggagagtggccttcctgtgggacctgggctccgggtccacacgcttggagtttccagactttcccattgatgacaacagatggcacagtatccatgtagccagatttggaaacattggttcactgagtgtaaaggaaatgagctcaaatcaaaagtcaccaacaaaaacaagtaaatcccctgggacagctaatgttctggatgtaaacaattcaacactcatgtttgttggaggtcttggaggacaaatcaagaaatctcctgctgtgaaggttactcattttaaaggctgcttgggggaggccttcctgaatggaaaatccataggcctatggaactatattgaaagggaaggcaagtgccgtgggtgcttcggaagctcccagaatgaagacccttccttccattttgacgggagtgggtactctgtcgtggagaagtcacttccggctaccgtgacccagataatcatgctttttaataccttttcacctaatggacttcttctctacctgggttcatacggcacaaaagactttttatccatcgagctgtttcgtggcagagtgaaggttatgactgacctgggttcaggacccattacccttttgacagacagacgttataacaatggaacctggtacaaaattgccttccagcgaaaccggaagcaaggagtgctagcagttatcgatgcctataacaccagtaataaagaaaccaagcagggcgagactccgggagcatcttctgacctcaaccgcctagacaaggacccgatttatgtgggtggattaccaaggtcaagagttgtaaggagaggtgtcaccaccaaaagctttgtgggctgcatcaagaacctggaaatatccagatcaacctttgacttactcagaaattcctatggagtgagaaaaggctgtttactggagcccatccggagtgttagcttcctgaaaggcggctacattgaattgccacccaaatctttgtcaccagaatcagaatggctggtaacatttgccaccacgaacagcagtggcatcatcctggctgccctcggcggggatgtggagaagcggggtgatcgtgaggaagcacacgtgcccttcttttccgtcatgctgatcggaggcaacattgaggtacatgtcaatcctggggatgggacaggcctgagaaaagctctcctgcacgctcccacgggtacctgcagtgatggacaagcgcattccatctccttggtcaggaatcggagaattatcactgtccaattggatgagaacaatcctgtggaaatgaagttgggcacattagtagaaagcaggacgataaatgtgtccaatctgtacgtcgggggaattccagagggagaggggacgtcactgctcacaatgagaagatcgttccatggctgtatcaaaaacctgatcttcaatttggaacttttggatttcaacagtgcagttggccatgagcaagtcgacctggacacctgctggctgtcagaaaggcctaagctggctcccgatgcagaggacagcaagctcttgccagagccccgggcttttccagaacagtgtgtggtggatgcagctctggagtacgttcccggcgctcaccagtttggtctcacacaaaacagccatttcatcttgccttttaatcagtcggctgtcagaaagaagctctcggttgagctaagcatccgcacgttcgcctccagcggcctgatttactacatggctcatcagaaccaagcagactacgctgtgctccagctgcacgggggccgcctccacttcatgtttgaccttggcaaaggcagaacaaaggtctctcaccctgcactgctcagtgatggcaagtggcacacggtcaagacagactatgttaaaagaaaaggcttcataactgtcgacggccgagagtctcccatggtgactgtggtgggagatggaaccatgctggatgtggagggtttgttctacctaggaggcctgccctcccagtaccaggccaggaaaattggaaatatcacccacagcatccctgcctgcattggggatgtgacggttaacagcaaacagctggacaaggacagcccggtgtctgccttcacggtgaacaggtgctacgcagtggcccaggaaggaacatactttgacggaagcggatatgcagctcttgtcaaagagggctacaaagtccagtcagatgtgaacatcacactggagtttcgaacctcctcgcagaatggcgtcctcctggggatcagcactgccaaagtggatgccattggactagagcttgtggacggcaaggtcttgttccatgtcaacaatggtgctggcaggataacagctgcatatgagcccaaaaccgccactgtgctctgtgatggaaaatggcacactcttcaagctaacaaaagcaaacaccgtatcactctgattgttgacgggaacgcagttggcgctgaaagtccacacacccagtctacctcagtggacaccaacaatcccatttatgttggtggctatcctgctggtgtgaagcaaaaatgcctgcgcagccagacctcgttccgcgggtgtttgaggaagctagctctgattaagagcccgcaggtgcagtcctttgacttcagcagagcgttcgaactgcacggagttttccttcattcctgtcctgggaccgagtcctgaacttcaagcagaatcctcagttggaatcattgctaatattttgaggagaagtgtatgtgtgaattaagaatctcttcagttcatatttcatttccaactcaggttaagtgtttctggggagagatgttgtgtttacgttacactaaaaccacatgtgcaacaaatacctccattaaatggtctaaaatgtaaattgaattccctggctctctttttaaacgtatttttaaaaaaatctttatacacattgaatgttctgttgattacttgatagtattttatgtttttcattttgagctttttaaaaaagtatcaatacagatgataacagatca

SEQ ID NO: 157387 - DNA, 9228 bp, Artificial Sequence
  derived and/or modified sequence
atgagaggaggagtgctgctggtgctgctgctgtgtgtggccgcccagtgccggcagaggggcctcttccctgccatcctgaacctggccagcaatgcccacatcagcaccaatgccacctgtggggagaagggccctgagatgttctgcaagctggtggagcacgtgcccggccggcctgtgaggaacccccagtgccgcatctgtgatggcaacagcgccaacccccgggagcggcaccccatcagccacgccattgatggcaccaacaactggtggcagagccccagcatccagaatggccgggagtaccactgggtgaccatcaccctggacctgcggcaggtgttccaggtggcctacgtgatcatcaaggccgccaatgccccccggcccggcaactggatcctggagaggagcctggatggcaccaccttcagcccctggcagtactatgctgtgtctgattctgagtgcctgagccgctacaacatcaccccccggcggggcccccccacctacagagcagatgatgaggtgatctgcaccagctactacagccggctggtgcccctggagcacggggagatccacaccagcctcatcaatggccggcccagcgcagatgacctgagccccaagctgctggagttcaccagcgcccgctacatccggctgcggctgcagaggatccgcaccctgaatgctgacctgatgaccctgagccaccgggagcccaaggagctggaccccatcgtgacccggcgctactactacagcatcaaggacatctctgtgggcggcatgtgcatctgctacggccacgccagcagctgcccctgggatgagaccaccaagaagctgcagtgccagtgtgagcacaacacctgtggggagagctgcaaccgctgctgccccggctaccaccagcagccctggaggcctggcaccgtgagcagcggcaacacctgtgaggcctgcaactgccacaacaaggccaaggactgctactatgatgaatctgtggccaagcagaagaagagcctgaacacagctggccagttccggggcggcggcgtgtgcatcaactgcctgcagaacaccatgggcatcaactgtgagacctgcattgatggctactaccggccccacaaggtgagcccctatgaagatgagccctgccggccctgcaactgtgaccctgtgggcagcctgagctctgtgtgcatcaaggatgacctgcacagcgacctgcacaacgggaagcagcccggccagtgcccctgcaaggagggctacaccggggagaagtgtgaccgctgccagctgggctacaaggactaccccacctgtgtgtcctgtggctgcaaccctgtgggcagcgccagtgatgagccctgcaccggcccctgtgtgtgcaaggaaaatgtggagggcaaggcctgtgaccgctgcaagccaggcttctacaacctgaaggagaagaacccccggggctgcagcgagtgcttctgcttcggcgtgtctgatgtgtgcagcagcctgtcctggcctgtgggccaggtgaacagcatgagcggctggctggtgacagacctgatcagccccaggaagatccccagccagcaggatgccctgggcggccgccaccaggtgtccatcaacaacacagctgtgatgcagaggctggcccccaagtactactgggccgcccctgaggcctacctgggcaacaagctgacagcctttggaggcttcctgaagtacacagtgtcctatgacatccctgtggagaccgtggacagcaacctgatgagccatgctgatgtgatcatcaagggaaatggcctgaccctgagcacccaggccgagggcctgagcctgcagccctatgaggagtacctgaatgtggtgcggctggtgcctgagaacttccaggacttccacagcaagaggcagattgaccgggaccagctgatgacagtgctggccaacgtgacccacctgctgatccgggccaactacaacagcgccaagatggccctgtaccgcctggagagcgtgtccctggacatcgccagcagcaatgccatcgacctggtggtggccgcagatgtggagcactgtgagtgcccccagggctacacaggcaccagctgtgagagctgcctgagcggctactacagagtggatggcatcctgtttggaggcatctgccagccctgtgaatgtcatggccacgccgctgagtgcaatgtgcacggcgtgtgcatcgcctgtgcccacaacaccactggagtgcactgtgagcagtgcctgcccggcttctatggagagcccagccggggcacccctggggactgccagccctgtgcctgccccctgaccatcgccagcaacaacttcagccccacctgccacctgaatgatggagatgaggtggtgtgtgactggtgtgcccctggctacagcggggcctggtgtgagcgctgtgctgatggctactacggcaaccccaccgtgcctggagagagctgtgtgccctgtgactgcagcggaaatgtggaccccagcgaggccggccactgtgacagcgtgactggagaatgtctgaagtgcctgggcaacacagatggagcccactgtgagcgctgtgctgatggcttctatggagatgctgtgacagccaagaactgccgggcctgtgaatgtcatgtgaagggcagccacagcgctgtgtgccacctggagaccggcctgtgtgactgcaagcccaacgtgacaggccagcagtgtgaccagtgcctgcacggctactacggcctggacagcggccacggctgccggccctgcaactgcagcgtggccggctctgtgtctgatggctgcacagatgagggccagtgccactgtgtgcctggggtggccggcaagagatgtgacagatgtgcccacggcttctacgcctaccaggacggcagctgcaccccctgtgactgcccccacacccagaacacctgtgaccctgagactggagaatgtgtgtgccccccccacacccagggcgtgaagtgtgaagaatgtgaagatggccactggggctatgatgctgaggtgggctgccaggcctgcaactgcagcctggtgggcagcacccaccaccgctgtgatgtggtgacaggccactgccagtgcaagagcaagtttggaggccgggcctgtgaccagtgcagcctgggctacagagacttcccagactgtgtgccctgtgactgtgacctgcggggcaccagcggagatgcctgcaacctggagcagggcctgtgtggctgtgtggaggagactggagcctgcccctgcaaggaaaatgtgtttggcccccagtgcaatgaatgtcgggagggcacctttgccctgcgggctgacaaccccctgggctgcagcccctgcttctgcagcggcctgagccacctgtgcagcgagctggaggactatgtgaggacccctgtgaccctgggcagtgaccagcccctgctgcgggtggtgtcccagagcaacctgcggggcaccacagaaggagtgtactaccaggccccagacttcctgctggatgctgccaccgtgcggcagcacatccgggcagagcccttctactggaggctgccccagcagttccagggcgaccagctgatggcctatggaggcaagctgaagtacagcgtggccttctacagcctggatggagtgggcaccagcaactttgagccccaggtgctgatcaagggcggccgcatcaggaagcaggtgatctacatggatgccccagccccagaaaatggagtgcggcaggagcaggaggtggccatgagggagaacttctggaagtacttcaacagcgtgtctgagaagcctgtgacccgggaggacttcatgtctgtgctgagtgacatcgagtacatcctgatcaaggccagctatggccagggcctgcagcagagccgcatcagtgacatctccatggaggtgggcaggaaggccgagaagctgcaccctgaggaggaggtggccagcctgctggagaactgtgtgtgccccccaggcaccgtgggcttcagctgccaggactgtgcccctggctaccaccggggcaagctgcctgctggcagtgaccggggcccccggcccctggtggccccctgtgtgccctgcagctgcaacaaccacagcgacacctgtgaccccaacacaggcaagtgcctgaactgtggggacaacacagctggggaccactgtgatgtgtgcaccagcggctactacggcaaggtgactggaagtgccagtgactgtgccctgtgtgcctgcccccacagccccccagccagcttcagccccacctgtgtgctggagggggaccatgacttccgctgtgatgcctgcctgctgggctatgagggcaagcactgtgagcgctgcagcagcagctactacggcaacccccagacccctgggggcagctgccagaagtgtgactgcaacccccacggctctgtgcacggggactgtgacaggaccagcggccagtgtgtgtgccgcctgggcgccagcggcctgcgctgtgatgaatgtgagcccaggcacatcctgatggagacagactgtgtgtcctgtgatgatgaatgtgtgggcgtgctgctgaatgacctggatgaaattggagatgctgtgctgagcctgaacctgaccggcatcatccctgtgccctacggcatcctgagcaacctggagaacaccaccaagtacctgcaggagagcctgctgaaggagaacatgcagaaggacctgggcaagatcaagctggagggcgtggccgaggagacagacaacctgcagaagaagctgaccaggatgctggccagcacccagaaggtgaacagagccacagagcgcatcttcaaggagagccaggacctggccatcgccatcgagcggctgcagatgagcatcacagagatcatggagaagaccaccctgaaccagaccctggatgaggacttcctgctgcccaacagcaccctgcagaacatgcagcagaatggcaccagcctgctggagatcatgcagatccgggacttcacccagctgcaccagaatgccaccctggagctgaaggctgctgaggacctgctgagccagatccaggagaactaccagaagcccctggaggagctggaggtgctgaaggaggccgccagccacgtgctgagcaagcacaacaatgagctgaaggctgctgaggccctggtgcgggaggccgaggccaagatgcaggagagcaaccacctgctgctgatggtgaatgccaacctgcgggagttcagtgacaagaagctgcacgtgcaggaggagcagaacctgaccagcgagctgattgtgcagggccggggcctgattgatgctgctgctgcccagacagatgctgtgcaggatgccctggagcacctggaggaccaccaggacaagctgctgctgtggagcgccaagatccgccaccacattgatgacctggtgatgcacatgagccagagaaatgctgtggacctggtgtacagagctgaggaccatgctgctgagttccagaggctggctgatgtgctgtacagcggcctggagaacatcagaaatgtgtccctgaatgccaccagcgctgcctacgtgcactacaacatccagagcctgattgaggagagcgaggagctggccagagatgcccacaggacagtgacagagaccagcctgctgtctgagagcctggtgtccaatggcaaggctgctgtgcagaggagcagccgcttcctgaaggagggcaacaacctgagcaggaagctgcccggcatcgccctggagctgtctgagctgaggaacaagaccaaccgcttccaggagaatgctgtggagatcacccggcagaccaatgaaagcctgctgatcctgcgggccatccccaagggcatccgggacaagggggccaagaccaaggagctggccaccagcgccagccagagcgctgtgtccaccctgagagatgtggccggcctgagccaggagctgctgaacaccagcgccagcctgagccgggtgaacaccaccctgcgggagacccaccagctgctgcaggacagcaccatggccaccctgctggccggcaggaaggtgaaggatgtggagatccaggccaacctgctgtttgaccggctgaagcccctgaagatgctggaggagaacctgagcaggaacctgtctgagatcaagctgctgatcagccaggccaggaagcaggccgccagcatcaaggtggccgtgtctgctgaccgggactgcatccgggcctaccagccccagatcagcagcaccaactacaacaccctgaccctgaatgtgaagacccaggagccagacaacctgctcttctacctgggcagcagcacagccagtgacttcctggccgtggagatgaggcggggccgggtggccttcctgtgggacctgggcagcggcagcacccggctggagttcccagacttccccattgatgacaaccgctggcacagcatccacgtggccaggtttggaaacatcggcagcctgtctgtgaaggagatgagcagcaaccagaagagccccaccaagaccagcaagagccctggaacagccaacgtgctggatgtgaacaacagcaccctgatgtttgtgggcggcctgggcggccagatcaagaagagccctgctgtgaaggtgacccacttcaagggctgcctgggggaggccttcctgaatggcaagagcatcggcctgtggaactacatcgagcgggagggcaaatgtcggggctgcttcggcagcagccagaatgaagaccccagcttccactttgatggcagcggctacagcgtggtggagaagagcctgcctgccaccgtgacccagatcatcatgctgttcaacaccttcagccccaacggcctgctgctgtacctgggcagctatggcaccaaggacttcctgagcattgagctgttccggggccgggtgaaggtgatgacagacctgggcagcggccccatcaccctgctgacagaccggcgctacaacaacggcacctggtacaagatcgccttccagaggaacaggaagcagggcgtgctggccgtgattgatgcctacaacaccagcaacaaggagaccaagcagggcgagacccctggggccagcagtgacctgaaccggctggacaaggaccccatctacgtgggcggcctgcccaggagccgggtggtgcggcggggcgtgaccaccaagagctttgtgggctgcatcaagaacctggagatcagccgcagcacctttgacctgctgaggaacagctatggagtgaggaagggctgcctgctggagcccatccgctctgtgtccttcctgaagggcggctacatcgagctgccccccaagagcctgagccctgagagcgagtggctggtgacctttgccaccaccaacagcagcggcatcatcctggccgccctgggcggagatgtggagaagagaggagaccgggaggaggcccacgtgcccttcttctctgtgatgctgattggaggcaacatcgaggtgcacgtgaaccctggagatggcaccggcctgaggaaggccctgctgcacgcccccaccggcacctgcagtgatggccaggcccacagcatcagcctggtgaggaacagacgcatcatcaccgtgcagctggatgagaacaaccctgtggagatgaagctgggcaccctggtggagagcaggaccatcaacgtgagcaacctgtatgtgggcggcatccctgagggggagggcaccagcctgctgaccatgaggaggagcttccacggctgcatcaagaacctgatcttcaacctggagctgctggacttcaacagcgctgtgggccacgagcaggtggacctggacacctgctggctgtctgagcggcccaagctggccccagatgctgaggacagcaagctgctgcctgagccccgggccttccctgagcagtgtgtggtggatgctgccctggagtatgtgcctggggcccaccagtttggcctgacccagaacagccacttcatcctgcccttcaaccagagcgctgtgaggaagaagctgtctgtggagctgagcatccgcacctttgccagcagcggcctcatctactacatggcccaccagaaccaggccgactatgctgtgctgcagctgcatggaggccgcctgcacttcatgtttgacctgggcaaaggaagaaccaaggtgagccacccagccctgctgagtgatggcaagtggcacacagtgaagacagattatgtgaagaggaagggcttcatcaccgtggatggccgggagagccccatggtgacagtggtgggagatggcaccatgctggatgtggagggcctcttctacctgggcggcctgcccagccagtaccaggccaggaagattggcaacatcacccacagcatcccagcctgcattggagatgtgacagtgaacagcaagcagctggacaaggacagccctgtgtctgccttcaccgtgaaccgctgctatgctgtggcccaggagggcacctactttgatggcagcggctatgctgccctggtgaaggagggctacaaggtgcagagtgatgtgaacatcaccctggagttccgcaccagcagccagaatggagtgctgctgggcatcagcacagccaaggtggatgccatcggcctggagctggtggatggcaaggtgctcttccacgtgaacaatggagctggccgcatcacagctgcctatgagcccaagacagccaccgtgctgtgtgatggcaagtggcacaccctgcaggccaacaagagcaagcaccgcatcaccctcatcgtggatggaaatgctgtgggcgctgagagcccccacacccagagcacctctgtggacaccaacaaccccatctacgtgggcggctacccagctggggtgaagcagaagtgcctgcggagccagaccagcttccggggctgcctgaggaagctggccctgatcaagagcccccaggtgcagagctttgacttcagccgggcctttgagctgcatggagtcttcctgcacagctgccctggaacagagagctag

SEQ ID NO: 157388 - DNA, 9228 bp, Artificial Sequence
  derived and/or modified sequence
atgcggggcggcgtgctgctggtgctgctgctgtgcgtggccgcccagtgcagacagcgtgggttgttccccgcaatcctaaacttggcgtcaaacgctcacatcagcacgaacgcgacatgcggggaaaaaggccccgaaatgttctgcaaactggtggagcacgttcctggtcgacctgtgcgcaatccacaatgtcgaatctgtgacgggaatagcgcaaatccgcgcgagcggcaccccatttctcatgctatcgatggcactaataattggtggcaaagcccttcaatacagaatggaagagaataccattgggttaccattaccttggacctgagacaggtgttccaggtcgcctacgttattatcaaagcagccaatgcccccaggccaggtaactggatcctagagcggtcactcgacggcaccaccttctccccctggcaatattatgcagtgagcgactctgagtgtctttcccggtacaacattacaccccgccggggacctcctacgtaccgggccgatgatgaggttatttgtacgtcttattattctcgcctggttcccctggagcatggcgaaatccatacctcacttatcaatggcagacctagtgccgatgatttgtcccctaaactcctggagtttacctctgccagatacattcgactccggctccaacgaatacgtactctaaatgccgatttgatgactttaagccatcgggaacctaaggagctggatccaatcgttactcggcgctactattactcaatcaaggatatatctgtcggaggcatgtgtatctgctacggccacgcatccagttgcccctgggatgagaccaccaagaaactacagtgccagtgcgaacataacacctgtggggagtcctgtaatcgctgctgccccggctaccatcaacagccgtggcggcctggaacggtttcctctgggaatacgtgtgaggcgtgcaattgccacaacaaggccaaggactgctattatgatgagagcgtggccaaacagaagaagtccctgaacacagcaggacagttcagaggggggggcgtctgcatcaattgtcttcagaacacgatgggcatcaactgtgagacctgtattgatggttattaccgcccccataaagtctcaccttacgaagatgaaccttgtcgcccatgcaactgcgacccagtgggttcactatctagtgtctgtattaaagatgatctgcatagcgacctgcacaatggaaagcaaccaggtcagtgcccatgtaaagaaggatacaccggcgagaagtgtgatagatgccagctgggatacaaggactaccccacctgtgtcagttgcggatgtaatcccgtaggatcagcaagtgatgaaccctgtacaggaccctgcgtatgcaaggagaatgtggagggtaaagcttgcgatcgatgcaagccagggttctataatttaaaagagaagaatccgcgggggtgctccgagtgtttttgctttggcgtctccgatgtctgcagctccttaagttggccagtgggacaggtgaacagcatgagtgggtggctagtgaccgaccttatttcacctaggaagatacccagtcagcaggacgctctcggggggaggcaccaggtgtcaatcaacaatactgccgtcatgcagaggctggcacccaagtactattgggcagctcctgaagcctatcttggcaataaacttaccgcatttggcgggtttctgaaatacacagtctcttacgatatccctgtggagacggtggacagcaatcttatgagccatgcagacgtgattattaaagggaacggtcttaccctgtcgacacaggccgagggtctgagtctgcagccgtacgaagaatacctgaacgtcgtgagactcgtcccagagaattttcaggactttcacagcaagaggcagatagaccgcgaccagctgatgacggtgctcgcgaatgttacgcacctgctgattcgggccaactacaattccgctaagatggccctttacagactcgaaagcgtgagtctcgatattgccagcagcaatgcaattgacctcgtggtggccgcagatgtggagcactgcgaatgcccccaagggtacacgggcacaagttgtgaaagctgtctaagtggatactaccgcgtggatggcattctcttcggggggatctgtcaaccatgcgagtgtcacgggcacgcagccgaatgtaacgtgcatggggtttgtattgcctgcgctcacaacacgactggggtgcactgcgaacagtgcctgcccggattctacggagaaccatcccgaggcaccccaggcgactgtcagccttgcgcgtgccccttaacaattgcctcgaataactttagtccaacgtgtcacctcaatgacggggacgaggtggtctgcgactggtgtgcccccggctactctggcgcctggtgtgagcgctgtgctgacggatattacgggaatcccactgtcccaggcgaaagttgcgtaccatgcgattgctccggtaatgtcgacccatccgaggcggggcactgcgattccgttacaggggagtgtctgaagtgccttgggaacaccgatggggcacattgcgaacgctgtgcagacgggttttatggcgatgcggtaacagccaaaaattgtcgggcctgtgaatgtcatgtcaaggggagccactccgccgtatgtcaccttgaaacggggctctgtgactgcaagccaaacgtcacgggacaacagtgcgaccaatgtcttcatggctactatggattggactcgggacacgggtgccgcccctgcaactgttccgtggcgggctctgtgagtgacggctgtaccgacgaagggcagtgccactgcgtgcccggagtcgcaggcaagagatgcgataggtgtgcccatggattctacgcttaccaagatggatcttgtaccccatgtgactgtcctcatactcaaaatacgtgtgaccccgagaccggggagtgtgtgtgtccgcctcacactcagggggtgaaatgcgaggaatgtgaagacgggcactggggctacgacgccgaagtggggtgccaggcgtgtaattgctccctcgtggggtccacccatcatcgctgcgacgtcgtgaccgggcactgccagtgcaagtctaaattcggcgggagggcctgtgaccaatgcagcttgggctatcgggacttccccgattgtgtcccatgcgactgtgacctccggggaacatctggggacgcatgtaatctcgagcaggggctgtgtggttgcgttgaggagaccggcgcttgcccttgcaaagaaaatgttttcgggccccaatgcaatgaatgtcgggaggggaccttcgcactccgtgctgataacccgctgggctgctccccatgtttctgtagtggcctatcccacttgtgctcagaactagaagattacgtgcggactcctgtcactctaggatccgatcagcccctgcttcgggtggtcagccagtcaaatctgaggggtactactgaaggagtgtactatcaggcgccagatttcctgctcgatgccgccacagtaagacagcatataagggccgagccattctactggcggctgcctcagcaattccagggggatcagctgatggcctacgggggcaaactgaagtactctgtggctttctactctctggacggggtagggaccagcaattttgaaccgcaggtgctgatcaagggcggcagaattaggaagcaggtgatctatatggacgcaccagcgccggagaacggggtgcggcaggagcaggaggtggctatgcgtgagaacttttggaagtacttcaactctgtgtcggagaagccggtgacaagggaagatttcatgtccgtgctctctgacatagagtatattctcatcaaagccagctacggccagggactacagcagagcaggatctccgatatctccatggaagtgggaagaaaagccgaaaagttgcaccccgaagaggaggtggcctctctgttggaaaactgcgtgtgccctccaggaactgtggggttttcatgccaggattgcgcccctgggtatcaccgaggaaagctgcctgccggctcggaccgtgggcctaggcctctggttgccccctgcgtgccttgcagttgcaataaccatagcgacacgtgcgatccaaacacaggaaaatgcctgaactgcggggataacaccgccggcgatcactgcgatgtgtgtacaagtggctactacggaaaagtcactggctccgcctctgattgcgccctgtgcgcgtgcccgcattcaccccccgccagcttcagccctacctgtgtgcttgaaggcgaccatgattttcgctgcgacgcctgtctgctcggatacgaaggaaaacattgtgagaggtgttcgtcaagctattacggtaatcctcagaccccaggcggtagttgccagaaatgtgattgcaaccctcacggcagtgtgcatggagactgtgataggacctccgggcagtgtgtgtgccgacttggcgctagcgggcttaggtgcgatgagtgtgagcccagacacatccttatggagaccgattgcgtctcatgcgacgacgaatgcgttggtgtgttgctgaatgaccttgacgagattggcgatgccgttttatccttaaaccttactggcatcattccagtgccttacggaatactgtcaaatctcgaaaacaccactaagtacctccaggagtcgctgctgaaggaaaacatgcaaaaggacttaggcaagatcaaacttgagggcgtggccgaagaaacagataatctgcaaaaaaaactcacacggatgctggcatctacacaaaaggtgaaccgcgcaaccgagcggatcttcaaggagagccaggacttggccatagccatcgagaggctgcaaatgagcattaccgaaattatggaaaagacaaccctgaatcaaactctagatgaagactttctgctgcctaatagcacattacagaatatgcagcaaaatggtacttcactgcttgagattatgcaaatccgagatttcacacagctgcaccagaacgcgacactggaactcaaagcagcagaggaccttctgtctcagatccaagagaactatcaaaaaccactcgaagaactggaggtgctaaaagaggccgcaagtcatgtactgagtaagcataataacgagctaaaggctgccgaggcgctggtgagagaagccgaagccaaaatgcaggaaagcaatcacctgctgctgatggtgaacgccaatcttagagagttctcagacaagaagttgcatgttcaagaggaacagaatctgaccagcgagctaatcgtccagggtagagggctgatcgacgcagcagcggcccagacagacgctgtacaggacgcccttgagcacctggaggaccatcaggataaactgctactgtggagtgccaagatcagacaccatattgacgacctcgtaatgcatatgagccaaagaaatgctgtggatctcgtgtacagggcggaggatcatgcagccgagttccagaggctcgcagacgtgctgtactctggcctggaaaacatccgcaatgtgagcttgaatgcaacctcagccgcttacgtacactacaacatccagagtctaatcgaagagagcgaggagcttgcccgggatgctcacagaactgtgactgagactagcctcctaagcgaatcgctggtctcaaacggcaaagccgccgtccagcggagttctaggtttctgaaagagggtaataatctgtccaggaaactcccaggaattgcccttgaactgtcggaactcagaaacaaaaccaatcggttccaggagaatgctgtcgaaatcacccgtcagaccaacgaatcattgctgatacttagagcaattccaaaaggtataagagacaagggcgccaagaccaaagagttagccacctcggcttcacaatctgccgtgtctacgttaagggatgtcgccggcctctctcaggagcttcttaatacgagcgcatccctaagcagagtgaataccactctccgcgagacccatcagctcctgcaggattcaaccatggctacactgctggccggtagaaaggtcaaagacgtggagatccaggcaaacctactgttcgacaggctcaaaccccttaagatgttggaggaaaatctctcccggaatctgagtgagataaaacttctcatatctcaggccaggaagcaggctgctagcatcaaggtggccgtgtctgctgaccgggattgtatacgagcataccagccacagatttcgagtactaattacaacacgctgactctgaacgtgaagacccaagagcctgacaacttactcttctatctggggagtagcacggcgagcgacttcctggcggtggagatgcgccggggccgggtagccttcctctgggacctggggtctgggtccactcgcctggagtttccggatttcccgatcgacgataatcgctggcacagtattcacgttgctcgctttggtaacatcggttccctctcagttaaggagatgtcaagtaatcagaagtctccgactaagacatctaaatcccctggcactgccaatgtgctggacgtcaacaattctacactgatgttcgttggcggtctgggcggacagataaagaaaagtccagctgtgaaagtaacccatttcaaggggtgtttaggagaagcatttttaaatgggaaaagtattggtctttggaattatatagagcgtgaggggaaatgtagagggtgttttggctcttctcagaacgaagatccttcctttcattttgacggaagcggatactccgtcgttgagaagtctctgccggccacagtgactcagattatcatgctgttcaatacatttagccctaatggattactcttgtacctgggttcctacggtacaaaggacttcctgagcattgagctcttcagagggcgagtaaaagtgatgacggatctgggaagcggacctatcacactgctcacagatcggcggtataacaatggaacttggtataaaattgccttccagaggaatcggaaacagggtgtcctcgctgtgatcgatgcctataacacttccaacaaagagaccaagcagggggagactccaggtgcttccagtgacctgaatagactggacaaagatccaatatacgtcgggggcctaccaagaagtcgagtggtgcggagaggagtgaccaccaagtcttttgtgggttgcataaagaacctagagatcagcagatccaccttcgacctccttaggaacagttatggagtgcggaaggggtgtctgctggagcccatcaggagtgtctcatttctgaaaggcggctacatagagctgccccctaaaagtctttcaccagagtcagagtggcttgtgacctttgctaccacaaactccagcggaattatcttggccgccctcgggggcgatgttgagaaaagaggagaccgagaggaagcccacgtgccctttttcagcgtcatgctcatcgggggcaacattgaagtccacgttaatcccggagacgggaccggccttcgcaaggcactgctccacgcgcccacaggcacctgttccgatgggcaggcgcactcgatctctctggtacgaaataggaggattattacagtgcagctggatgaaaacaatcctgtggagatgaaactggggactctggtggagagccggacaataaatgtctctaatctatacgtgggcggaatccccgagggtgaggggaccagtctgttaaccatgaggcgaagctttcatggctgtattaaaaacctgatcttcaacctagaactgcttgacttcaatagcgctgttggccacgagcaggtcgacctcgacacctgctggcttagcgaaagacccaagctggccccggacgccgaagatagtaagttgctgcccgagccccgagccttcccagagcagtgtgtggtggatgctgcattggagtacgttccaggggcccaccagttcggccttacccagaatagccactttatcctgcccttcaaccaatcagcggttcggaaaaagctgtcagttgagctgtccattaggacctttgcatccagcggtctcatctattatatggcacatcagaatcaggctgattacgctgtcctgcaattacatgggggcaggctccatttcatgtttgacctggggaagggcagaactaaagtcagtcaccctgccttactgtccgatgggaaatggcatacagtgaaaaccgattatgtgaaacgcaagggtttcatcaccgtggacggccgggaaagtccaatggtcactgtggtgggtgacggtaccatgctcgatgtcgaaggtctgttttacctgggagggctgccatctcagtaccaagccaggaagatcggcaacataacgcacagcatccctgcctgtatcggagacgtgaccgtcaactcaaagcaactagataaagattcgcccgttagcgcatttacggtgaataggtgctatgcagtcgcacaggagggcacttattttgatgggtccgggtacgccgccttagtcaaggaggggtacaaggtgcagtccgacgtaaatattactctcgaatttagaacatcttcacagaatggggtcctcctcgggattagtaccgctaaggtggatgccattggcctggaattggtcgacggcaaggtgctgtttcatgtcaataacggagcggggcgcattacagccgcttatgaaccgaaaacagccaccgtgttatgcgacggaaagtggcatacactgcaggctaataaatccaagcacaggattactctcatcgtcgatggcaatgccgttggggccgaatctccacacacccagtcaacgtccgtggacactaacaacccaatatatgtgggcggttaccctgcgggggtcaaacagaaatgtctccgctctcagacaagcttccgcggctgcctgagaaaactggccctcatcaaatccccgcaagttcagagctttgatttctctagagcctttgaattacacggagtgtttctgcactcatgcccgggcaccgagagctag

SEQ ID NO: 157389 - DNA, 9227 bp, Artificial Sequence
  derived and/or modified sequence
atgcgaggcggagttcttctcgtgctgctcctgtgtgttgccgcacaatgcagacagcgcggtctgtttcccgctattctcaacctggctagtaacgcccacatctccactaatgctacgtgtggtgagaagggacctgaaatgttttgtaagttggttgagcacgttccgggaagacctgtccgcaatccacagtgtcgcatttgtgatggcaattcggctaatcctcgggagcggcacccaatttctcacgcgatcgacggcactaataattggtggcaaagcccgtctattcagaacgggagggagtaccattgggtgaccatcaccctggaccttcgtcaggtgtttcaggtagcgtacgtgattatcaaggcagctaacgctccccgaccgggaaactggatcctggagagaagtctcgatggcacaacttttagcccctggcagtactatgctgtttcagactctgaatgcctgagccggtacaatataacgccacgtcgaggtccaccaacataccgcgctgacgacgaagtgatctgtactagttactactccaggctggtgccattggaacacggtgaaatccatacttccctaattaatggcagaccatcagctgacgatctgagtcccaaactcttggaattcacatccgcccgttatattagactgagactccagcgcatcagaaccctcaacgcagatttgatgaccttaagtcatagagagcccaaggagttggaccctatagttacccgacggtactattattcgataaaagacatctcggttgggggaatgtgcatctgttacggccatgcctcatcgtgcccctgggacgaaaccacgaaaaagctgcaatgccagtgtgagcataatacttgtggagagtcgtgcaaccgctgttgccccggataccaccaacaaccctggcggccaggcactgtgtcaagtggtaacacgtgcgaagcttgcaattgccataacaaggccaaggattgttattatgacgaatcagtcgctaaacagaaaaaatctctcaatacagccggacaattcaggggtggtggcgtgtgtatcaattgtctccagaatactatgggtatcaactgcgaaacgtgtatcgatggatattacagacctcacaaggtgtctccatacgaagatgagccctgtcgcccttgcaactgcgatcctgttggttcgctcagttccgtgtgtatcaaagacgatctgcatagcgacttgcataacggtaaacagcctggacagtgcccctgcaaggaaggttatacaggggagaagtgcgatagatgccagcttgggtacaaggattaccccacatgcgtgtcgtgcggctgtaacccagttgggagtgccagtgacgaaccctgcacaggcccatgcgtgtgcaaagagaacgttgagggcaaagcctgcgatcgatgtaaacccggattctacaacctcaaggagaagaatcctcggggttgctcagagtgcttttgcttcggggtcagtgacgtgtgtagctccctaagctggcccgttggacaggtgaactctatgtcaggatggctggtcacggatctaatctctccccgaaaaatcccctcgcagcaagatgctcttggtgggagacatcaggtctccatcaataataccgcagtcatgcaaagactcgcccctaagtattattgggcagccccagaggcatatcttggcaacaagctgacagcatttggaggctttctgaagtacactgtaagctatgacatacccgtggagacagtggactctaacttaatgtcccacgccgatgtcatcatcaaaggcaatgggctgacactcagcactcaagctgaagggttgtcccttcagccctatgaggagtatcttaacgtggttaggttggttccagagaactttcaagactttcactctaaacgacagatcgaccgggatcaacttatgacagtactggccaatgtcacccacctacttattagggcgaattacaacagtgccaaaatggctctttaccgtctagaaagcgtgtcgctcgatattgcctcaagcaacgctatcgatttggtggtagccgctgacgtggaacattgcgaatgcccacaggggtatactggcactagctgcgaaagttgcctatcaggatactacagggtggatggcatcctcttcgggggaatttgtcagccttgtgaatgtcatggccacgctgctgagtgcaacgtacacggggtttgcatcgcttgcgcacacaacactacaggagtgcactgcgaacagtgcttgcccggattctacggtgaaccctcaagggggacccccggagactgtcaaccctgtgcttgtcccctaacaatcgcgtcaaataacttctctccaacttgtcacctcaacgatggagatgaggtggtctgtgactggtgtgcccctggttactcgggggcttggtgcgaacgctgtgccgacggctactacggaaaccccacagtgccgggagagagctgcgtcccctgcgactgctccggaaatgtggatccctctgaggcaggacattgcgactctgttaccggcgagtgcctcaagtgtctgggcaacacggacggagcccactgtgagaggtgcgccgacggattctacggggatgccgtgaccgcgaaaaactgtcgtgcgtgcgaatgccacgtgaagggcagccactccgctgtctgtcaccttgagacagggctctgcgactgtaaacccaacgtaacagggcagcagtgtgaccagtgtctccatggttactacggtctagactccgggcatggctgccgcccatgtaactgcagcgtggcaggaagtgtgtcagacggctgtacagatgaagggcagtgtcactgcgtccccggtgtagccggtaaacgatgcgatcggtgcgctcatggcttttacgcttaccaggacggtagttgcactccttgtgattgcccccatacccagaacacgtgtgatccagagaccggcgaatgcgtgtgccctccccacacccaaggagttaagtgcgaagaatgcgaggatggacattggggatacgacgctgaggtgggctgccaggcatgcaactgctccctggtcgggagcacccatcaccgctgtgatgtagtgacaggccactgtcaatgcaaaagcaagtttggcggacgggcttgtgatcagtgcagcttggggtatagagacttccccgactgtgttccctgcgattgcgatctgcgcggtacgagcggcgacgcctgcaaccttgagcaaggtttgtgcggatgcgtcgaagaaactggggcttgcccctgtaaggaaaatgtcttcggaccacagtgcaacgagtgtagagagggcacattcgcattacgggcagacaaccctctgggttgttctccctgtttttgttccggactctcacatctgtgctccgagctcgaggactatgtgcgcacacctgtcacattaggcagcgatcagcctctcctcagggttgtgtcccaaagcaacttgcgtggcacgactgaaggcgtatactaccaggcacctgatttcctcttagacgctgcaaccgtgaggcagcatattcgagccgagccattttattggcgcctgccacaacaattccaaggcgatcaactcatggcctatggagggaaactgaaatactccgtcgcattttactccttggacggggtcggcacctcgaatttcgaaccccaggttctcataaaagggggaaggattcgaaaacaggttatatatatggatgccccagcccctgagaacggggtgcgtcaggagcaagaggtggccatgcgggagaatttttggaagtactttaacagcgttagcgaaaagcctgttacccgcgaggacttcatgtctgtcctatcagatatcgagtatatcctgatcaaagcaagctacgggcagggcctccagcagtcgagaatcagcgacatttctatggaggtggggaggaaagccgagaaactgcatccagaagaggaggtggcaagcctgctggaaaattgtgtgtgcccccctggaacagtggggttttcttgtcaagactgtgctcctggataccaccgcggtaagctgcccgcaggatcagatcgcggaccacgccctttggttgctccctgcgtcccgtgctcatgtaacaaccacagtgacacttgcgatcctaacaccgggaagtgtctgaactgtggggacaacactgcaggtgaccactgtgacgtgtgcacatcagggtattacggcaaggttactggcagcgcttccgattgcgcactttgcgcctgcccacatagtcctccggctagcttcagtccaacctgcgtgcttgaaggcgaccacgatttcaggtgcgatgcctgtttgctgggttatgagggtaaacattgtgaacgctgctcctccagctattatggaaacccacagacgccgggaggttcctgccagaaatgcgactgtaacccacatggctctgtccatggagactgcgaccgcacatctggccagtgtgtctgtcgcctgggagcctcaggccttcggtgcgacgagtgtgagcctagacacatcctcatggagacagactgcgtgtcttgtgacgacgaatgcgtgggtgtgttgctgaatgacctggatgaaatcggggacgcagtgctatctctcaatcttacaggtattattcccgtgccgtatggcatattgtccaatctggaaaataccaccaaatacctccaggaatcccttctcaaagagaacatgcagaaagatttgggcaagattaagctcgagggagtcgccgaggagacagataatctccagaaaaagctgacaaggatgctggccagtacgcagaaggtgaatagggcaaccgaacgaattttcaaagagagccaggacctggctattgcaatcgaacgcctacagatgtccatcactgaaataatggaaaagacaacactcaaccagaccctggacgaagatttcctgctgccgaactccacattacagaatatgcagcaaaacggcacttccctgctggaaatcatgcaaatccgcgatttcacccagctgcaccaaaacgccaccctcgaactgaaggctgccgaggacctcctttctcagatccaggagaattaccaaaagccattagaagaactggaggtcctgaaagaagccgcaagccatgtcctcagcaagcataacaacgagcttaaagctgccgaggccctggtgcgagaagccgaggctaagatgcaggagtctaatcacctgctgctgatggtcaatgcgaatcttcgggagttttctgacaaaaagcttcacgttcaggaggagcagaatctcacatctgaacttatcgtccagggccgtgggttgatcgatgcggctgccgctcaaactgatgccgttcaagacgcactcgagcacctggaggaccatcaagacaaactcctgctctggagtgccaaaatccggcaccatatagatgatctcgttatgcatatgagccagcggaacgcggtcgacctcgtatatagagcagaggaccatgctgccgagtttcaacgactcgcggatgttctgtattccggtctggaaaacattaggaacgtatctttaaacgcaacttcagcagcatatgtgcattacaacatccagtccctgatcgaggaatccgaagagctggcccgtgacgcccatcggaccgtcaccgagacctcactgctttccgagtcgttagtgagtaatgggaaggctgctgtccaacggtcatcacgatttctgaaggagggcaacaacctgtcccggaaattgccaggcatcgcactggaactgtccgagctgagaaataagacgaatagatttcaagaaaacgccgttgaaattactcgccagaccaacgagtctctgctgatactgcgggcaattcccaagggaatcagggacaagggcgctaagaccaaggaactcgcaacctctgcgagtcagtctgctgtaagcacactgcgggatgtagctggcttatcacaggagctcctgaacacatccgctagcctgagtcgagtcaacactaccttgcgagagactcatcaactgttacaagactcaaccatggccaccttactggcaggtcgaaaggtgaaggatgtcgagatccaggccaatctgctgttcgaccgcctgaagcccctgaaaatgctcgaagagaacctgtcacgcaatcttagtgaaatcaaactgttgatttcacaggctcgaaagcaggctgcgagtattaaagtcgccgtctcagccgatagagactgtattcgtgcataccagccccagatcagcagtactaattataatacccttactcttaatgtcaaaacccaagagccagacaacttacttttctacctgggcagcagcaccgcgtcggactttctggcagttgagatgagacggggaagggtcgcatttctgtgggacctaggctcaggctcgaccaggctggaatttcccgatttcccgatcgatgataaccgatggcactccatccacgttgctcgatttggcaacatcggttctctcagtgtgaaagagatgtcatccaaccaaaagtcacccaccaaaacttccaagtcacccggaaccgcaaatgtgttagacgtcaacaactctacgctgatgtttgtcgggggtctggggggacagatcaagaagagccccgctgtgaaagtcacccactttaaaggctgcttaggagaagcctttctaaacggaaagtccataggcttgtggaattacattgagcgcgaaggaaagtgtcgaggctgtttcgggagttcccaaaatgaggacccgtctttccactttgatggctccgggtactcagtcgtggaaaagtctctgccggctacggtgacccagatcattatgttattcaacacatttagccccaacggcctgctcctgtaccttggctcttacggcacaaaggacttcttgtctatagagctttttcggggacgtgtgaaggtgatgactgacctcggctccggtccaataactctacttacagaccggaggtataataacggcacttggtataaaatcgcgtttcagcgcaatcggaagcagggagtcctggctgtgattgacgcttacaatacaagtaacaaagaaaccaaacagggagaaaccccaggcgcttcttcagatttgaatcggctggacaaagatcctatttatgtgggcggtctgccccgaagccgcgttgtccgacgaggggtgactacaaaatcctttgtggggtgtattaagaacctggagatcagcaggtccacattcgatctgctgcggaattcatatggggtcaggaaaggatgccttctcgaacccatccggtccgtctcgtttctcaagggaggctacatagagttaccaccaaaatccttaagcccagagtcagagtggctcgtgaccttcgccactacaaactcatctggcatcattctggccgctctgggaggcgacgtggaaaaaaggggcgatcgcgaggaggcccatgttccctttttcagcgtgatgctaatcggagggaacatcgaagtgcacgttaatcctggcgatggaacagggctgcgcaaggcactactacacgcacccacaggcacatgtagcgacggacaggcccactctatcagtctggtcaggaatcggaggattatcaccgtgcaacttgacgaaaataatcccgtggaaatgaagctgggaactttggtcgagtccaggacaatcaatgtgagcaacctgtacgtggggggtatcccggagggggagggtacctccctcctaacgatgcggagatccttccacggctgcattaaaaacctgatcttcaacctcgagttgctggactttaacagcgctgttggtcacgagcaagtggacctggatacatgctggctgtccgagaggcccaagcttgcccctgatgccgaggactccaagctcctaccggagccaagagcattccctgagcagtgcgtggtggacgccgcattggagtacgtgcctggcgcacatcagttcggtctgacccaaaatagccatttcatcctgccttttaatcaatccgctgtgcgcaaaaagctctccgtagagctgtcaattagaacctttgcctcaagcgggctcatttactacatggcacatcagaaccaggccgactacgcagtgctgcagttacatggcggtcgactccactttatgtttgatttaggcaagggacgaaccaaggtatcgcaccccgctctattaagcgatggcaaatggcatacagtcaagactgactacgttaagaggaaaggatttattactgtggatggtagggagagtcccatggtgacggttgtgggggacggcactatgctggatgtggaaggactgttttacctgggcggtttaccaagccagtaccaagctagaaagatcggaaacattacacactctataccagcctgcattggcgacgtgacagtcaattctaagcagttggacaaagattctcccgtgtccgcatttactgtgaatcgctgctacgccgttgcccaggagggtacatacttcgacggctccggatatgccgctctcgtcaaagaggggtacaaggttcagtccgacgtgaacatcacactagagttccgcacgagcagccagaacggcgttctgttaggcatttcaactgccaaagtggatgcaattggcctggagctggtggatggaaaggttctgtttcatgttaacaacggtgctggacgcattaccgccgcttatgaacctaaaacagcaacggtgctttgcgacggtaagtggcacaccctccaagctaataaatcaaagcacaggatcacacttattgtcgatggcaacgctgtcggggctgagagtccccacacgcaatccacatcagtggacacaaacaaccccatttatgtgggcggttatcccgctggcgtgaaacaaaagtgccttcgcagtcagaccagcttcaggggttgcctgcgcaaactggcactgattaaaagcccccaggtccagagtttcgacttctctcgggcattcgagttgcatggcgtctttctgcattcctgccccggtaccgagtccta

SEQ ID NO: 157390 - DNA, 9228 bp, Artificial Sequence
  derived and/or modified sequence
atgagaggcggcgtgctgctggtgctgctgctgtgcgtggccgcccagtgcagacagagaggcctgttccccgccatcctgaacctggccagcaacgcccacatcagcaccaacgccacctgcggcgagaagggccccgagatgttctgcaagctggtggagcacgtgcccggcagacccgtgagaaacccccagtgcagaatctgcgacggcaacagcgccaaccccagagagagacaccccatcagccacgccatcgacggcaccaacaactggtggcagagccccagcatccagaacggcagagagtaccactgggtgaccatcaccctggacctgagacaggtgttccaggtggcctacgtgatcatcaaggccgccaacgcccccagacccggcaactggatcctggagagaagcctggacggcaccaccttcagcccctggcagtactacgccgtgagcgacagcgagtgcctgagcagatacaacatcacccccagaagaggcccccccacctacagagccgacgacgaggtgatctgcaccagctactacagcagactggtgcccctggagcacggcgagatccacaccagcctgatcaacggcagacccagcgccgacgacctgagccccaagctgctggagttcaccagcgccagatacatcagactgagactgcagagaatcagaaccctgaacgccgacctgatgaccctgagccacagagagcccaaggagctggaccccatcgtgaccagaagatactactacagcatcaaggacatcagcgtgggcggcatgtgcatctgctacggccacgccagcagctgcccctgggacgagaccaccaagaagctgcagtgccagtgcgagcacaacacctgcggcgagagctgcaacagatgctgccccggctaccaccagcagccctggagacccggcaccgtgagcagcggcaacacctgcgaggcctgcaactgccacaacaaggccaaggactgctactacgacgagagcgtggccaagcagaagaagagcctgaacaccgccggccagttcagaggcggcggcgtgtgcatcaactgcctgcagaacaccatgggcatcaactgcgagacctgcatcgacggctactacagaccccacaaggtgagcccctacgaggacgagccctgcagaccctgcaactgcgaccccgtgggcagcctgagcagcgtgtgcatcaaggacgacctgcacagcgacctgcacaacggcaagcagcccggccagtgcccctgcaaggagggctacaccggcgagaagtgcgacagatgccagctgggctacaaggactaccccacctgcgtgagctgcggctgcaaccccgtgggcagcgccagcgacgagccctgcaccggcccctgcgtgtgcaaggagaacgtggagggcaaggcctgcgacagatgcaagcccggcttctacaacctgaaggagaagaaccccagaggctgcagcgagtgcttctgcttcggcgtgagcgacgtgtgcagcagcctgagctggcccgtgggccaggtgaacagcatgagcggctggctggtgaccgacctgatcagccccagaaagatccccagccagcaggacgccctgggcggcagacaccaggtgagcatcaacaacaccgccgtgatgcagagactggcccccaagtactactgggccgcccccgaggcctacctgggcaacaagctgaccgccttcggcggcttcctgaagtacaccgtgagctacgacatccccgtggagaccgtggacagcaacctgatgagccacgccgacgtgatcatcaagggcaacggcctgaccctgagcacccaggccgagggcctgagcctgcagccctacgaggagtacctgaacgtggtgagactggtgcccgagaacttccaggacttccacagcaagagacagatcgacagagaccagctgatgaccgtgctggccaacgtgacccacctgctgatcagagccaactacaacagcgccaagatggccctgtacagactggagagcgtgagcctggacatcgccagcagcaacgccatcgacctggtggtggccgccgacgtggagcactgcgagtgcccccagggctacaccggcaccagctgcgagagctgcctgagcggctactacagagtggacggcatcctgttcggcggcatctgccagccctgcgagtgccacggccacgccgccgagtgcaacgtgcacggcgtgtgcatcgcctgcgcccacaacaccaccggcgtgcactgcgagcagtgcctgcccggcttctacggcgagcccagcagaggcacccccggcgactgccagccctgcgcctgccccctgaccatcgccagcaacaacttcagccccacctgccacctgaacgacggcgacgaggtggtgtgcgactggtgcgcccccggctacagcggcgcctggtgcgagagatgcgccgacggctactacggcaaccccaccgtgcccggcgagagctgcgtgccctgcgactgcagcggcaacgtggaccccagcgaggccggccactgcgacagcgtgaccggcgagtgcctgaagtgcctgggcaacaccgacggcgcccactgcgagagatgcgccgacggcttctacggcgacgccgtgaccgccaagaactgcagagcctgcgagtgccacgtgaagggcagccacagcgccgtgtgccacctggagaccggcctgtgcgactgcaagcccaacgtgaccggccagcagtgcgaccagtgcctgcacggctactacggcctggacagcggccacggctgcagaccctgcaactgcagcgtggccggcagcgtgagcgacggctgcaccgacgagggccagtgccactgcgtgcccggcgtggccggcaagagatgcgacagatgcgcccacggcttctacgcctaccaggacggcagctgcaccccctgcgactgcccccacacccagaacacctgcgaccccgagaccggcgagtgcgtgtgccccccccacacccagggcgtgaagtgcgaggagtgcgaggacggccactggggctacgacgccgaggtgggctgccaggcctgcaactgcagcctggtgggcagcacccaccacagatgcgacgtggtgaccggccactgccagtgcaagagcaagttcggcggcagagcctgcgaccagtgcagcctgggctacagagacttccccgactgcgtgccctgcgactgcgacctgagaggcaccagcggcgacgcctgcaacctggagcagggcctgtgcggctgcgtggaggagaccggcgcctgcccctgcaaggagaacgtgttcggcccccagtgcaacgagtgcagagagggcaccttcgccctgagagccgacaaccccctgggctgcagcccctgcttctgcagcggcctgagccacctgtgcagcgagctggaggactacgtgagaacccccgtgaccctgggcagcgaccagcccctgctgagagtggtgagccagagcaacctgagaggcaccaccgagggcgtgtactaccaggcccccgacttcctgctggacgccgccaccgtgagacagcacatcagagccgagcccttctactggagactgccccagcagttccagggcgaccagctgatggcctacggcggcaagctgaagtacagcgtggccttctacagcctggacggcgtgggcaccagcaacttcgagccccaggtgctgatcaagggcggcagaatcagaaagcaggtgatctacatggacgcccccgcccccgagaacggcgtgagacaggagcaggaggtggccatgagagagaacttctggaagtacttcaacagcgtgagcgagaagcccgtgaccagagaggacttcatgagcgtgctgagcgacatcgagtacatcctgatcaaggccagctacggccagggcctgcagcagagcagaatcagcgacatcagcatggaggtgggcagaaaggccgagaagctgcaccccgaggaggaggtggccagcctgctggagaactgcgtgtgcccccccggcaccgtgggcttcagctgccaggactgcgcccccggctaccacagaggcaagctgcccgccggcagcgacagaggccccagacccctggtggccccctgcgtgccctgcagctgcaacaaccacagcgacacctgcgaccccaacaccggcaagtgcctgaactgcggcgacaacaccgccggcgaccactgcgacgtgtgcaccagcggctactacggcaaggtgaccggcagcgccagcgactgcgccctgtgcgcctgcccccacagcccccccgccagcttcagccccacctgcgtgctggagggcgaccacgacttcagatgcgacgcctgcctgctgggctacgagggcaagcactgcgagagatgcagcagcagctactacggcaacccccagacccccggcggcagctgccagaagtgcgactgcaacccccacggcagcgtgcacggcgactgcgacagaaccagcggccagtgcgtgtgcagactgggcgccagcggcctgagatgcgacgagtgcgagcccagacacatcctgatggagaccgactgcgtgagctgcgacgacgagtgcgtgggcgtgctgctgaacgacctggacgagatcggcgacgccgtgctgagcctgaacctgaccggcatcatccccgtgccctacggcatcctgagcaacctggagaacaccaccaagtacctgcaggagagcctgctgaaggagaacatgcagaaggacctgggcaagatcaagctggagggcgtggccgaggagaccgacaacctgcagaagaagctgaccagaatgctggccagcacccagaaggtgaacagagccaccgagagaatcttcaaggagagccaggacctggccatcgccatcgagagactgcagatgagcatcaccgagatcatggagaagaccaccctgaaccagaccctggacgaggacttcctgctgcccaacagcaccctgcagaacatgcagcagaacggcaccagcctgctggagatcatgcagatcagagacttcacccagctgcaccagaacgccaccctggagctgaaggccgccgaggacctgctgagccagatccaggagaactaccagaagcccctggaggagctggaggtgctgaaggaggccgccagccacgtgctgagcaagcacaacaacgagctgaaggccgccgaggccctggtgagagaggccgaggccaagatgcaggagagcaaccacctgctgctgatggtgaacgccaacctgagagagttcagcgacaagaagctgcacgtgcaggaggagcagaacctgaccagcgagctgatcgtgcagggcagaggcctgatcgacgccgccgccgcccagaccgacgccgtgcaggacgccctggagcacctggaggaccaccaggacaagctgctgctgtggagcgccaagatcagacaccacatcgacgacctggtgatgcacatgagccagagaaacgccgtggacctggtgtacagagccgaggaccacgccgccgagttccagagactggccgacgtgctgtacagcggcctggagaacatcagaaacgtgagcctgaacgccaccagcgccgcctacgtgcactacaacatccagagcctgatcgaggagagcgaggagctggccagagacgcccacagaaccgtgaccgagaccagcctgctgagcgagagcctggtgagcaacggcaaggccgccgtgcagagaagcagcagattcctgaaggagggcaacaacctgagcagaaagctgcccggcatcgccctggagctgagcgagctgagaaacaagaccaacagattccaggagaacgccgtggagatcaccagacagaccaacgagagcctgctgatcctgagagccatccccaagggcatcagagacaagggcgccaagaccaaggagctggccaccagcgccagccagagcgccgtgagcaccctgagagacgtggccggcctgagccaggagctgctgaacaccagcgccagcctgagcagagtgaacaccaccctgagagagacccaccagctgctgcaggacagcaccatggccaccctgctggccggcagaaaggtgaaggacgtggagatccaggccaacctgctgttcgacagactgaagcccctgaagatgctggaggagaacctgagcagaaacctgagcgagatcaagctgctgatcagccaggccagaaagcaggccgccagcatcaaggtggccgtgagcgccgacagagactgcatcagagcctaccagccccagatcagcagcaccaactacaacaccctgaccctgaacgtgaagacccaggagcccgacaacctgctgttctacctgggcagcagcaccgccagcgacttcctggccgtggagatgagaagaggcagagtggccttcctgtgggacctgggcagcggcagcaccagactggagttccccgacttccccatcgacgacaacagatggcacagcatccacgtggccagattcggcaacatcggcagcctgagcgtgaaggagatgagcagcaaccagaagagccccaccaagaccagcaagagccccggcaccgccaacgtgctggacgtgaacaacagcaccctgatgttcgtgggcggcctgggcggccagatcaagaagagccccgccgtgaaggtgacccacttcaagggctgcctgggcgaggccttcctgaacggcaagagcatcggcctgtggaactacatcgagagagagggcaagtgcagaggctgcttcggcagcagccagaacgaggaccccagcttccacttcgacggcagcggctacagcgtggtggagaagagcctgcccgccaccgtgacccagatcatcatgctgttcaacaccttcagccccaacggcctgctgctgtacctgggcagctacggcaccaaggacttcctgagcatcgagctgttcagaggcagagtgaaggtgatgaccgacctgggcagcggccccatcaccctgctgaccgacagaagatacaacaacggcacctggtacaagatcgccttccagagaaacagaaagcagggcgtgctggccgtgatcgacgcctacaacaccagcaacaaggagaccaagcagggcgagacccccggcgccagcagcgacctgaacagactggacaaggaccccatctacgtgggcggcctgcccagaagcagagtggtgagaagaggcgtgaccaccaagagcttcgtgggctgcatcaagaacctggagatcagcagaagcaccttcgacctgctgagaaacagctacggcgtgagaaagggctgcctgctggagcccatcagaagcgtgagcttcctgaagggcggctacatcgagctgccccccaagagcctgagccccgagagcgagtggctggtgaccttcgccaccaccaacagcagcggcatcatcctggccgccctgggcggcgacgtggagaagagaggcgacagagaggaggcccacgtgcccttcttcagcgtgatgctgatcggcggcaacatcgaggtgcacgtgaaccccggcgacggcaccggcctgagaaaggccctgctgcacgcccccaccggcacctgcagcgacggccaggcccacagcatcagcctggtgagaaacagaagaatcatcaccgtgcagctggacgagaacaaccccgtggagatgaagctgggcaccctggtggagagcagaaccatcaacgtgagcaacctgtacgtgggcggcatccccgagggcgagggcaccagcctgctgaccatgagaagaagcttccacggctgcatcaagaacctgatcttcaacctggagctgctggacttcaacagcgccgtgggccacgagcaggtggacctggacacctgctggctgagcgagagacccaagctggcccccgacgccgaggacagcaagctgctgcccgagcccagagccttccccgagcagtgcgtggtggacgccgccctggagtacgtgcccggcgcccaccagttcggcctgacccagaacagccacttcatcctgcccttcaaccagagcgccgtgagaaagaagctgagcgtggagctgagcatcagaaccttcgccagcagcggcctgatctactacatggcccaccagaaccaggccgactacgccgtgctgcagctgcacggcggcagactgcacttcatgttcgacctgggcaagggcagaaccaaggtgagccaccccgccctgctgagcgacggcaagtggcacaccgtgaagaccgactacgtgaagagaaagggcttcatcaccgtggacggcagagagagccccatggtgaccgtggtgggcgacggcaccatgctggacgtggagggcctgttctacctgggcggcctgcccagccagtaccaggccagaaagatcggcaacatcacccacagcatccccgcctgcatcggcgacgtgaccgtgaacagcaagcagctggacaaggacagccccgtgagcgccttcaccgtgaacagatgctacgccgtggcccaggagggcacctacttcgacggcagcggctacgccgccctggtgaaggagggctacaaggtgcagagcgacgtgaacatcaccctggagttcagaaccagcagccagaacggcgtgctgctgggcatcagcaccgccaaggtggacgccatcggcctggagctggtggacggcaaggtgctgttccacgtgaacaacggcgccggcagaatcaccgccgcctacgagcccaagaccgccaccgtgctgtgcgacggcaagtggcacaccctgcaggccaacaagagcaagcacagaatcaccctgatcgtggacggcaacgccgtgggcgccgagagcccccacacccagagcaccagcgtggacaccaacaaccccatctacgtgggcggctaccccgccggcgtgaagcagaagtgcctgagaagccagaccagcttcagaggctgcctgagaaagctggccctgatcaagagcccccaggtgcagagcttcgacttcagcagagccttcgagctgcacggcgtgttcctgcacagctgccccggcaccgagagctag

SEQ ID NO: 157391 - protein, 3695 aa, Artificial Sequence
  derived and/or modified sequence
MAKRLCAGSALCVRGPRGPAPLLLVGLALLGAARAREEAGGGFSLHPPYFNLAEGARIAASATCGEEAPARGSPRPTEDLYCKLVGGPVAGGDPNQTIRGQYCDICTAANSNKAHPASNAIDGTERWWQSPPLSRGLEYNEVNVTLDLGQVFHVAYVLIKFANSPRPDLWVLERSMDFGRTYQPWQFFASSKRDCLERFGPQTLERITRDDAAICTTEYSRIVPLENGEIVVSLVNGRPGAMNFSYSPLLREFTKATNVRLRFLRTNTLLGHLMGKALRDPTVTRRYYYSIKDISIGGRCVCHGHADACDAKDPTDPFRLQCTCQHNTCGGTCDRCCPGFNQQPWKPATANSANECQSCNCYGHATDCYYDPEVDRRRASQSLDGTYQGGGVCIDCQHHTTGVNCERCLPGFYRSPNHPLDSPHVCRRCNCESDFTDGTCEDLTGRCYCRPNFSGERCDVCAEGFTGFPSCYPTPSSSNDTREQVLPAGQIVNCDCSAAGTQGNACRKDPRVGRCLCKPNFQGTHCELCAPGFYGPGCQPCQCSSPGVADDRCDPDTGQCRCRVGFEGATCDRCAPGYFHFPLCQLCGCSPAGTLPEGCDEAGRCLCQPEFAGPHCDRCRPGYHGFPNCQACTCDPRGALDQLCGAGGLCRCRPGYTGTACQECSPGFHGFPSCVPCHCSAEGSLHAACDPRSGQCSCRPRVTGLRCDTCVPGAYNFPYCEAGSCHPAGLAPVDPALPEAQVPCMCRAHVEGPSCDRCKPGFWGLSPSNPEGCTRCSCDLRGTLGGVAECQPGTGQCFCKPHVCGQACASCKDGFFGLDQADYFGCRSCRCDIGGALGQSCEPRTGVCRCRPNTQGPTCSEPARDHYLPDLHHLRLELEEAATPEGHAVRFGFNPLEFENFSWRGYAQMAPVQPRIVARLNLTSPDLFWLVFRYVNRGAMSVSGRVSVREEGRSATCANCTAQSQPVAFPPSTEPAFITVPQRGFGEPFVLNPGTWALRVEAEGVLLDYVVLLPSAYYEAALLQLRVTEACTYRPSAQQSGDNCLLYTHLPLDGFPSAAGLEALCRQDNSLPRPCPTEQLSPSHPPLITCTGSDVDVQLQVAVPQPGRYALVVEYANEDARQEVGVAVHTPQRAPQQGLLSLHPCLYSTLCRGTARDTQDHLAVFHLDSEASVRLTAEQARFFLHGVTLVPIEEFSPEFVEPRVSCISSHGAFGPNSAACLPSRFPKPPQPIILRDCQVIPLPPGLPLTHAQDLTPAMSPAGPRPRPPTAVDPDAEPTLLREPQATVVFTTHVPTLGRYAFLLHGYQPAHPTFPVEVLINAGRVWQGHANASFCPHGYGCRTLVVCEGQALLDVTHSELTVTVRVPKGRWLWLDYVLVVPENVYSFGYLREEPLDKSYDFISHCAAQGYHISPSSSSLFCRNAAASLSLFYNNGARPCGCHEVGATGPTCEPFGGQCPCHAHVIGRDCSRCATGYWGFPNCRPCDCGARLCDELTGQCICPPRTIPPDCLLCQPQTFGCHPLVGCEECNCSGPGIQELTDPTCDTDSGQCKCRPNVTGRRCDTCSPGFHGYPRCRPCDCHEAGTAPGVCDPLTGQCYCKENVQGPKCDQCSLGTFSLDAANPKGCTRCFCFGATERCRSSSYTRQEFVDMEGWVLLSTDRQVVPHERQPGTEMLRADLRHVPEAVPEAFPELYWQAPPSYLGDRVSSYGGTLRYELHSETQRGDVFVPMESRPDVVLQGNQMSITFLEPAYPTPGHVHRGQLQLVEGNFRHTETRNTVSREELMMVLASLEQLQIRALFSQISSAVFLRRVALEVASPAGQGALASNVELCLCPASYRGDSCQECAPGFYRDVKGLFLGRCVPCQCHGHSDRCLPGSGVCVDCQHNTEGAHCERCQAGFVSSRDDPSAPCVSCPCPLSVPSNNFAEGCVLRGGRTQCLCKPGYAGASCERCAPGFFGNPLVLGSSCQPCDCSGNGDPNLLFSDCDPLTGACRGCLRHTTGPRCEICAPGFYGNALLPGNCTRCDCTPCGTEACDPHSGHCLCKAGVTGRRCDRCQEGHFGFDGCGGCRPCACGPAAEGSECHPQSGQCHCRPGTMGPQCRECAPGYWGLPEQGCRRCQCPGGRCDPHTGRCNCPPGLSGERCDTCSQQHQVPVPGGPVGHSIHCEVCDHCVVLLLDDLERAGALLPAIHEQLRGINASSMAWARLHRLNASIADLQSQLRSPLGPRHETAQQLEVLEQQSTSLGQDARRLGGQAVGTRDQASQLLAGTEATLGHAKTLLAAIRAVDRTLSELMSQTGHLGLANASAPSGEQLLRTLAEVERLLWEMRARDLGAPQAAAEAELAAAQRLLARVQEQLSSLWEENQALATQTRDRLAQHEAGLMDLREALNRAVDATREAQELNSRNQERLEEALQRKQELSRDNATLQATLHAARDTLASVFRLLHSLDQAKEELERLAASLDGARTPLLQRMQTFSPAGSKLRLVEAAEAHAQQLGQLALNLSSIILDVNQDRLTQRAIEASNAYSRILQAVQAAEDAAGQALQQADHTWATVVRQGLVDRAQQLLANSTALEEAMLQEQQRLGLVWAALQGARTQLRDVRAKKDQLEAHIQAAQAMLAMDTDETSKKIAHAKAVAAEAQDTATRVQSQLQAMQENVERWQGQYEGLRGQDLGQAVLDAGHSVSTLEKTLPQLLAKLSILENRGVHNASLALSASIGRVRELIAQARGAASKVKVPMKFNGRSGVQLRTPRDLADLAAYTALKFYLQGPEPEPGQGTEDRFVMYMGSRQATGDYMGVSLRDKKVHWVYQLGEAGPAVLSIDEDIGEQFAAVSLDRTLQFGHMSVTVERQMIQETKGDTVAPGAEGLLNLRPDDFVFYVGGYPSTFTPPPLLRFPGYRGCIEMDTLNEEVVSLYNFERTFQLDTAVDRPCARSKSTGDPWLTDGSYLDGTGFARISFDSQISTTKRFEQELRLVSYSGVLFFLKQQSQFLCLAVQEGSLVLLYDFGAGLKKAVPLQPPPPLTSASKAIQVFLLGGSRKRVLVRVERATVYSVEQDNDLELADAYYLGGVPPDQLPPSLRRLFPTGGSVRGCVKGIKALGKYVDLKRLNTTGVSAGCTADLLVGRAMTFHGHGFLRLALSNVAPLTGNVYSGFGFHSAQDSALLYYRASPDGLCQVSLQQGRVSLQLLRTEVKTQAGFADGAPHYVAFYSNATGVWLYVDDQLQQMKPHRGPPPELQPQPEGPPRLLLGGLPESGTIYNFSGCISNVFVQRLLGPQRVFDLQQNLGSVNVSTGCAPALQAQTPGLGPRGLQATARKASRRSRQPARHPACMLPPHLRTTRDSYQFGGSLSSHLEFVGILARHRNWPSLSMHVLPRSSRGLLLFTARLRPGSPSLALFLSNGHFVAQMEGLGTRLRAQSRQRSRPGRWHKVSVRWEKNRILLVTDGARAWSQEGPHRQHQGAEHPQPHTLFVGGLPASSHSSKLPVTVGFSGCVKRLRLHGRPLGAPTRMAGVTPCILGPLEAGLFFPGSGGVITLDLPGATLPDVGLELEVRPLAVTGLIFHLGQARTPPYLQLQVTEKQVLLRADDGAGEFSTSVTRPSVLCDGQWHRLAVMKSGNVLRLEVDAQSNHTVGPLLAAAAGAPAPLYLGGLPEPMAVQPWPPAYCGCMRRLAVNRSPVAMTRSVEVHGAVGASGCPAA

SEQ ID NO: 157392 - DNA, 11088 bp, Artificial Sequence
  derived and/or modified sequence
atggctaagcggctctgtgccggatcagccctctgtgtgcgcggcccgcgcgggcctgcccccttgctactggtgggactggctctgctgggggccgcccgggcccgggaggaggcaggaggtggtttctccttacaccccccctactttaatctggccgagggagcccgcattgcagccagtgctacgtgcggcgaggaggcacccgcccgcgggtcgcccagacctacagaagatctgtattgtaagctggtgggaggtcctgtggctggaggggaccctaaccaaacaattaggggacagtactgtgatatttgtactgcagccaattcaaacaaagctcaccctgcatcaaacgccattgacgggacggaaagatggtggcaatccccacccctgtcccgcggactggaatataatgaggtgaacgttacgctggacttaggccaggtattccatgtggcctacgttctgatcaagttcgcaaactctccgcggcccgatctatgggtgttggaaagaagtatggattttggtagaacgtatcaaccatggcaattctttgcgtcatccaaacgggactgtcttgaaagatttggtccccagactctggagcgaataacaagggacgatgctgccatttgcactaccgagtattcacgcatcgtgcctctggaaaacggggaaattgtggtctcactggttaacgggcggcccggagctatgaacttttcatacagtcctttgctgcgggagttcacaaaagccacaaacgtcagactaaggttcttacggactaacaccttgttggggcatctgatgggcaaggcactaagggaccccaccgtgacaaggcggtactactattcaatcaaggatatttcaataggaggcaggtgtgtgtgccatgggcacgcagacgcatgcgacgctaaggaccccactgatccattcaggctgcaatgtacatgtcagcataacacctgtggggggacatgtgatcggtgctgcccagggttcaaccagcagccctggaagcccgcgacagccaattccgccaacgagtgtcagtcgtgtaactgttacggacatgctaccgactgctactatgaccccgaagtcgacagacgccgtgcatctcagtctctggacgggacttaccaaggcggaggcgtgtgcatcgactgtcagcaccatactactggggtcaattgtgaacggtgtttacccgggttctatcggtccccaaaccatcccctggattcaccacacgtgtgtcgccggtgtaactgtgaatccgactttaccgatgggacttgcgaagatctgaccgggcggtgctattgtaggcctaacttttccggagagcgttgtgatgtatgtgccgaaggcttcacgggatttccgagctgctacccgaccccatcatctagcaacgacacccgtgaacaagtgctaccagcagggcagattgtaaactgtgactgcagcgctgccggcacgcaaggcaatgcttgtaggaaagatcccagggtcggacgatgtctctgtaagcccaacttccagggcactcactgcgaactctgcgcgcctgggttctacgggccaggctgccagccatgtcagtgctcctcacccggggtggcagacgatcgctgcgaccccgacacgggccagtgtcggtgtagggtgggatttgaaggggctacatgcgatcgctgcgcacctggttatttccactttccactttgtcaactctgcggatgtagccctgccgggactctccccgaggggtgtgacgaagccggccgttgcctgtgtcagcccgagttcgctggtccacactgcgatcgctgtcggcctggctatcacgggtttcccaactgtcaggcttgcacatgcgatccacggggggctctggaccagttatgcggtgcaggcggcctttgcaggtgtcgccccgggtacactgggacagcatgccaagagtgttctccagggtttcacgggttccccagttgcgtgccctgccattgcagcgcggaaggttcactccacgcagcctgtgatcctagatccggccagtgctcttgtaggccccgggtgaccggactaagatgtgatacatgtgtgcctggcgcatacaatttcccttactgcgaagctggctcttgtcaccctgcaggactcgctcccgttgacccagctctccctgaggcccaagtgccctgcatgtgtagggcccacgtcgaggggccctcctgtgatcgctgcaaacctggcttctgggggctgagtccttctaacccggaaggatgcaccagatgttcctgtgacctgcgaggcaccctcggaggggtggcagagtgccaacccggtacaggccagtgcttctgcaaaccacatgtatgtggccaggcctgtgcctcctgcaaagacggtttttttgggctggaccaggcagattattttggatgccggtcgtgtcggtgcgatattggcggagcactcgggcaaagttgcgaacctcggacaggggtgtgtcggtgtaggcccaatacccagggaccaacctgttccgaacctgctcgagaccactacttgccagaccttcaccacctaagactggagcttgaggaagcagcaaccccagaaggacacgcagtgcggttcggctttaaccctttggagtttgagaacttctcatggagaggctatgctcagatggctcctgtccaacccaggatcgttgccagattaaacctgacaagtccagaccttttttggctcgtgtttcggtatgtgaatcgcggggcgatgtccgtgtcaggacgcgtttccgtccgagaggaaggacgaagcgcaacttgtgctaactgcacagcacaatcgcagcctgttgcctttcctcctagcaccgagccagcttttatcaccgtccctcaacgtggatttggagagccattcgtgttaaatcccgggacctgggccctacgcgttgaagctgagggcgtgttgttggactatgtcgtgctgctgccgtctgcttactacgaagccgctctgcttcaactgcgtgtcacagaagcttgcacttacaggccgagtgcccagcagtctggagacaattgtttgctctacacccatctgccccttgatgggttccccagcgcggccggactggaagcactctgcagacaggacaactcactgccacgcccctgccctaccgagcagctgtcaccctcccaccccccccttattacctgcactggttcagacgtcgacgtccagcttcaagtggcggtcccgcagcctggccgctatgcactggtggtggagtatgccaacgaggacgctagacaggaggtgggggtggcagttcacacaccccagcgggcgcctcagcaagggttactgtcgctccacccatgtctctattctaccctgtgtcgcggaacggccagggacactcaggatcacctggctgtcttccatctcgacagcgaagccagcgtgagacttaccgcagagcaggcgcggttcttcctgcatggggttactctggtgccgatcgaggaattcagccccgagttcgtggaacccagggtgtcttgcatatcctctcatggcgcttttggccctaatagcgccgcctgtctgccatcacgctttccaaagcccccgcagccaatcatcttgcgggattgtcaggtgattcccctccctcccggcttgcctttaacacacgcgcaggacctcacacctgcaatgagtccagcaggtcctcgcccccggccgccaactgctgttgaccctgatgccgagcctacactgctacgtgagccccaggccactgttgtttttactacccatgttcctacattggggcggtacgccttcctgctgcacggctaccagcccgctcatccgacatttcccgtcgaggtgctcatcaatgccggccgggtctggcaaggccatgcgaacgccagcttctgcccacacgggtacggttgccgcaccttggtcgtgtgcgaaggccaggcattgcttgacgtgactcattcagagctcactgtcacggtacgggtcccaaagggacgctggctatggctggattatgtgctggtcgttccagagaacgtatattcctttggatacctgagagaagagccactggacaaatcatacgactttatttcccactgcgctgctcaggggtaccacatctcacctagtagttctagtcttttttgcagaaatgctgcagcaagtctgtcactgttttataacaacggagctcgcccttgcgggtgtcacgaagtgggagctacgggaccgacatgtgagccatttggggggcagtgtccctgccatgcccacgtgatcggacgggactgtagtcgatgcgccaccggatattggggttttccaaactgcagaccttgcgactgcggggccagactgtgcgatgagttaacaggtcagtgcatctgtccccctaggacaattccacccgattgcctcctctgccaaccgcagacattcggatgccatccactggtgggctgtgaggaatgcaattgcagtggtcctggcatacaggaactgaccgaccctacatgcgatactgactcagggcagtgtaaatgtcggcccaatgtgaccggacgtcgctgcgatacgtgtagccccggattccacggatatccaagatgccggccctgcgattgccacgaggcaggcaccgccccgggcgtgtgtgatcctctcacaggacagtgttattgcaaggaaaacgtccaggggcctaaatgcgaccagtgctctctaggaactttctcgctcgatgcagcaaaccccaaaggctgcacccgctgtttttgttttggcgccaccgagcgctgtcggtcgtcatcatatacccgtcaggaattcgttgacatggaggggtgggtgctgctgagtaccgacagacaggtcgtgcctcacgaacgtcagcctggaactgagatgcttagggccgatttaagacacgttccggaagcagtgcctgaagcatttcccgagctatattggcaagcccccccttcctacctaggagaccgtgtttcttcctatgggggcactttgaggtacgagctccactctgaaactcagaggggtgacgttttcgtgcctatggagtcaagacctgacgtagtactccaaggaaatcagatgagcatcaccttcttggaaccagcttacccaacccctggacacgtgcatcggggacagctacagctcgtggagggcaacttccgccacaccgagacgaggaacaccgtcagccgcgaggagttgatgatggtattggcgtctctggaacagctgcagattagagccctgttttctcagatctcctccgcagtgtttctgcgtcgggtagctctcgaggtggcaagtcctgctggccaaggggctctggcgtccaacgttgagctgtgcctgtgcccagcatcatataggggagacagctgccaagaatgtgcccctgggttctatagagacgtgaaggggcttttccttggcagatgtgtgccgtgtcaatgtcacggccattcagacagatgtctgccaggctctggggtttgcgtggactgccagcacaacaccgagggcgcacactgcgaaaggtgtcaggccggcttcgtgtcctccagggacgaccccagcgccccttgcgtgagctgcccctgcccactgtcagtacctagcaataatttcgcagaggggtgcgtccttaggggaggcaggacacagtgcctctgcaaaccaggatacgccggtgcttcctgtgaacggtgcgcccccggtttctttggaaacccactcgtcctgggcagcagctgccagccttgtgactgttcaggaaacggcgatccgaatctactattctcagattgtgatccgctgaccggcgcttgccgtggttgtctccggcacacaactggaccccgctgtgaaatctgtgcgccaggtttttatggaaatgctctgctgccaggcaattgtaccagatgcgactgtacaccttgcggcaccgaagcctgtgacccccattctggacactgcctgtgcaaggcaggcgttaccggacgacgttgcgacaggtgccaagagggccactttggcttcgatggatgtggcgggtgccgaccgtgcgcctgcggacctgccgccgaaggaagtgaatgtcaccctcagagcggccaatgccactgcagaccggggaccatgggtccccaatgccgggagtgcgctccagggtactggggcctgccagagcagggatgtaggcgctgccagtgccccggcggcaggtgtgacccgcacactggtcggtgcaattgcccccccggtctgtccggcgaaaggtgtgatacctgcagccagcagcaccaggttcccgtcccagggggccccgtcggccattcaatccactgcgaggtgtgtgatcactgcgtcgtcttgttattggatgacctagaaagagctggcgccttgctgcccgccattcacgagcaactacggggaatcaacgcaagcagcatggcctgggcacgactgcatcgcctaaacgcgtccatcgccgatctacaaagccagctgcgctcaccactcggacccagacacgagaccgcccagcagctggaagtcctagaacaacagtcgacttcccttggtcaggacgcaagacgtctgggagggcaagctgttggcacaagggatcaggctagccagctgctagctggcaccgaagcaacacttggacacgccaagaccctgctcgcagcaattcgcgcggtagataggacattgtccgaactcatgagtcaaacagggcacctaggtctggctaacgcctccgccccctctggggagcagttactgaggacgctggcagaggtggaacgcttgctctgggagatgcgcgctcgtgaccttggggcgccccaggcagccgcagaggcagagctagccgccgctcagcgtctcctagcgcgtgtacaggagcaactcagcagcctttgggaggaaaatcaggctctggccacgcaaactagagaccgattggcccagcacgaggctggactgatggatctgcgggaagcccttaaccgcgcagtggatgccacccgggaagcccaagaactcaattcaaggaaccaggagcgcctggaggaggccctccagcgaaaacaggagctgtctagagacaacgccaccttgcaggcaacgctccacgccgcccgagatacgctggctagtgtgtttcgcttgttgcattctctcgaccaggccaaggaagaattggagcgtctggctgcaagcttggacggggccagaactcccctgctgcagagaatgcagacattctccccagcaggttcaaaattgcgcctcgtggaagcagcagaggcacatgcacagcaattgggccagttagccctgaatctgtcatctattatcctcgatgtgaatcaggatcggctgacgcaaagggcaattgaagcttccaacgcatattcgagaatcctgcaagcggtgcaagccgccgaagatgcagcaggccaggctctccaacaggccgaccatacttgggccacggtggtgcggcagggtctcgtagacagagctcaacagctgctggctaactcgactgcattagaagaggcaatgctacaggagcaacagcgcctgggccttgtgtgggctgctctccaaggagctcggacacaacttagggatgtgcgcgctaagaaggatcagctggaggcccacattcaggctgcacaggccatgctagcaatggacacagatgagactagcaaaaagattgctcatgccaaagctgtagcagcggaagcccaggacaccgccacgcgggttcagagccaacttcaagccatgcaggagaacgtcgaacggtggcagggccagtacgaaggccttaggggccaggaccttggccaggccgtgctggacgctggacattctgttagtacacttgaaaagacgctcccacagctgctggcaaagctgtctattctagaaaacaggggggtgcacaacgccagtctggcgttgtccgcatccattgggagagtgcgggaactcatcgcacaggcacgcggggcagccagcaaggtgaaggttcccatgaagtttaacggacggagcggcgtgcagctgcgcactcctcgagatcttgctgatctggctgcatacaccgccctcaagttctaccttcaggggcccgagcctgaaccaggccaaggcactgaggaccggttcgttatgtatatggggtcgaggcaggcaactggagactatatgggcgtctcgcttcgggacaagaaggttcactgggtataccaattgggtgaggctgggcctgccgtgcttagtatcgacgaggacattggggaacagtttgcagcagttagtctggatcgcacactgcaattcggccatatgagcgttacggtagaacggcagatgattcaggaaaccaaaggtgacactgttgccccaggagctgaaggactgttaaatctgcgccccgatgacttcgtcttctacgtgggtggataccctagtactttcacacctccacccttgctacggtttccgggatacaggggttgtattgaaatggacacacttaacgaggaggtagtgagcctctataatttcgagaggactttccagctggacaccgcggtggaccggccgtgcgcccgaagcaaatccacgggtgacccatggctgactgatggctcatacctggacgggactggatttgccagaatctcttttgatagccagatcagtacgacgaaaagattcgagcaggagctgcgacttgtgtcatattctggggtgctgttcttcctcaaacagcagtctcaatttttatgtctggcggtgcaggaaggatctcttgtcctcctgtacgactttggagcaggacttaagaaagccgtacccctgcagccacctccaccactcacatccgcttctaaggctatccaagtgttcctactgggcggcagcagaaagcgagtacttgtgcgagtggaaagagcaactgtgtactcagtggaacaagacaatgacctggagttggctgacgcctactaccttggcggagtcccaccagatcagctgcctccttcactccggcgtctattcccgaccgggggctccgtgagaggttgcgtgaaaggtatcaaggcactcggaaagtacgtggacttaaagcggctgaacaccactggcgtatcagccggctgtactgctgaccttctggtcgggagggcaatgactttccacggtcacggatttctcaggctggcactgtcaaatgttgccccccttaccggaaatgtatattcaggatttggctttcattctgctcaagacagcgctcttctctattaccgcgctagcccagatggactgtgtcaggtgtctctccaacagggaagggtatcactacaactcctgcggacagaggtaaaaacgcaggctggctttgctgacggcgccccccactatgtggcattttattctaacgctactggagtgtggctttatgtggatgatcagctgcaacaaatgaaacctcaccgtggccctccacccgagctgcagcctcagccagagggtcccccgcggctcctcctcggcgggttacccgaatctggcaccatttataatttttctggctgcatcagtaatgtatttgtccagaggctcctggggccacaaagagttttcgatctgcagcaaaacctcgggagcgtgaatgtgtccacgggctgcgctcccgccttgcaggcacagacccctggcctcggccctaggggcctccaggctaccgcaagaaaggcaagcagaagatcacgacagcccgcccggcatccagcttgtatgctgcctcctcacttgcggaccactagggactcttaccagtttggagggtcactctcctcccatcttgagtttgtggggatcctggcccggcaccgcaactggccttcacttagcatgcacgtgttaccacggtcatcgcgggggctgctcctgtttactgctaggctgagacctggcagcccgagtcttgctctattcttgtccaacgggcattttgtcgcacagatggaagggctcggaacaaggctccgggctcaaagccggcagcgtagtagacccgggaggtggcataaggtgagtgtgcgctgggagaagaatcgcatcctactcgtgaccgatggggcccgtgcatggtctcaggagggtccccatagacagcaccaaggcgcggagcaccctcaaccgcacaccttattcgtgggcggcttgcctgccagctcccacagctccaagttgccagtaaccgtcggttttagcggctgtgtgaagcgcctgagacttcatggaaggccccttggcgcaccgaccagaatggctggggtgaccccttgcattctcggtccccttgaagccggacttttcttccctggaagtgggggcgtgataaccctggacttgcccggggctaccctgccagacgtggggctcgagttggaggtccgtcctctggctgtcacaggtttgatctttcacctcggccaagcccggacgccgccttacttacagcttcaggtaacagaaaaacaggtcctccttagggccgatgatggggccggagagttcagcacttctgtgacccgcccttcagtgctgtgcgacggccaatggcatcgtcttgctgtcatgaaaagcggaaatgtgctgcgactcgaagtggatgcgcagagcaatcataccgtagggcctcttctcgcggctgccgctggagctcccgctcccctatacttaggaggtctgcctgagccgatggctgttcaaccatggcccccagcctactgtgggtgcatgcgccgcttggccgttaacagatcacccgtggccatgactcgaagcgtcgaggttcacggcgctgtgggagccagtggctgtcctgcggcttag

SEQ ID NO: 157393 - DNA, 1503 bp, Artificial Sequence
  derived and/or modified sequence
atggccaaacggttgtgcgcaggctctgctctttgcgtgagaggcccgaggggccccgcccctctgctgttagtgggactggcccttttgggagcagcgcgtgctcgcgaggaggcaggggggggctttagcctacatccgccatactttaatctggcagagggagccaggatcgctgcttcggcgacttgcggcgaggaggcccccgcccgcggctccccaagacctacagaggacttatattgtaaactggtcggcgggcctgtggccgggggtgatcccaatcaaacaatccgcggccagtactgcgacatatgcaccgcagcaaactcaaacaaggcccatcccgcctctaacgcaattgatggcactgaaaggtggtggcagagcccccccctcagcagaggactcgaatacaatgaagtgaatgtgacactcgatctgggccaggtcttccacgtcgcctatgtcctgatcaagtttgccaactccccgaggcctgatctgtgggttcttgagcggtcaatggatttcggacggacataccagccgtggcaatttttcgcgagcagtaagcgcgattgcctggagagatttggccctcagacattagaacggataacaagggacgacgccgcgatatgtaccaccgagtattcacgcatagtccctcttgagaatggcgaaatagtcgtgagcttggtgaatggtaggcccggagccatgaactttagctattcaccgttactacgggaattcactaaggcaactaatgttcgcctgaggttcctgcgtactaatactctcctgggccacttgatgggcaaagccttgcgggatccaactgtgacaaggcgctattactactcaattaaggatatttcgatcggcggccggtgcgtgtgccatggccacgccgacgcgtgcgacgcaaaggaccccactgatccatttcggttgcagtgtacctgtcagcataacacatgtggcgggacctgcgatcgctgttgtcctgggtttaaccagcagccatggaaacctgccacagcaaactctgccaatgaatgccaatcctgtaactgttacggacacgcaacagattgctattatgacccggaggtggatcggcggagagcctcccagagtcttgacggtacctatcaaggcggtggagtgtgtatcgactgtcaacaccacacaactggtgtgaactgtgagcgctgtctgcccggattttaccggagcccaaaccaccctctggattctccacacgtgtgtcggagatgcaattgtgaaagcgactttaccgacggaacatgcgaagatcttaccggacgctgctattgcaggcccaattttagtggagaaagatgcgacgtttgtgccgagggtttcacaggatttcccagttgctatccgactcccagctcttctaacgatactagagaacaggtcctgcccgcgggccaaatagtcactaacaccaagatttcctgggtctag

SEQ ID NO: 157394 - DNA, 1587 bp, Artificial Sequence
  derived and/or modified sequence
atggctaaaaggctgtgtgcaggaagcgccctgtgtgtgcgcggaccccggggaccggctcctctgctcctggttggacttgcccttctcggagccgcaagagcccgtgaggaggcaggcggcggattctccttgcaccccccatacttcaacctcgctgaaggtgcacgtatcgctgcctctgctacatgcggcgaggaagccccggccagaggctccccccgaccaacggaggatttgtactgcaagctggtgggtgggcctgtagccggaggggacccgaaccagactatccgggggcagtactgtgatatttgcaccgctgcaaattcaaataaggcccatcccgcttccaatgccatcgatggcacagagcggtggtggcagtcccctcctctgagcaggggtctggagtacaatgaggtgaacgtaacgttagatctgggccaagtgtttcatgtcgcctatgtgctcattaagtttgccaattcgcctcgacctgatctgtgggtattggagaggtcaatggactttggaaggacctaccagccttggcagttctttgcctcaagcaaacgggattgccttgagcgcttcgggccacagacactcgaaagaatcacacgggacgacgccgcaatttgtaccaccgaatactctcggattgtgcccttggagaatggggagatagtggtctccctcgtcaacggtcggccaggggctatgaatttctcctacagccccctgctgcgcgaattcaccaaagccacaaacgtgcgcttgagattcttgaggacgaatacgctgctcggacatctcatgggcaaagccttaagagatcctacggtgacccgcaggtactactattcgattaaagatattagcattggcggtagatgcgtgtgccatggacacgcagacgcttgtgatgctaaggatcccacagacccattccgactgcagtgtacctgccagcataatacttgtggcggtacgtgcgatagatgttgtcctgggtttaaccagcagccatggaaacccgcaacagctaacagcgcaaatgagtgccagtcctgcaattgctatggtcacgccaccgactgttactacgacccagaagtggataggagaagggcctctcagagcttggatgggacttatcagggaggcggtgtctgtattgactgccagcatcacacaacgggcgtgaactgtgaaagatgccttcctggtttctaccggtctccgaaccaccccctcgactccccacacgtttgtaggaggtgcaattgcgagagcgattttacagatggtacatgcgaggacctaaccggtcgctgttattgccgtcccaacttctccggggagcggtgcgatgtgtgtgcggagggcttcaccggattccctagctgctaccctacaccgtccagctctaatgatacacgagaacaagtcttgccagccggacagatcgtcaacggggtgagcctttgccgccctggctggtcagcggtcgcgcgatcacgcctgacgagcacgagtgctagttgggtgcaagcgatcctgctgccccagagtcccgagtag

SEQ ID NO: 157395 - DNA, 11426 bp, Artificial Sequence
  derived and/or modified sequence
agacccgccgggctcccgccgcgcgcgctgtccctggagctcggggacgcggcccggagccgggaagatggcgaagcggctctgcgcggggagcgcactgtgtgttcgcggcccccggggccccgcgccgctgctgctggtcgggctggcgctgctgggcgcggcgcgggcgcgggaggaggcgggcggcggcttcagcctgcacccgccctacttcaacctggccgagggcgcccgcatcgccgcctccgcgacctgcggagaggaggccccggcgcgcggctccccgcgccccaccgaggacctttactgcaagctggtagggggccccgtggccggcggcgaccccaaccagaccatccggggccagtactgtgacatctgcacggctgccaacagcaacaaggcacaccccgcgagcaatgccatcgatggcacggagcgctggtggcagagtccaccgctgtcccgcggcctggagtacaacgaggtcaacgtcaccctggacctgggccaggtcttccacgtggcctacgtcctcatcaagtttgccaactcaccccggccggacctctgggtgctggagcggtccatggacttcggccgcacctaccagccctggcagttctttgcctcctccaagagggactgtctggagcggttcgggccacagacgctggagcgcatcacacgggacgacgcggccatctgcaccaccgagtactcacgcatcgtgcccctggagaacggagagatcgtggtgtccctggtgaacggacgtccgggcgccatgaatttctcctactcgccgctgctacgtgagttcaccaaggccaccaacgtccgcctgcgcttcctgcgtaccaacacgctgctgggccatctcatggggaaggcgctgcgggaccccacggtcacccgccggtattattacagcatcaaggatatcagcatcggaggccgctgtgtctgccacggccacgcggatgcctgcgatgccaaagaccccacggacccgttcaggctgcagtgcacctgccagcacaacacctgcgggggcacctgcgaccgctgctgccccggcttcaatcagcagccgtggaagcctgcgactgccaacagtgccaacgagtgccagtcctgtaactgctacggccatgccaccgactgttactacgaccctgaggtggaccggcgccgcgccagccagagcctggatggcacctatcagggtgggggtgtctgtatcgactgccagcaccacaccaccggcgtcaactgtgagcgctgcctgcccggcttctaccgctctcccaaccaccctctcgactcgccccacgtctgccgccgctgcaactgcgagtccgacttcacggatggcacctgcgaggacctgacgggtcgatgctactgccggcccaacttctctggggagcggtgtgacgtgtgtgccgagggcttcacgggcttcccaagctgctacccgacgccctcgtcctccaatgacaccagggagcaggtgctgccagccggccagattgtgaattgtgactgcagcgcggcagggacccagggcaacgcctgccggaaggacccaagggtgggacgctgtctgtgcaaacccaacttccaaggcacccattgtgagctctgcgcgccagggttctacggccccggctgccagccctgccagtgttccagccctggagtggccgatgaccgctgtgaccctgacacaggccagtgcaggtgccgagtgggcttcgagggggccacatgtgatcgctgtgcccccggctactttcacttccctctctgccagttgtgtggctgcagccctgcaggaaccttgcccgagggctgcgatgaggccggccgctgcctatgccagcctgagtttgctggacctcattgtgaccggtgccgccctggctaccatggtttccccaactgccaagcatgcacctgcgaccctcggggagccctggaccagctctgtggggcgggaggtttgtgccgctgccgccccggctacacaggcactgcctgccaggaatgcagccccggctttcacggcttccccagctgtgtcccctgccactgctctgctgaaggctccctgcacgcagcctgtgacccccggagtgggcagtgcagctgccggccccgtgtgacggggctgcggtgtgacacatgtgtgcccggtgcctacaacttcccctactgcgaagctggctcttgccaccctgccggtctggccccagtggatcctgcccttcctgaggcacaggttccctgtatgtgccgggctcacgtggaggggccgagctgtgaccgctgcaaacctgggttctggggactgagccccagcaaccccgagggctgtacccgctgcagctgcgacctcaggggcacactgggtggagttgctgagtgccagccgggcaccggccagtgcttctgcaagccccacgtgtgcggccaggcctgcgcgtcctgcaaggatggcttctttggactggatcaggctgactattttggctgccgcagctgccggtgtgacattggcggtgcactgggccagagctgtgaaccgaggacgggcgtctgccggtgccgccccaacacccagggccccacctgcagcgagcctgcgagggaccactacctcccggacctgcaccacctgcgcctggagctggaggaggctgccacacctgagggtcacgccgtgcgctttggcttcaaccccctcgagttcgagaacttcagctggaggggctacgcgcagatggcacctgtccagcccaggatcgtggccaggctgaacctgacctcccctgaccttttctggctcgtcttccgatacgtcaaccggggggccatgagtgtgagcgggcgggtctctgtgcgagaggagggcaggtcggccacctgcgccaactgcacagcacagagtcagcccgtggccttcccacccagcacggagcctgccttcatcaccgtgccccagaggggcttcggagagccctttgtgctgaaccctggcacctgggccctgcgtgtggaggccgaaggggtgctcctggactacgtggttctgctgcctagcgcatactacgaggcggcgctcctgcagctgcgggtgactgaggcctgcacataccgtccctctgcccagcagtctggcgacaactgcctcctctacacacacctccccctggatggcttcccctcggccgccgggctggaggccctgtgtcgccaggacaacagcctgccccggccctgccccacggagcagctcagcccgtcgcacccgccactgatcacctgcacgggcagtgatgtggacgtccagcttcaagtggcagtgccacagccaggccgctatgccctagtggtggagtacgccaatgaggatgcccgccaggaggtgggcgtggccgtgcacaccccacagcgggccccccagcaggggctgctctccctgcacccctgcctgtacagcaccctgtgccggggcactgcccgggatacccaggaccacctggctgtcttccacctggactcggaggccagcgtgaggctcacagccgaacaggcacgcttcttcctgcacggggtcactctggtgcccattgaggagttcagcccggagttcgtggagccccgggtcagctgcatcagcagccacggcgcctttggccccaacagtgccgcctgtctgccctcgcgcttcccaaagccgccccagcccatcatcctcagggactgccaggtgatcccgctgccgcccggcctcccgctgacccacgcgcaggatctcactccagccatgtccccagctggaccccgacctcggccccccaccgctgtggaccctgatgcagagcccaccctgctgcgtgagccccaggccaccgtggtcttcaccacccatgtgcccacgctgggccgctatgccttcctgctgcacggctaccagccagcccaccccaccttccccgtggaagtcctcatcaacgccggccgcgtgtggcagggccacgccaacgccagcttctgtccacatggctacggctgccgcaccctggtggtgtgtgagggccaggccctgctggacgtgacccacagcgagctcactgtgaccgtgcgtgtgcccaagggccggtggctctggctggattatgtactcgtggtccctgagaacgtctacagctttggctacctccgggaggagcccctggataaatcctatgacttcatcagccactgcgcagcccagggctaccacatcagccccagcagctcatccctgttctgccgaaacgctgctgcttccctctccctcttctataacaacggagcccgtccatgtggctgccacgaagtaggtgctacaggccccacgtgtgagcccttcgggggccagtgtccctgccatgcccatgtcattggccgtgactgctcccgctgtgccaccggatactggggcttccccaactgcaggccctgtgactgcggtgcccgcctctgtgacgagctcacgggccagtgcatctgcccgccacgcaccatcccgcccgactgcctgctgtgccagccccagacctttggctgccaccccctggtcggctgtgaggagtgtaactgctcagggcccggcatccaggagctcacagaccctacctgtgacacagacagcggccagtgcaagtgcagacccaacgtgactgggcgccgctgtgatacctgctctccgggcttccatggctacccccgctgccgcccctgtgactgtcacgaggcgggcactgcgcctggcgtgtgtgaccccctcacagggcagtgctactgtaaggagaacgtgcagggccccaaatgtgaccagtgcagccttgggaccttctcactggatgctgccaaccccaaaggttgcacccgctgcttctgctttggggccacggagcgctgccggagctcgtcctacacccgccaggagttcgtggatatggagggatgggtgctgctgagcactgaccggcaggtggtgccccacgagcggcagccagggacggagatgctccgtgcagacctgcggcacgtgcctgaggctgtgcccgaggctttccccgagctgtactggcaggccccaccctcctacctgggggaccgggtgtcatcctacggtgggaccctccgttatgaactgcactcagagacccagcggggagatgtctttgtccccatggagagcaggccggatgtggtgctgcagggcaaccagatgagcatcacattcctggagccggcataccccacgcctggccacgttcaccgtgggcagctgcagctggtggaggggaacttccggcatacggagacgcgcaacactgtgtcccgcgaggagctcatgatggtgctggccagcctggagcagctgcagatccgtgccctcttctcacagatctcctcggctgtcttcctgcgcagggtggcactggaggtggccagcccagcaggccagggggccctggccagcaatgtggagctgtgcctgtgccccgccagctaccggggggactcatgccaggaatgtgcccccggcttctatcgggacgtcaaaggtctcttcctgggccgatgtgtcccttgtcagtgccatggacactcagaccgctgcctccctggctctggcgtctgtgtggactgccagcacaacaccgaaggggcccactgtgagcgctgccaggctggcttcgtgagcagcagggacgaccccagcgccccctgtgtcagctgcccctgccccctctcagtgccttccaacaacttcgccgagggctgtgtcctgcgaggcggccgcacccagtgcctctgcaaacctggttatgcaggtgcctcctgcgagcggtgtgcgcccggattctttgggaacccactggtgctgggcagctcctgccagccatgcgactgcagcggcaacggtgaccccaacttgctcttcagcgactgcgaccccctgacgggcgcctgccgtggctgcctgcgccacaccactgggccccgctgcgagatctgtgcccccggcttctacggcaacgccctgctgcccggcaactgcacccggtgcgactgtaccccatgtgggacagaggcctgcgacccccacagcgggcactgcctgtgcaaggcgggcgtgactgggcggcgctgtgaccgctgccaggagggacattttggtttcgatggctgcgggggctgccgcccgtgtgcttgtggaccggccgccgagggctccgagtgccacccccagagcggacagtgccactgccgaccagggaccatgggaccccagtgccgcgagtgtgcccctggctactgggggctccctgagcagggctgcaggcgctgccagtgccctgggggccgctgtgaccctcacacgggccgctgcaactgccccccggggctcagcggggagcgctgcgacacctgcagccagcagcatcaggtgcctgttccaggcgggcctgtgggccacagcatccactgtgaagtgtgtgaccactgtgtggtcctgctcctggatgacctggaacgggccggcgccctcctccccgccattcacgagcaactgcgtggcatcaatgccagctccatggcctgggcccgtctgcacaggctgaacgcctccatcgctgacctgcagagccagctccggagccccctgggcccccgccatgagacggcacagcagctggaggtgctggagcagcagagcacaagcctcgggcaggacgcacggcggctaggcggccaggccgtggggacccgagaccaggcgagccaattgctggccggcaccgaggccacactgggccatgcgaagacgctgttggcggccatccgggctgtggaccgcaccctgagcgagctcatgtcccagacgggccacctggggctggccaatgcctcggctccatcaggtgagcagctgctccggacactggccgaggtggagcggctgctctgggagatgcgggcccgggacctgggggccccgcaggcagcagctgaggctgagttggctgcagcacagagattgctggcccgggtgcaggagcagctgagcagcctctgggaggagaaccaggcactggccacacaaacccgcgaccggctggcccagcacgaggccggcctcatggacctgcgagaggctttgaaccgggcagtggacgccacacgggaggcccaggagctcaacagccgcaaccaggagcgcctggaggaagccctgcaaaggaagcaggagctgtcccgggacaatgccaccctgcaggccactctgcatgcggctagggacaccctggccagcgtcttcagattgctgcacagcctggaccaggctaaggaggagctggagcgcctcgccgccagcctggatggggctcggaccccactgctgcagaggatgcagaccttctccccggcgggcagcaagctgcgtctagtggaggccgccgaggcccacgcacagcagctgggccagctggcactcaatctgtccagcatcatcctggacgtcaaccaggaccgcctcacccagagggccatcgaggcctccaacgcctacagccgcatcctgcaggccgtgcaggctgccgaggatgctgctggccaggccctgcagcaggcggaccacacgtgggcgacggtggtgcggcagggcctggtggaccgagcccagcagctcctggccaacagcactgcactagaagaggccatgctccaggaacagcagaggctgggccttgtgtgggctgccctccagggtgccaggacccagctccgagatgtccgggccaagaaggaccagctggaggcgcacatccaggcggcgcaggccatgcttgccatggacacagacgagacaagcaagaagatcgcacatgccaaggctgtggctgctgaagcccaggacaccgccacccgtgtgcagtcccagctgcaggccatgcaggagaatgtggagcggtggcagggccagtacgagggcctgcggggccaggacctgggccaggcagtgcttgacgcaggccactcagtgtccaccctggagaagacgctgccccagctgctggccaagctgagcatcctggagaaccgtggggtgcacaacgccagcctggccctgtccgccagcattggccgcgtgcgagagctcattgcccaggcccggggggctgccagtaaggtcaaggtgcccatgaagttcaacgggcgctcaggggtgcagctgcgcaccccacgggatcttgccgaccttgctgcctacactgccctcaagttctacctgcagggcccagagcctgagcctgggcagggtaccgaggatcgctttgtgatgtacatgggcagccgccaggccactggggactacatgggtgtgtctctgcgtgacaagaaggtgcactgggtgtatcagctgggtgaggcgggccctgcagtcctaagcatcgatgaggacattggggagcagttcgcagctgtcagcctggacaggactctccagtttggccacatgtccgtcacagtggagagacagatgatccaggaaaccaagggtgacacggtggcccctggggcagaggggctgctcaacctgcggccagacgacttcgtcttctacgtcggggggtaccccagtaccttcacgccccctcccctgcttcgcttccccggctaccggggctgcatcgagatggacacgctgaatgaggaggtggtcagcctctacaacttcgagaggaccttccagctggacacggctgtggacaggccttgtgcccgctccaagtcgaccggggacccgtggctcacggacggctcctacctggacggcaccggcttcgcccgcatcagcttcgacagtcagatcagcaccaccaagcgcttcgagcaggagctgcggctcgtgtcctacagcggggtgctcttcttcctgaagcagcagagccagttcctgtgcttggccgtgcaagaaggcagcctcgtgctgttgtatgactttggggctggcctgaaaaaggccgtcccactgcagcccccaccgcccctgacctcggccagcaaggcgatccaggtgttcctgctggggggcagccgcaagcgtgtgctggtgcgtgtggagcgggccacggtgtacagcgtggagcaggacaatgatctggagctggccgacgcctactacctggggggcgtgccgcccgaccagctgcccccgagcctgcgacggctcttccccaccggaggctcagtccgtggctgcgtcaaaggcatcaaggccctgggcaagtatgtggacctcaagcggctgaacacgacaggcgtgagcgccggctgcaccgccgacctgctggtggggcgcgccatgactttccatggccacggcttccttcgcctggcgctctcgaacgtggcaccgctcactggcaacgtctactccggcttcggcttccacagcgcccaggacagtgccctgctctactaccgggcgtccccggatgggctatgccaggtgtccctgcagcagggccgtgtgagcctacagctcctgaggactgaagtgaaaactcaagcgggcttcgccgatggtgccccccattacgtcgccttctacagcaatgccacgggagtctggctgtatgtcgatgaccagctccagcagatgaagccccaccggggaccaccccccgagctccagccgcagcctgaggggcccccgaggctcctcctgggaggcctgcctgagtctggcaccatttacaacttcagtggctgcatcagcaacgtcttcgtgcagcggctcctgggcccacagcgcgtatttgatctgcagcagaacctgggcagcgtcaatgtgagcacgggctgtgcacccgccctgcaagcccagaccccgggcctggggcctagaggactgcaggccaccgcccggaaggcctcccgccgcagccgtcagcccgcccggcatcctgcctgcatgctgcccccacacctcaggaccacccgagactcctaccagtttgggggttccctgtccagtcacctggagtttgtgggcatcctggcccgacataggaactggcccagtctctccatgcacgtcctcccgcgaagctcccgaggcctcctcctcttcactgcccgtctgaggcccggcagcccctccctggcgctcttcctgagcaatggccacttcgttgcacagatggaaggcctcgggactcggctccgcgcccagagccgccagcgctcccggcctggccgctggcacaaggtctccgtgcgctgggagaagaaccggatcctgctggtgacggacggggcccgggcctggagccaggaggggccgcaccggcagcaccagggggcagagcacccccagccccacaccctctttgtgggcggcctcccggccagcagccacagctccaaacttccggtgaccgtcgggttcagcggctgtgtgaagagactgaggctgcacgggaggcccctgggggcccccacacggatggcaggggtcacaccctgcatcttgggccccctggaggcgggcctgttcttcccaggcagcgggggagttatcactttagacctcccaggagctacactgcctgatgtgggcctggaactggaggtgcggcccctggcagtcaccggactgatcttccacttgggccaggcccggacgcccccctacttgcagttgcaggtgaccgagaagcaagtcctgctgcgggcggatgacggagcaggggagttctccacgtcagtgacccgcccctcagtgctgtgtgatggccagtggcaccggctagcggtgatgaaaagcgggaatgtgctccggctggaggtggacgcgcagagcaaccacaccgtgggccccttgctggcggctgcagctggtgccccagcccctctgtacctcgggggcctgcctgagcccatggccgtgcagccctggccccccgcctactgcggctgcatgaggaggctggcggtgaaccggtcccccgtcgccatgactcgctctgtggaggtccacggggcagtgggggccagtggctgcccagccgcctaggacacagccaaccccggcccctggtcaggcccctgcagctgcctcacaccgccccttgtgctcgcctcataggtgtctatttggactctaagctctacgggtgacagatcttgtttctgaagatggtttaagttatagcttcttaaacgaaagaataaaatactgcaaaatgtttttatatttggcccttccacccatttttaattgtgagagatttgtcaccaatcatcactggttcctccttaaaaattaaaaagtaacttctgtgtaa

SEQ ID NO: 157396 - DNA, 1674 bp, Artificial Sequence
  derived and/or modified sequence
ggggacgcggcccggagccgggaagatggcgaagcggctctgcgcggggagcgcactgtgtgttcgcggcccccggggccccgcgccgctgctgctggtcgggctggcgctgctgggcgcggcgcgggcgcgggaggaggcgggcggcggcttcagcctgcacccgccctacttcaacctggccgagggcgcccgcatcgccgcctccgcgacctgcggagaggaggccccggcgcgcggctccccgcgccccaccgaggacctttactgcaagctggtagggggccccgtggccggcggcgaccccaaccagaccatccggggccagtactgtgacatctgcacggctgccaacagcaacaaggcacaccccgcgagcaatgccatcgatggcacggagcgctggtggcagagtccaccgctgtcccgcggcctggagtacaacgaggtcaacgtcaccctggacctgggccaggtcttccacgtggcctacgtcctcatcaagtttgccaactcaccccggccggacctctgggtgctggagcggtccatggacttcggccgcacctaccagccctggcagttctttgcctcctccaagagggactgtctggagcggttcgggccacagacgctggagcgcatcacacgggacgacgcggccatctgcaccaccgagtactcacgcatcgtgcccctggagaacggagagatcgtggtgtccctggtgaacggacgtccgggcgccatgaatttctcctactcgccgctgctacgtgagttcaccaaggccaccaacgtccgcctgcgcttcctgcgtaccaacacgctgctgggccatctcatggggaaggcgctgcgggaccccacggtcacccgccggtattattacagcatcaaggatatcagcatcggaggccgctgtgtctgccacggccacgcggatgcctgcgatgccaaagaccccacggacccgttcaggctgcagtgcacctgccagcacaacacctgcgggggcacctgcgaccgctgctgccccggcttcaatcagcagccgtggaagcctgcgactgccaacagtgccaacgagtgccagtcctgtaactgctacggccatgccaccgactgttactacgaccctgaggtggaccggcgccgcgccagccagagcctggatggcacctatcagggtgggggtgtctgtatcgactgccagcaccacaccaccggcgtcaactgtgagcgctgcctgcccggcttctaccgctctcccaaccaccctctcgactcgccccacgtctgccgccgctgcaactgcgagtccgacttcacggatggcacctgcgaggacctgacgggtcgatgctactgccggcccaacttctctggggagcggtgtgacgtgtgtgccgagggcttcacgggcttcccaagctgctacccgacgccctcgtcctccaatgacaccagggagcaggtgctgccagccggccagattgtgacaaatacaaaaattagctgggtgtagtgatgtgtgcctgtagttcgagctactccggaggctgaggtggaaggattgcttgagcctggaaggccgaagctgcagtgagccatgatcacaccacagcactccagcctgggcaacagagtgagaccttgtttcaaaaaagaaaa

SEQ ID NO: 157397 - DNA, 1943 bp, Artificial Sequence
  derived and/or modified sequence
ccgccgcgcgcgctgtccctggagctcggggacgcggcccggagccgggaagatggcgaagcggctctgcgcggggagcgcactgtgtgttcgcggcccccggggccccgcgccgctgctgctggtcgggctggcgctgctgggcgcggcgcgggcgcgggaggaggcgggcggcggcttcagcctgcacccgccctacttcaacctggccgagggcgcccgcatcgccgcctccgcgacctgcggagaggaggccccggcgcgcggctccccgcgccccaccgaggacctttactgcaagctggtagggggccccgtggccggcggcgaccccaaccagaccatccggggccagtactgtgacatctgcacggctgccaacagcaacaaggcacaccccgcgagcaatgccatcgatggcacggagcgctggtggcagagtccaccgctgtcccgcggcctggagtacaacgaggtcaacgtcaccctggacctgggccaggtcttccacgtggcctacgtcctcatcaagtttgccaactcaccccggccggacctctgggtgctggagcggtccatggacttcggccgcacctaccagccctggcagttctttgcctcctccaagagggactgtctggagcggttcgggccacagacgctggagcgcatcacacgggacgacgcggccatctgcaccaccgagtactcacgcatcgtgcccctggagaacggagagatcgtggtgtccctggtgaacggacgtccgggcgccatgaatttctcctactcgccgctgctacgtgagttcaccaaggccaccaacgtccgcctgcgcttcctgcgtaccaacacgctgctgggccatctcatggggaaggcgctgcgggaccccacggtcacccgccggtattattacagcatcaaggatatcagcatcggaggccgctgtgtctgccacggccacgcggatgcctgcgatgccaaagaccccacggacccgttcaggctgcagtgcacctgccagcacaacacctgcgggggcacctgcgaccgctgctgccccggcttcaatcagcagccgtggaagcctgcgactgccaacagtgccaacgagtgccagtcctgtaactgctacggccatgccaccgactgttactacgaccctgaggtggaccggcgccgcgccagccagagcctggatggcacctatcagggtgggggtgtctgtatcgactgccagcaccacaccaccggcgtcaactgtgagcgctgcctgcccggcttctaccgctctcccaaccaccctctcgactcgccccacgtctgccgccgctgcaactgcgagtccgacttcacggatggcacctgcgaggacctgacgggtcgatgctactgccggcccaacttctctggggagcggtgtgacgtgtgtgccgagggcttcacgggcttcccaagctgctacccgacgccctcgtcctccaatgacaccagggagcaggtgctgccagccggccagattgtgaatggagtttcactctgtcgtccaggctggagtgcagttgcacgatctcggctcacttcaacctctgcctcctgggttcaagcgattctcctgcctcagtctcccgagtagctgggattacaggcacctgccaccacgcctggccaattttttgtatttttagtagagacggggtttcaccatgttggccaggctggtcttgaactctgaccacaagtgatccacctgcctcggcctcccaaagtgctggtattacaggcatgagccaccacgcctggccagttttcttcctcatcttaagtcaggtttgattatttgtattagcaaattgtgtattttgtttggattttttaatgtattgacataaagttatgcacagtggcctgttataaagttaaaatttctgttcatttct

SEQ ID NO: 157398 - DNA, 11088 bp, Artificial Sequence
  derived and/or modified sequence
atggccaagaggctgtgtgccggcagcgccctgtgtgtgcggggcccccggggccctgcccccctgctgctggtgggcctggccctgctgggcgccgcccgggcccgggaggaggccggcggcggcttcagcctgcaccccccctacttcaacctggccgagggcgccagaattgctgccagcgccacctgtggggaggaggccccagcccggggcagcccccggcccacagaggacctgtactgcaagctggtgggcggccctgtggccggcggggaccccaaccagaccatccggggccagtactgtgacatctgcacagctgccaacagcaacaaggcccacccagccagcaatgccattgatggaacagagcgctggtggcagagcccccccctgagccggggcctggagtacaatgaggtgaatgtgaccctggacctgggccaggtgttccacgtggcctacgtgctgatcaagtttgccaacagccccaggccagacctgtgggtgctggagaggtccatggactttggccgcacctaccagccctggcagttctttgccagcagcaagagggactgcctggagagatttggcccccagaccctggagcgcatcaccagagatgatgctgccatctgcaccacagagtacagccgcatcgtgcccctggagaatggagagatcgtggtgtccctggtgaatggccggcctggggccatgaacttctcctacagccccctgctgcgggagttcaccaaggccaccaacgtgcggctgcgcttcctgcggaccaacaccctgctgggccacctgatgggcaaggccctgcgggaccccaccgtgacccggcgctactactacagcatcaaggacatcagcatcggcggccgctgtgtgtgccacggccacgcagatgcctgtgatgccaaggaccccacagaccccttccggctgcagtgcacctgccagcacaacacctgtggcggcacctgtgaccgctgctgccccggcttcaaccagcagccctggaagccagccacagccaacagcgccaatgaatgccagagctgcaactgctacggccacgccacagactgctactatgaccctgaggtggacagaagaagagccagccagagcctggatggcacctaccagggcggcggcgtgtgcatcgactgccagcaccacaccactggagtgaactgtgagcgctgcctgcccggcttctaccgcagccccaaccaccccctggacagcccccacgtgtgccgccgctgcaactgtgagagtgacttcacagatggcacctgtgaggacctgaccggccgctgctactgccggcccaacttcagcggggagcgctgtgatgtgtgtgccgagggcttcaccggcttccccagctgctaccccacccccagcagcagcaatgacacccgggagcaggtgctgcctgctggccagatcgtgaactgtgactgcagcgctgctggcacccagggcaatgcctgcaggaaggacccccgggtgggccgctgcctgtgcaagcccaacttccagggcacccactgtgagctgtgtgcccctggcttctacggccctggctgccagccctgccagtgcagcagccctggggtggctgatgacagatgtgaccctgacaccggccagtgccgctgccgggtgggctttgagggcgccacctgtgacagatgtgcccctggctacttccacttccccctgtgccagctgtgtggctgcagccctgctggcaccctgcctgagggctgtgatgaggccggccgctgcctgtgccagcctgagtttgctggcccccactgtgaccgctgcaggcctggctaccacggcttccccaactgccaggcctgcacctgtgaccccaggggggccctggaccagctgtgtggggccggcggcctgtgccgctgccggcccggctacacaggaacagcctgccaggagtgcagccctggcttccacggcttccccagctgtgtgccctgccactgcagcgctgagggcagcctgcatgctgcctgtgaccccaggagcggccagtgcagctgccggccccgggtgacaggcctgcgctgtgacacctgtgtgcctggggcctacaacttcccctactgtgaggccggcagctgccaccctgctggcctggcccctgtggaccctgccctgcctgaggcccaggtgccctgcatgtgccgggcccacgtggagggccccagctgtgaccgctgcaagccaggcttctggggcctgagccccagcaaccctgagggctgcacccgctgcagctgtgacctgcggggcaccctgggcggcgtggccgagtgccagcccggcaccggccagtgcttctgcaagccccacgtgtgtggccaggcctgtgccagctgcaaggatggcttcttcggcctggaccaggccgactacttcggctgccgcagctgccgctgtgacattggaggagccctgggccagagctgtgagcccaggactggagtgtgccgctgccggcccaacacccagggccccacctgcagcgagcccgcccgggaccactacctgcctgacctgcaccacctgcggctggagctggaggaggccgccaccccagagggccatgctgtgcgcttcggcttcaaccccctggagtttgagaacttctcctggaggggctacgcccagatggcccctgtgcagccccgcatcgtggcccggctgaacctgaccagcccagacctcttctggctggtgttccgctacgtgaacagaggagccatgtctgtgtctggccgggtgtctgtgcgggaggagggccgcagcgccacctgtgccaactgcacagcccagagccagcctgtggccttcccccccagcacagagcccgccttcatcaccgtgccccagaggggctttggagagccctttgtgctgaaccctggcacctgggccctgcgggtggaggccgagggcgtgctgctggactatgtggtgctgctgcccagcgcctactatgaggccgccctgctgcagctgcgggtgacagaggcctgcacctaccggcccagcgcccagcagagcggggacaactgcctgctgtacacccacctgcccctggatggcttccccagcgctgctggcctggaggccctgtgccggcaggacaacagcctgccccggccctgccccacagagcagctgagccccagccaccccccactcatcacctgcaccggcagtgatgtggatgtgcagctgcaggtggccgtgccccagcccggccgctatgccctggtggtggagtatgccaatgaagatgcccggcaggaggtgggcgtggccgtgcacaccccccagagggccccccagcagggcctgctgagcctgcacccctgcctgtacagcaccctgtgccggggcacagcccgggacacccaggaccacctggccgtgttccacctggacagcgaggcctctgtgcggctgacagctgagcaggcccgcttcttcctgcatggagtgaccctggtgcccatcgaggagttcagccctgagtttgtggagccccgggtgtcctgcatcagcagccacggggccttcggccccaacagcgctgcctgcctgcccagccgcttccccaagccaccccagcccatcatcctgcgggactgccaggtgatccccctgcccccaggcctgcccctgacccacgcccaggacctgaccccagccatgagccctgctggcccccggcccaggcctcccacagctgtggaccctgatgctgagcccaccctgctgcgggagccccaggccaccgtggtgttcaccacccacgtgcccaccctgggccgctatgccttcctgctgcacggctaccagcctgcccaccccaccttccctgtggaggtgctgatcaatgccggccgggtgtggcagggccacgccaatgccagcttctgcccccacggctacggctgcaggaccctggtggtgtgtgagggccaggccctgctggatgtgacccacagcgagctgactgtgacagtgcgggtgcccaagggccgctggctgtggctggactatgtgctggtggtgcctgaaaatgtgtacagctttggctacctgcgggaggagcccctggacaagagctatgacttcatcagccactgtgccgcccagggctaccacatcagccccagcagcagcagcctcttctgcagaaatgctgctgccagcctgagcctcttctacaacaatggagcccggccctgtggctgccacgaggtgggcgccaccggccccacctgtgagccctttggaggccagtgcccctgccacgcccacgtgattggccgggactgcagccgctgtgccaccggctactggggcttccccaactgccggccctgtgactgtggggcccggctgtgtgatgagctgaccggccagtgcatctgcccccccaggaccatccccccagactgcctgctgtgccagccccagaccttcggctgccaccccctggtgggctgtgaggagtgcaactgcagcggccctggcatccaggagctgacagaccccacctgtgacacagattctggccagtgcaagtgccggcccaacgtgactggaagaagatgtgacacctgcagccctggcttccacggctacccccgctgccggccctgtgactgccacgaggccggcacagcccctggggtgtgtgaccccctgaccggccagtgctactgcaaggaaaatgtgcagggccccaagtgtgaccagtgcagcctgggcaccttcagcctggatgctgccaaccccaagggctgcacccgctgcttctgctttggagccacagagcgctgccgcagcagcagctacacccggcaggagtttgtggacatggagggctgggtgctgctgagcacagaccggcaggtggtgccccatgagcggcagcctggaacagagatgctgcgggctgacctgcggcacgtgcctgaggccgtgcctgaggccttccctgagctgtactggcaggcccctccttcctacctgggggacagagtgtcctcctatggaggcaccctgcgctatgagctgcacagcgagacccagagaggagatgtgtttgtgcccatggagagcaggccagatgtggtgctgcagggcaaccagatgagcatcaccttcctggagcccgcctaccccaccccaggccacgtgcaccggggccagctgcagctggtggagggcaacttccgccacacagagaccaggaacacagtgtcccgggaggagctgatgatggtgctggccagcctggagcagctgcagatccgggccctcttcagccagatcagcagcgctgtgttcctgcggcgggtggccctggaggtggccagccctgctggccagggcgccctggccagcaatgtggagctgtgcctgtgcccagccagctacagaggagacagctgccaggagtgtgcccctggcttctacagagatgtgaagggcctcttcctgggccgctgtgtgccctgccagtgccacggccacagcgaccgctgcctgcccggcagcggcgtgtgtgtggactgccagcacaacacagaaggagcccactgtgagcgctgccaggccggctttgtgagcagcagagatgaccccagcgccccctgtgtgtcctgcccctgccccctgtctgtgcccagcaacaactttgctgagggctgtgtgctgcggggcggccgcacccagtgcctgtgcaagccaggctacgccggggccagctgtgagcgctgtgcccctggcttcttcggcaaccccctggtgctgggcagcagctgccagccctgtgactgcagcggaaatggagaccccaacctgctcttcagtgactgtgaccccctgaccggggcctgccggggctgcctgcggcacaccaccggcccccgctgtgagatctgtgcccctggcttctatggaaatgccctgctgcccggcaactgcacccgctgtgactgcaccccctgtggcacagaggcctgtgacccccacagcggccactgcctgtgcaaggccggcgtgactggaagaagatgtgaccgctgccaggagggccactttggatttgatggctgcggcggctgccggccctgtgcctgtggccctgctgctgagggcagcgagtgccacccccagagcggccagtgccactgccggcccggcaccatgggcccccagtgcagagaatgtgcccctggctactggggcctgcctgagcagggctgccgccgctgccagtgccctgggggccgctgtgacccccacacaggccgctgcaactgccccccaggcctgagcggggagcgctgtgacacctgcagccagcagcaccaggtgcctgtgcctgggggccctgtgggccacagcatccactgtgaggtgtgtgaccactgtgtggtgctgctgctggatgacctggagagagctggggccctgctgcctgccatccacgagcagctgcggggcatcaatgccagctccatggcctgggcccggctgcaccggctgaatgccagcattgctgacctgcagagccagctgcggagccccctgggccccaggcatgaaacagcccagcagctggaggtgctggagcagcagagcaccagcctgggccaggatgcccggcggctgggcggccaggccgtgggcacccgggaccaggccagccagctgctggccggcacagaggccaccctgggccacgccaagaccctgctggccgccatccgggctgtggacaggaccctgtctgagctgatgagccagacaggccacctgggcctggccaatgccagcgcccccagcggggagcagctgctgcggaccctggccgaggtggagcggctgctgtgggagatgagggcccgggacctgggcgccccccaggccgctgctgaggccgagctggccgccgcccagaggctgctggcccgggtgcaggagcagctgagcagcctgtgggaggagaaccaggccctggccacccagacccgggaccggctggcccagcatgaagctggcctgatggacctgcgggaggccctgaacagagctgtggatgccacccgggaggcccaggagctgaacagcaggaaccaggagcggctggaggaggccctgcagaggaagcaggagctgagccgggacaatgccaccctgcaggccaccctgcacgccgcccgggacaccctggcctctgtgttccggctgctgcacagcctggaccaggccaaggaggagctggagcggctggccgccagcctggatggagcccggacccccctgctgcagaggatgcagaccttctccccagctggcagcaagctgcggctggtggaggccgctgaggcccacgcccagcagctgggccagctggccctgaacctgagcagcatcatcctggatgtgaaccaggaccggctgacccagagggccatcgaggccagcaatgcctacagccgcatcctgcaggccgtgcaggccgcagaagatgctgctggccaggccctgcagcaggccgaccacacctgggccaccgtggtgcggcagggcctggtggaccgggcccagcagctgctggccaacagcacagccctggaggaggccatgctgcaggagcagcagaggctgggcctggtgtgggccgccctgcagggcgcccggacccagctgagagatgtgcgggccaagaaggaccagctggaggcccacatccaggccgcccaggccatgctggccatggacacagatgagaccagcaagaagatcgcccacgccaaggctgtggccgctgaggcccaggacacagccaccagggtgcagagccagctgcaggccatgcaggagaatgtggagcgctggcagggccagtatgagggcctgcggggccaggacctgggccaggccgtgctggatgctggccacagcgtgtccaccctggagaagaccctgccccagctgctggccaagctgagcatcctggagaacagaggagtgcacaatgccagcctggccctgagcgccagcatcggccgggtgcgggagctgattgcccaggcccggggagctgccagcaaggtgaaggtgcccatgaagttcaacggccgctctggagtgcagctgcggaccccccgggacctggccgacctggccgcctacacagccctgaagttctacctgcagggccctgagcctgagcccggccagggcacagaggacagatttgtgatgtacatgggcagccggcaggccactggagactacatgggcgtgtccctgcgggacaagaaggtgcactgggtgtaccagctgggggaggccggccctgctgtgctgagcattgatgaggacatcggggagcagtttgctgctgtgtccctggacaggaccctgcagtttggccacatgtctgtgacagtggagcggcagatgatccaggagaccaagggggacacagtggcccctggagctgagggcctgctgaacctgcggccagatgactttgtgttctacgtgggcggctaccccagcaccttcaccccaccacccctgctgcgcttccctggctaccggggctgcatcgagatggacaccctgaatgaggaggtggtgtccctgtacaactttgagaggaccttccagctggacacagctgtggaccggccctgtgcccggagcaagagcactggagacccctggctgacagatggcagctacctggatggcactggatttgcccgcatcagctttgacagccagatcagcaccaccaagagatttgagcaggagctgcggctggtgtcctacagcggcgtgctcttcttcctgaagcagcagagccagttcctgtgcctggccgtgcaggagggcagcctggtgctgctgtatgactttggagctggcctgaagaaggctgtgcccctgcagcccccaccacccctgaccagcgccagcaaggccatccaggtgttcctgctgggcggcagcaggaagagggtgctggtgcgggtggagcgggccaccgtgtacagcgtggagcaggacaatgacctggagctggctgatgcctactacctgggcggcgtgcccccagaccagctgccccccagcctgcggcggctcttccccactggaggctctgtgcggggctgtgtgaagggcatcaaggccctgggcaagtatgtggacctgaagaggctgaacaccactggagtgtctgctggctgcacagctgacctgctggtgggccgggccatgaccttccacggccacggcttcctgcggctggccctgagcaatgtggcccccctgactggaaatgtgtacagcggcttcggcttccacagcgcccaggacagcgccctgctgtactaccgggccagcccagatggcctgtgccaggtgtccctgcagcagggccgggtgtccctgcagctgctgaggacagaggtgaagacccaggccggctttgctgatggagccccccactacgtggccttctacagcaatgccactggagtgtggctgtatgtggatgaccagctgcagcagatgaagccccaccggggccccccacctgagctgcagccccagcctgagggccccccccggctgctgctgggcggcctgcctgagagcggcaccatctacaacttcagcggctgcatcagcaatgtgtttgtgcagaggctgctgggcccccagagggtgtttgacctgcagcagaacctgggctctgtgaatgtgtccacaggctgtgccccagccctgcaggcccagaccccaggcctgggcccccggggcctgcaggccacagccaggaaggccagcagaagaagccggcagcctgcccggcacccagcctgcatgctgcccccccacctgcggaccacccgggacagctaccagtttggaggcagcctgagcagccacctggagtttgtgggcatcctggcccggcacaggaactggcccagcctgtccatgcacgtgctgcccaggagcagccggggcctgctgctcttcaccgcccggctgcggcccggcagccccagcctggccctcttcctgagcaatggccactttgtggcccagatggagggcctgggcacccggctgcgggcccagagccggcagaggagccggcccggccgctggcacaaggtgtctgtgcgctgggagaagaaccgcatcctgctggtgacagatggagcccgggcctggagccaggagggcccccaccggcagcaccagggcgctgagcacccccagccccacaccctgtttgtgggcggcctgcctgccagcagccacagcagcaagctgcctgtgacagtgggcttcagcggctgtgtgaagaggctgcggctgcacggccggcccctgggcgcccccaccaggatggccggcgtgaccccctgcatcctgggccccctggaggccggcctcttcttccctggcagcggaggagtcatcaccctggacctgcccggggccaccctgcctgatgtgggcctggagctggaggtgcggcccctggccgtgacaggcctcatcttccacctgggccaggcccggaccccaccctacctgcagctgcaggtgacagagaagcaggtgctgctgcgggcagatgatggagctggggagttcagcacctctgtgacccggcccagcgtgctgtgtgatggccagtggcaccggctggccgtgatgaagtctggaaatgtgctgcggctggaggtggatgcccagagcaaccacacagtgggccccctgctggccgctgctgctggggccccagcccccctgtacctgggcggcctgcctgagcccatggctgtgcagccctggcccccagcctactgcggctgcatgaggcggctggccgtgaacagaagccctgtggccatgaccaggtctgtggaggtgcacggggctgtgggcgccagcggctgcccagctgcctag

SEQ ID NO: 157399 - DNA, 1503 bp, Artificial Sequence
  derived and/or modified sequence
atggccaagaggctgtgtgccggcagcgccctgtgtgtgcggggcccccggggccctgcccccctgctgctggtgggcctggccctgctgggcgccgcccgggcccgggaggaggccggcggcggcttcagcctgcaccccccctacttcaacctggccgagggcgccagaattgctgccagcgccacctgtggggaggaggccccagcccggggcagcccccggcccacagaggacctgtactgcaagctggtgggcggccctgtggccggcggggaccccaaccagaccatccggggccagtactgtgacatctgcacagctgccaacagcaacaaggcccacccagccagcaatgccattgatggaacagagcgctggtggcagagcccccccctgagccggggcctggagtacaatgaggtgaatgtgaccctggacctgggccaggtgttccacgtggcctacgtgctgatcaagtttgccaacagccccaggccagacctgtgggtgctggagaggtccatggactttggccgcacctaccagccctggcagttctttgccagcagcaagagggactgcctggagagatttggcccccagaccctggagcgcatcaccagagatgatgctgccatctgcaccacagagtacagccgcatcgtgcccctggagaatggagagatcgtggtgtccctggtgaatggccggcctggggccatgaacttctcctacagccccctgctgcgggagttcaccaaggccaccaacgtgcggctgcgcttcctgcggaccaacaccctgctgggccacctgatgggcaaggccctgcgggaccccaccgtgacccggcgctactactacagcatcaaggacatcagcatcggcggccgctgtgtgtgccacggccacgcagatgcctgtgatgccaaggaccccacagaccccttccggctgcagtgcacctgccagcacaacacctgtggcggcacctgtgaccgctgctgccccggcttcaaccagcagccctggaagccagccacagccaacagcgccaatgaatgccagagctgcaactgctacggccacgccacagactgctactatgaccctgaggtggacagaagaagagccagccagagcctggatggcacctaccagggcggcggcgtgtgcatcgactgccagcaccacaccactggagtgaactgtgagcgctgcctgcccggcttctaccgcagccccaaccaccccctggacagcccccacgtgtgccgccgctgcaactgtgagagtgacttcacagatggcacctgtgaggacctgaccggccgctgctactgccggcccaacttcagcggggagcgctgtgatgtgtgtgccgagggcttcaccggcttccccagctgctaccccacccccagcagcagcaatgacacccgggagcaggtgctgcctgctggccagatcgtgaccaacaccaagatctcctgggtgtag

SEQ ID NO: 157400 - DNA, 1587 bp, Artificial Sequence
  derived and/or modified sequence
atggccaagaggctgtgtgccggcagcgccctgtgtgtgcggggcccccggggccctgcccccctgctgctggtgggcctggccctgctgggcgccgcccgggcccgggaggaggccggcggcggcttcagcctgcaccccccctacttcaacctggccgagggcgccagaattgctgccagcgccacctgtggggaggaggccccagcccggggcagcccccggcccacagaggacctgtactgcaagctggtgggcggccctgtggccggcggggaccccaaccagaccatccggggccagtactgtgacatctgcacagctgccaacagcaacaaggcccacccagccagcaatgccattgatggaacagagcgctggtggcagagcccccccctgagccggggcctggagtacaatgaggtgaatgtgaccctggacctgggccaggtgttccacgtggcctacgtgctgatcaagtttgccaacagccccaggccagacctgtgggtgctggagaggtccatggactttggccgcacctaccagccctggcagttctttgccagcagcaagagggactgcctggagagatttggcccccagaccctggagcgcatcaccagagatgatgctgccatctgcaccacagagtacagccgcatcgtgcccctggagaatggagagatcgtggtgtccctggtgaatggccggcctggggccatgaacttctcctacagccccctgctgcgggagttcaccaaggccaccaacgtgcggctgcgcttcctgcggaccaacaccctgctgggccacctgatgggcaaggccctgcgggaccccaccgtgacccggcgctactactacagcatcaaggacatcagcatcggcggccgctgtgtgtgccacggccacgcagatgcctgtgatgccaaggaccccacagaccccttccggctgcagtgcacctgccagcacaacacctgtggcggcacctgtgaccgctgctgccccggcttcaaccagcagccctggaagccagccacagccaacagcgccaatgaatgccagagctgcaactgctacggccacgccacagactgctactatgaccctgaggtggacagaagaagagccagccagagcctggatggcacctaccagggcggcggcgtgtgcatcgactgccagcaccacaccactggagtgaactgtgagcgctgcctgcccggcttctaccgcagccccaaccaccccctggacagcccccacgtgtgccgccgctgcaactgtgagagtgacttcacagatggcacctgtgaggacctgaccggccgctgctactgccggcccaacttcagcggggagcgctgtgatgtgtgtgccgagggcttcaccggcttccccagctgctaccccacccccagcagcagcaatgacacccgggagcaggtgctgcctgctggccagatcgtgaatggagtgtccctgtgccggcccggctggagcgctgtggcccggagccggctgaccagcaccagcgcctcctgggtgcaggccatcctgctgccccagagccctgagtag

SEQ ID NO: 157401 - DNA, 11088 bp, Artificial Sequence
  derived and/or modified sequence
atggccaagcggctgtgcgccggcagcgccctgtgcgtgcggggcccccgcggacctgcccccctgctgctggtgggactcgcgcttcttggtgctgcccgcgcccgagaagaggctggcgggggtttctcgttgcaccccccatatttcaacctcgcagagggcgctaggatcgccgccagcgccacctgcggggaagaggcacctgccaggggcagcccacggcctacagaggacctatactgtaagttggtgggaggaccagttgctggcggtgatcctaatcagacaattcgcggtcagtattgcgatatttgcaccgcagccaacagcaataaagcgcatcccgcatccaacgctatcgacgggactgagagatggtggcaaagcccccctcttagtcgcgggctcgagtataacgaagtgaacgtgaccctagatcttggccaggtgttccatgtcgcttacgtcctcatcaaattcgcaaattctcctcggcccgatctgtgggtgctggaacggagcatggactttggcaggacatatcagccctggcaattcttcgccagctccaaaagagactgcctggagaggttcggccctcagaccctggagaggatcacacgagacgatgctgccatttgcaccaccgagtattccaggatcgtcccgttagagaatggcgagattgtggtttctctggtaaatgggagacccggggctatgaatttcagctattctcccctgctgcgcgagtttacaaaagctaccaatgtgcgattgagattcctgcgaacaaacacgttactgggtcacctaatgggaaaagccctgagggatccaacagtcaccagaaggtactactactcgatcaaggacatctcaattggtggccgctgtgtgtgtcatggacatgccgacgcctgtgatgctaaggaccctacagacccctttagacttcagtgtacttgccagcacaacacttgcgggggcacctgtgataggtgttgtcctgggtttaaccaacagccttggaaacccgctacggctaactcagctaacgagtgtcagtcatgtaattgttacggacatgccacggactgctactacgacccagaggtggacaggaggagagcatcccagagcctggacggaacataccagggcggaggagtgtgtattgattgccagcaccacactactggggttaactgtgagagatgcttgcctggattttataggtctccgaatcaccctctcgactcaccacatgtgtgcagacgctgtaactgcgagtctgatttcacagatggaacatgcgaggacctgacaggtaggtgctactgtcggccaaacttttctggcgagcgctgcgacgtttgcgccgaagggttcaccggcttccccagctgctacccaacaccgtcgtcatctaacgacactcgggagcaggtcctccctgcggggcaaatagtgaactgcgattgcagcgccgccggtacgcaggggaacgcatgtagaaaagacccccgagtgggaagatgcctctgcaaacccaattttcaaggaacccattgtgaactttgcgctccaggcttctacgggcccggctgccagccttgccaatgctcttccccaggggtggcagatgaccgctgtgaccctgatacagggcaatgtaggtgccgagtgggctttgagggggcgacctgcgaccgatgtgcacctggatacttccatttccccctgtgtcagttgtgcggatgctcaccagccgggacgttgccagagggatgtgatgaggcaggacgctgtctgtgtcagcccgagtttgccgggccccactgcgatagatgccgaccaggctaccatggcttcccaaattgccaggcttgcacttgcgatccacggggcgctctcgatcagttgtgcggcgccggaggcctgtgccgttgcaggccgggatataccgggaccgcatgccaggagtgcagccctggtttccatggattcccttcctgcgtgccatgtcattgctctgctgaagggtccttacatgccgcatgtgaccctaggagcggacaatgtagttgccggcctagggtgaccggactcaggtgtgatacctgcgtgcccggcgcctacaacttcccctattgtgaggctggaagttgccaccccgcaggattagccccagtagacccggcgctgcccgaagcccaggtgccctgcatgtgtagagctcacgtagaggggcccagttgtgacagatgcaagcccggattttgggggcttagtccctcaaaccccgagggatgtacccgttgttcgtgcgacctacggggtactctggggggtgtggccgagtgccagcccgggacaggccagtgcttttgtaaaccacacgtttgtggtcaggcgtgtgcatcgtgtaaggacggttttttcggtcttgatcaggcagactactttggatgtcggagctgtcgatgtgatattggcggtgcccttgggcagtcatgcgaaccaaggaccggtgtatgtaggtgtcgccctaatacccagggccccacatgctcagagcccgcacgggatcattacttacctgacctccaccacttgcgcttagagcttgaggaagctgcgacaccagaagggcacgccgtgcgattcgggttcaaccccctagagttcgaaaatttcagttggcgaggctacgcacaaatggctcccgttcagccacgaatcgtggccaggctgaatcttactagccccgatctgttctggctggttttcaggtatgttaacaggggagccatgtccgtgtccggtcgagtctccgtaagggaggaaggacggagtgctacctgcgctaactgcaccgcccaaagtcagccagtagcgttcccccctagtactgagccagcatttatcacagtgccacagagaggtttcggggagccgttcgtgctgaatcccggcacttgggccctgcgggtggaggctgaaggcgtcctgctggattatgtcgtgctccttcccagcgcgtactatgaggcagccctactccagctgagggtgaccgaagcttgcacgtacaggccatctgctcagcaatctggggataactgtctactgtacactcaccttccactggatggctttccctctgcagcagggctggaggccctttgccggcaagataacagcttaccaaggccttgtccaaccgagcagctgagcccaagtcacccaccattgataacctgcaccgggtccgacgttgacgtgcagctccaggtggctgtcccccaacccggaaggtacgccctggtggttgagtacgccaacgaagacgctaggcaggaggttggcgtggcggtgcatactccccaacgggccccgcagcaggggctgctttccctccacccatgcctgtattccacgctgtgtaggggtactgccagggacactcaagatcaccttgcagttttccatctggactcagaggcaagcgtccgcctcaccgccgagcaggctcgattctttctgcatggagtcacgcttgtgcctattgaggaattcagcccagagtttgtggagccgagggtgagctgtatctcaagccacggcgcttttgggcccaactctgccgcatgtctgccgagccgattccccaagcctccacagcctattattttaagggattgtcaggtgattccacttcctccaggactgccgctgacgcacgctcaggacctcactcctgcaatgtccccagccggtcccagacctagacctcctactgccgtcgaccctgacgccgaaccgacgctcttgcgggaacctcaggccacagtggtgtttaccacccacgtgcctactctgggaagatatgccttcctgttgcatggttaccaacctgctcaccctacctttccagtggaggtgttgatcaatgccggcagggtgtggcaaggccacgctaatgcaagtttctgtccacacggatacggttgtcgcacattagtggtctgcgaagggcaggccctcctagacgtgacacacagtgaactgacggttaccgtgagagtgcctaaggggcggtggctctggctggattacgtccttgtcgtgcccgagaacgtgtattctttcgggtatttgagagaggagccactcgacaagtcttatgatttcatttcccactgtgccgcccagggataccatatatcgcccagttcctcttcactgttttgcaggaatgcagcagctagcttgtcattgttctacaacaatggagctaggccatgcggctgccatgaggtgggtgcaaccgggccaacttgcgagccctttggagggcaatgtccatgtcatgcccacgtcattggcagagactgtagccggtgtgctacaggctactggggattcccaaactgtcgaccttgtgactgtggtgctcgactctgcgatgaactcacaggtcagtgtatatgtccacctcggacaatcccacccgattgtctgctctgccagccccaaacttttgggtgccatccgttggtagggtgcgaggagtgcaattgctctgggcctggaatccaggaacttaccgaccccacttgtgataccgactctggacagtgcaagtgcagacctaatgtgacagggagaaggtgtgatacatgcagtcctgggttccatggatacccccggtgtcgaccttgtgattgtcatgaggcagggaccgcccctggcgtgtgcgatcctttaacggggcaatgttattgcaaagagaatgtgcagggtcctaaatgcgaccaatgctccctgggtacattctcgctggacgcggccaaccctaaaggctgtactagatgcttttgttttggagcaacagagcgttgcaggtcaagtagctatacccggcaagagtttgtggacatggagggctgggtcctcctttcgaccgaccgtcaagtagtgcctcacgagcggcaacccggcactgaaatgctcagggccgaccttcgacacgtgcccgaggctgtcccagaagcttttcctgaactgtattggcaagcccccccctcttacctcggagaccgggttagctcatacggtgggactctacgctatgaactacactccgagacacagaggggcgacgtctttgtcccaatggagtcgcgcccagacgttgtactgcagggaaaccagatgagcattacctttttggaaccagcttacccaacacctggacacgtccatcgcggccagcttcagcttgtcgaggggaacttccggcacaccgagacgagaaacaccgtgagtcgtgaggagctgatgatggtgcttgcatccttggaacagctgcaaatcagagcccttttcagccagatatcctccgcagtgttcttgaggagagtggctttggaggtggcttcacctgctggccaaggagcactggcctccaacgtggagctgtgcctctgcccagctagctacagaggcgattcttgccaggagtgcgcccccgggttttacagagacgtgaaaggtctgttcttaggaagatgtgtcccatgtcagtgccatggtcactccgatcgatgccttccagggagcggggtttgcgttgactgccagcacaacaccgagggcgcccactgtgaacggtgtcaggccgggttcgtgtcttcgagagacgaccccagcgcaccatgcgtatcttgtccttgtcccctctccgtaccctccaataactttgccgaagggtgcgtgctcagaggcggccgcacccagtgtctgtgtaagcctggttacgccggcgcaagctgcgagagatgtgcaccaggattctttgggaatccgcttgttttaggaagttcttgccagccttgtgattgttcggggaatggcgatcctaacctgctgttctctgactgcgatcccctgacaggcgcatgccgagggtgtctgagacatacaacggggccccggtgcgagatctgtgcaccgggcttttatggaaacgccctcctcccagggaattgtaccagatgcgattgtactccctgtggaacggaagcgtgtgaccctcatagcggacactgcctttgtaaagctggagtcaccgggcggagatgtgataggtgtcaggaaggccatttcgggttcgacggatgtggcggctgtcggccctgtgcttgtggacctgctgctgaaggctccgagtgccacccacaatccggtcaatgtcactgccggcccggtaccatgggaccacagtgtcgtgaatgtgccccaggttattgggggttgcccgagcagggatgccgaagatgccaatgcccagggggccggtgtgacccccataccggaagatgcaactgcccccctgggctaagcggtgagcgctgtgatacatgtagtcagcagcaccaggtccccgttccaggtggccccgtgggccactctattcactgtgaagtgtgcgatcattgtgtggttctacttttggatgatctggagcgcgctggcgccctgctcccggcaatacacgaacagctcaggggcatcaatgcctcttctatggcatgggctcggctgcatagactgaatgccagcatcgccgacctgcagtctcagctccgatcacccctagggcctagacacgagaccgcacagcagctggaagttttagagcaacaatcaactagcctgggccaggacgcacgtaggctaggcggacaggctgttgggacaagagaccaggcaagccagctgctggcgggaaccgaagccaccctgggccacgcaaagactctcctggcagcaattcgggccgtggatagaaccctctccgagttgatgagccagacgggccacctcggcttggcaaatgccagcgctcctagcggcgaacagcttctgcgaacattggccgaagtcgagcgcctgctgtgggaaatgcgggctcgggatcttggggctcctcaggccgctgccgaagccgaacttgctgccgcacagcgcctcttggcacgcgttcaggaacagctgtctagcttgtgggaagaaaatcaggctcttgctacccaaactcgggacagactcgctcagcacgaggccggtctgatggatttgcgtgaagccctcaacagggctgtcgacgccacgcgggaggcacaggagctaaactcaagaaatcaagaacgcctggaggaggctctgcagagaaaacaagagctcagccgggacaacgcaacccttcaggcaacactccatgctgcacgcgacacacttgcaagcgtatttaggctgctgcacagtttagatcaggctaaggaggagctggagcggctggcggcgtccctggatggggcacggacccctctgctgcaaaggatgcagacattctcccccgccggatccaaactgcgccttgtggaagcggcagaagcccatgcccagcaactcggccagctggctcttaacctcagctctattatccttgacgtgaatcaagaccgccttacacagcgcgccattgaggctagcaatgcttattcccgaattttgcaagccgtacaagccgcagaggatgccgctggccaggctctgcaacaggccgatcacacctgggccacagtggttaggcaggggctggtggatagagcacagcagctcctggcaaattctacagcgctggaggaggcgatgctgcaggagcaacaaaggctgggtctcgtgtgggcagctcttcaaggcgcccggacacagctgcgagacgtgcgcgcgaagaaggaccagcttgaggctcacatccaggcagcacaggccatgctcgcaatggatacggacgaaacctccaaaaaaattgcccacgccaaagccgtggcagcagaggcccaggacacagccacacgtgtccagagccagctgcaggctatgcaggagaatgtggagcggtggcagggccagtacgaagggttaaggggccaggatctggggcaggccgtcctcgatgcagggcactctgtctctactctggagaagacacttccgcaactgctcgcaaagctttccatcctggagaaccggggagtacacaatgcaagtttggccctgtcagcaagtatcgggagggtgagggaattgatcgctcaggcacgtggggcagcaagtaaggtgaaagtgccaatgaagttcaatggtagatccggcgtgcagttacggacgcctcgggatttagccgacttggccgcgtataccgccttgaagttttacctgcagggcccagaaccagagcctggccagggaaccgaagaccgttttgttatgtatatgggctctagacaggcaacaggtgattacatgggcgttagtcttagagataagaaagtccactgggtttaccaactcggggaggcagggcctgccgtcctctcaattgatgaggatatcggggaacaattcgccgcggtgagtttagacagaacactccagtttggacatatgtccgtgactgtggagcgccaaatgatccaggagactaagggcgatacagtggccccaggggcagagggactgctgaacctcaggcccgatgacttcgtgttctacgtcggcggctaccccagtaccttcactccaccaccacttttgaggtttccgggctacaggggctgcatcgaaatggatacactcaatgaggaagtggtctctctgtacaacttcgaacggacatttcagctggacacagctgtcgataggccctgcgcgaggtcaaaatcaaccggggatccctggcttaccgatggttcttacctagatggcaccggtttcgcccgaataagtttcgattctcagatcagcactactaagaggttcgaacaggagctgcggctggtctcctactccggcgtgctcttttttctgaagcagcaatcccagttcctgtgcctggccgtgcaggagggatccttagttctgctatacgatttcggggcaggactgaaaaaggccgttcccctgcaacccccgccacctctgacctccgcctccaaggcaattcaggtcttcctgttggggggcagcaggaaacgcgtgttagtgcgggtagaacgagcaactgtgtactccgtggagcaggataacgaccttgaactagcggatgcctactaccttggcggggtccctccggatcagctcccgccgtcactgaggcgcttgtttcccactggggggagtgtgcgggggtgtgtaaagggcattaaggctctgggcaaatatgtcgaccttaagagactgaatacaacaggcgtttccgctgggtgtaccgccgatctgttggtgggcagggccatgacattccatggtcatgggttcttgagactggcattatcgaacgttgctccactcactggcaatgtctattctggttttggtttccattctgcgcaagacagtgcgctcctgtactaccgagcctctcccgatggactgtgccaagttagtcttcaacagggccgcgtttcactccagctcctcaggactgaggtgaaaacccaagctggattcgcagatggtgccccccactatgtagctttctattcaaacgccactggagtttggctgtacgtcgatgaccagctgcagcaaatgaagcctcatcgagggccacccccggagttgcaaccacagcccgaaggtccccctaggttgttactgggaggtttgccagagtcaggcacaatctataacttttcaggatgcataagcaatgtcttcgttcaacgcctcctggggccccagcgcgtgttcgatcttcagcagaatctgggctctgtaaatgttagcaccgggtgcgcccccgccctacaagctcagactcctggcttgggcccacggggtctacaggctaccgcaaggaaggctagtagacgttctagacagcccgctagacacccagcgtgcatgctaccgccacacctgcggactacacgcgattcctatcaattcggcggaagtctaagtagccacctggaatttgtaggcattctggctcggcacagaaattggccatctttaagcatgcacgtccttccgcggtcttctcgcggtctactcctgttcactgctcggctgagacccggcagcccctcacttgctctgttcctgtccaacgggcatttcgtggctcagatggagggacttggtactcgcctgcgtgcccagagccggcagaggagcaggcccggccgctggcacaaagtaagcgtgagatgggagaagaaccgcatactgctggtgacggacggggctcgcgcgtggtctcaggagggacctcatcgccagcaccagggggccgagcacccgcagccccacacattatttgtaggcggattgcccgcaagctcgcattctagcaaactaccggtaaccgttggtttctccgggtgcgtcaaaaggcttaggctgcatgggcgcccattaggggccccaactcggatggccggggtgacaccatgtatcttgggacccttggaagcaggtctgttctttcctggctcagggggcgtcatcaccttggatctgccaggtgcaactcttccagacgtcggtctcgaacttgaggtgcgccccctcgccgtgaccggtctgatatttcatctcggtcaggcacgcacacccccgtacctgcagctgcaggtgaccgaaaagcaggtactgttgagagctgatgacggagcaggcgagtttagcacgtctgttacgagacccagtgtgctttgtgacggacagtggcaccgattagccgttatgaaaagtggcaacgtcctgcgccttgaggtggacgcacagtctaaccacacagtcggacccctgctagccgcggcggccggagccccggcaccattgtacctgggcggcctcccagagcccatggctgtgcagccatggccacccgcttactgtgggtgcatgaggcgccttgccgtaaatcggtcacctgtggccatgactcgatccgttgaggtgcacggcgcagtgggcgcctctgggtgcccagcagcatag

SEQ ID NO: 157402 - DNA, 1503 bp, Artificial Sequence
  derived and/or modified sequence
atggccaagcggctgtgcgccggcagcgccctgtgcgtgcggggccctcggggtcccgcaccactgttgttggtaggcctcgcgctgctgggggctgcaagggctcgagaggaggctggagggggctttagcctgcacccaccttatttcaaccttgccgagggcgcacgcatcgccgctagcgccacatgcggggaggaagcacctgcacgggggagtccccgacctaccgaggacctttattgcaagctggttggggggccggttgctggtggcgatcctaaccagacaatcagaggtcagtattgtgatatatgcacagccgccaattccaacaaagctcacccagcgtctaacgcaattgacgggaccgaaaggtggtggcagagccctccactgagtcgggggctggagtataatgaggtgaatgtcacattggacctcggccaagttttccatgttgcatacgtgctgatcaaatttgctaactcgccacgtcccgacctatgggtactggagcgctctatggactttgggagaacgtatcagccatggcaattctttgcgtcatcgaaacgggactgtctcgagcgtttcggtccgcagacactcgaaagaatcacgagagacgatgctgcaatttgcaccactgagtacagtcgcatcgtgccactcgagaacggggaaatcgtcgtcagcttggtcaacggtagacctggcgctatgaatttttcttattccccgctgctgcgggaattcacaaaagccacaaatgtgcggctccgcttcttgcggactaacactctcctaggccatttgatgggtaaggctcttagggacccgacagtaaccaggagatactactacagtatcaaggacatctctattggtggaagatgcgtttgtcatggccacgctgatgcctgcgacgcaaaggaccctaccgacccattcaggctgcaatgcacatgtcaacataacacatgcggaggaacctgtgacaggtgctgtccgggatttaatcaacagccttggaagcccgccactgccaactctgccaacgagtgtcagtcttgcaactgctacggtcatgctactgattgctactacgacccagaggttgaccggaggagagcaagtcagagtctggacggcacatatcaaggaggtggtgtgtgtatcgactgccagcaccacacaactggagtcaattgtgaacggtgtctgcccggattctatcggtcgcctaatcacccactcgacagtccgcatgtgtgtaggaggtgcaattgcgagtctgatttcaccgatggcacctgcgaggatctgacaggcaggtgttactgtaggcccaacttcagtggagagcggtgcgacgtttgcgctgagggctttacaggattcccttcctgttacccgacgcctagctcatccaacgacacgagagagcaagtgctgcccgcgggccagattgtgaccaacaccaagatctcctgggtctag

SEQ ID NO: 157403 - DNA, 1587 bp, Artificial Sequence
  derived and/or modified sequence
atggccaagcggctgtgcgccggcagcgccctgtgcgtgcggggccccagaggccctgcccccctgttgctggtggggctcgccctcctgggagccgcccgggcccgcgaagaagccggcgggggcttcagcctccacccaccttactttaacttagctgagggagctcgtatagcagcgtccgccacctgcggcgaagaagcccccgccaggggctccccccggcctactgaagatctttactgtaagctggtgggtgggccagtcgctggcggggatcccaatcaaacaatccgagggcagtactgcgacatatgcactgcggctaattccaataaggcacacccagcatccaatgctatcgatggcacagaaagatggtggcaaagccctcccctgtcaagaggacttgagtacaatgaagtgaacgttacactggatctgggccaggtgtttcatgtagcttatgttcttatcaagttcgctaactctccacgtcccgatttgtgggtgctggaacggtctatggactttggaaggacttatcagccgtggcagttcttcgcatcctcgaagcgggactgcctagaaaggttcgggccacagacgttggagcggatcacacgtgacgacgccgccatctgcactacggagtattctcgaattgtcccactcgaaaacggagaaatagtggtgtctctggtaaatggcagacctggcgcaatgaacttctcctactctcctctgcttcgggagtttaccaaagctacaaatgttcgactgcgctttctccgaactaataccctgcttggccatctgatggggaaggcgctgagggatcccaccgtcaccagacggtattactactctataaaggatataagtatcggcgggcgctgtgtgtgccacgggcacgctgatgcgtgcgacgccaaggatcccacagatccttttcgcctgcagtgtacctgtcagcataacacgtgtggagggacgtgcgaccgatgttgccctggatttaaccaacagccctggaagcccgccactgccaactcagcaaacgagtgtcagtcttgcaactgctacggtcacgcgaccgactgctactacgatccagaggtggatcgcaggcgagcttctcagagtctggacggaacctaccagggtggaggagtgtgtatcgattgtcagcatcacacaacaggcgtgaattgtgaaaggtgtctcccagggttttacaggagccccaaccaccctctggattctccacatgtgtgcagaagatgcaattgtgaaagtgatttcactgatggcacctgtgaggacttgactggtagatgctactgtcggcctaacttcagtggtgagcgttgcgatgtttgtgctgagggattcaccggctttcctagttgttacccgacaccttcgtcaagtaatgatacccgcgaacaggttctgcctgcaggacaaatagtgaatggcgtgtcgttatgtcgtccagggtggtctgccgttgcccgttcacgcctgacttcaacaagcgcctcctgggttcaagctatactcctcccacagagtccagagtag

SEQ ID NO: 157404 - DNA, 11088 bp, Artificial Sequence
  derived and/or modified sequence
atggcaaaacgattatgcgccggaagcgccttgtgcgtgcgagggccacggggtccggctccactcctcctggttggcctcgctttgcttggcgctgcccgagccagagaggaggcaggcggagggttctccttacatcccccatactttaatcttgctgaaggtgccagaatagcagcatcagcgacatgcggggaggaggcgccagcccgtggatcccctaggcctacggaagacctctattgtaaattagtcggagggccagtggcagggggagaccccaatcagactattcggggacaatactgcgacatctgtactgcagcaaattctaataaggcacatcctgcttcaaacgccatcgacgggaccgaacgatggtggcagtcaccgccactgtcacggggtctggaatacaacgaggtgaacgtgacacttgacttaggacaggtgtttcacgtggcctacgtccttattaaatttgctaatagcccgaggcctgacctatgggtgctggagagatctatggactttggacgcacttatcaaccatggcaattttttgcgtccagcaagagagattgtctcgagaggtttggtcctcagacacttgagcgcataactagagatgacgcagccatctgcaccactgaatacagtagaatcgtcccactcgaaaatggagaaatagttgtgagcctggttaatggacggcctggcgcaatgaattttagctacagcccgctgctacgagagtttacaaaagcaacaaatgtcaggctgcgtttcttgagaaccaataccttgctgggtcatctgatgggcaaagctcttcgtgaccctactgtaactagacgctactattatagcataaaagacatctccatcggaggcagatgcgtctgccatggtcatgcggacgcctgtgatgctaaggacccgacagaccctttcagactgcaatgtacctgccaacacaatacgtgcgggggaacatgcgatagatgctgccctggcttcaaccaacaaccatggaaaccagccactgccaattctgctaatgaatgtcagtcctgtaactgttacggacatgcaactgattgttactatgaccccgaggtggataggcgacgcgcatcccagagtctggacggtacgtaccaagggggtggcgtgtgtatagactgtcaacaccataccactggcgtgaattgcgagaggtgcctccctggcttttataggagcccaaatcatcctcttgactcacctcacgtctgtagacggtgcaattgcgagtcagactttacagacgggacctgcgaggatctcaccggaagatgctactgtcgtccgaatttcagtggcgaaaggtgcgacgtttgcgcggaaggtttcactgggtttcctagttgctatccaaccccttcatcatccaacgacactcgggaacaggttttacccgcaggacaaatagtgaactgcgattgctccgctgcgggtacccaaggcaacgcctgccggaaagatccccgtgtgggcagatgcctgtgtaaaccgaatttccagggcacccattgcgaattgtgtgcgcctgggttctatggccctggctgtcagccatgtcaatgtagctctcctggtgttgctgatgacagatgtgaccccgacacaggtcaatgcaggtgccgtgtcggttttgaaggagccacatgcgaccgttgtgctccgggatatttccatttccccctttgtcaactgtgtggatgttcacctgccggaactcttccagagggatgtgatgaagctggtcgatgtctgtgccagccagagttcgctggaccgcactgcgatcggtgtagacccggataccacgggttcccaaattgtcaggcctgcacctgtgaccctaggggagctcttgaccagctgtgcggcgctgggggactctgcaggtgccgcccaggatacactggaactgcctgtcaggagtgcagtcccggttttcatgggtttccctcttgtgtgccctgtcactgtagcgcagaaggttctctgcacgcagcttgtgatccacgatctggacagtgttcttgtagaccacgggtgaccggtcttaggtgtgacacatgcgtgcccggagcgtacaacttcccatactgcgaggccggttcctgtcaccccgcaggattggcccctgttgacccggcactgccagaggcccaagtcccatgcatgtgtcgggctcacgtggagggcccttcctgtgaccgctgcaagcccggattttgggggctctctccctctaatccggaagggtgcacacgttgctcctgcgacctacgcggaacacttggcggtgtggccgagtgccagcctgggaccgggcagtgcttctgcaaaccccatgtgtgcggacaggcgtgtgcatcgtgtaaggacggtttcttcgggctcgatcaggccgattacttcgggtgtaggagctgtcgctgtgacattggaggggctctgggacaatcttgcgagccaagaaccggcgtatgcaggtgtcgccctaacactcagggcccaacctgctccgaacccgcaagagaccattacctgcccgacctgcaccacttaagactagagctcgaggaagcagctaccccggagggccacgccgttaggtttgggttcaaccccttagaatttgagaacttcagctggcggggatacgcccagatggctccggtacagcctaggatcgtagccaggctcaacctgacttcccccgatttgttttggctggtgttccggtacgtgaatcgcggagccatgtccgtgagtgggcgagtgagtgttagggaagaggggagatcggctacctgtgctaactgcacagctcagtctcagcccgtggcttttccccctagtacggaacccgctttcatcacggtaccccaaagggggttcggcgagccttttgtgttgaatccgggtacatgggctctgcgcgtggaggctgagggcgtcctccttgactacgttgtgttgcttccgtccgcgtattacgaggctgcacttctccagcttcgagtgactgaagcctgcacctacaggccaagcgcccaacagagtggggataactgcctcttatatactcacctgcctcttgatggtttccccagtgccgcaggtctggaagccctctgtaggcaggacaattcactgccccgtccatgccccacagaacaactcagcccttcacatcccccactgatcacatgtacaggcagcgatgtcgatgtgcaactccaggtcgccgtgccccaacccggacgatatgctttagtcgttgagtacgccaatgaagacgcaagacaggaagttggcgtggctgtacacacgccacagagggctccacagcaaggactcctttccctgcatccctgcctgtattcaacactctgtcgcggtaccgcgagggatacacaggaccacttggctgtgtttcatttggatagcgaagcctcagtgagattaacagctgaacaggcccgtttctttctccacggcgttaccttggttcccatcgaggaattttcacctgagttcgtggaacctagagtctcctgtatttctagccacggcgcttttggacctaacagtgcagcatgtctgcctagccgcttccccaagcctcctcagcctataattcttcgggattgccaggtgattcccctgcctcctggactcccactaactcatgcccaagatctcacccccgcaatgtcacccgctggaccacgcccacgcccacccactgctgtagacccagacgccgagcctacacttctacgcgagccacaggctacagttgtttttacaacccacgtgccaacgttgggacgttacgcttttctgctgcatggataccagccagcccatccgacttttccagtggaggtcctgatcaacgccggacgcgtgtggcaaggtcacgccaacgcttccttctgtccacatggttacggctgcagaactttggtggtttgtgagggacaggctctgcttgacgtgactcattccgaactgacagtgacagtcagggtccctaaaggaagatggctctggctcgattacgtcttagtggtccccgagaatgtgtactctttcggctatctcagggaggagcctctcgataagtcctacgacttcatctcgcactgcgccgctcaaggttaccatataagtccatcctccagttcgttgttttgccgcaacgcagctgcctctttatcactattctacaataacggcgcacgaccctgtggttgccacgaggtcggcgctacagggcctacatgcgaaccattcgggggacagtgcccctgtcacgcccatgttataggccgtgactgtagtaggtgtgccacaggatattggggtttcccaaactgccggccttgcgactgcggcgcacgcctgtgtgacgagttgactggtcagtgcatctgtcccccacgtacaatcccaccagactgcctcctgtgccagccccaaaccttcggctgtcaccctctggttggctgtgaagaatgtaactgttccggccctgggattcaggaattaacagaccctacgtgtgatactgactctggacagtgtaaatgtcggccaaatgtgactgggaggagatgcgatacttgttctcctggattccacgggtacccgcgatgtcgcccttgtgactgtcatgaggcaggaacggccccaggagtatgcgacccgctgacgggccagtgctactgcaaggaaaatgtgcagggtccaaaatgtgaccagtgtagcctgggcaccttctcacttgatgccgcaaatccgaaggggtgcacgagatgcttctgtttcggggcaacagaacgctgtcgctcaagctcttatacccgccaggaattcgtggatatggagggatgggttctcctctcaactgacaggcaggtggtgcctcatgagagacagcctggtactgagatgctacgcgctgatctcaggcacgtgcctgaagccgtgccagaggcttttcccgaactctattggcaagctccaccaagctacctcggtgaccgagtgtcatcgtatggaggaacactccggtatgagctgcattccgaaacccagaggggcgacgtgtttgtgcctatggaaagtcggccagacgtggtgctgcagggaaatcagatgtccatcaccttcctcgagcccgcttaccccacaccaggacacgtccatcgcggacaattgcaactcgtggagggaaacttccggcacacggaaactaggaacaccgtgtccagagaggagctaatgatggtgctcgcttccctagagcaactccaaatccgcgcattgttctcacagatctcatctgccgtgttcctcaggagggttgctcttgaagtcgcctcaccagctgggcagggagccctggccagcaatgtggagttatgtctgtgtccagcctcttaccgcggagattcctgccaggagtgcgctccaggcttctacagagatgtgaaaggattgttcctggggaggtgtgtgccttgccagtgccatggacacagcgaccgttgtctgccagggtctggggtgtgtgtggactgtcagcataacacagagggagcccattgtgagagatgtcaagccggttttgtgagctccagagatgatccatccgccccttgcgtctcctgtccttgtccattaagtgtgcctagtaataattttgcagaaggttgtgtactgaggggaggacgcacccagtgtttgtgcaagccagggtatgccggagccagctgcgaacgatgcgcacctggcttttttggaaaccctctggtgctgggaagctcctgtcagccctgcgactgcagcggcaatggcgatcccaacttactgttcagcgattgtgatcccctaacgggcgcttgccgaggatgtctgagacacacgacgggcccacggtgcgaaatctgcgctccgggtttctacggcaatgcgttgctacccggaaattgcacccgttgcgactgcactccatgtggcaccgaggcttgcgatccacatagcggccactgtctgtgcaaggctggtgtcacgggtcggaggtgcgataggtgtcaggaaggtcacttcggtttcgatggttgcggtggatgtcgaccttgcgcttgcggcccagcagccgaagggtccgagtgccacccgcaatcgggccagtgtcactgcaggcctggaactatggggcctcagtgccgcgagtgcgctcctggctactggggcctcccagaacagggatgcagacgatgtcagtgtcccggtgggagatgcgacccccacaccgggcgatgcaactgtccaccaggcctgtctggagaaagatgcgatacttgttctcaacaacatcaggtccctgttcccggtgggcctgttggtcacagcatacattgcgaagtatgtgaccactgtgttgttctgctgttggatgacctcgaaagggctggcgcactgctccccgctattcatgagcaactgcgcggtatcaacgccagctctatggcctgggcccgtctccacaggctcaacgcttccatcgccgacctgcagagccagctccgatctccacttggacctagacatgagaccgcccaacagcttgaggtgctggagcaacaatcaacaagtcttgggcaggatgcccgacgactgggtggtcaggccgtcggtacccgggaccaggcgtcacagctgctcgccggaacagaggctacactggggcatgcaaagacgctgcttgctgccattagagccgtagacaggacactatccgagctgatgagccagaccggccacctcggattggccaatgcttccgctccgtccggggagcaactgcttagaacgcttgcagaagtggagcgcctgctgtgggaaatgagggcccgtgacctcggagctccgcaggcggcagccgaggccgaattggctgcggctcagcgattgctcgcccgagttcaggagcagctatcgagtctgtgggaggaaaaccaagcactcgccactcaaacgcgagaccgcctcgcccaacatgaggccggtttaatggatctcagggaggccctgaatagggccgtggatgcaacaagggaggcacaggaactcaactcgcggaatcaagagcgcttggaagaggccttgcaaagaaagcaggagctgtctcgcgataacgcgacgctgcaggcgacactgcacgccgctagagataccctggccagtgtattccggctactccactctcttgaccaagccaaagaggagttggaaaggttggcggcttcactagatggggcacgcaccccgctactacagaggatgcaaacattcagccccgctggttccaaactgagacttgtggaagctgctgaggcccacgcccagcagctcggacagctcgcgctgaacctgtcatccatcattctggatgtcaaccaggacaggctgacgcagcgcgctatagaggcgtctaacgcatacagtcgaatcctgcaggctgtgcaggccgctgaagatgctgctgggcaggcgctgcagcaggctgaccacacttgggcaaccgttgtccggcaggggctggtggatcgcgcacagcagctgctggctaatagcactgccctggaggaggccatgctgcaagagcaacagaggttaggcttagtctgggccgctctccagggtgcaaggacccagctacgcgacgtacgtgctaagaaggaccagctcgaagctcacatacaggctgcacaagctatgcttgctatggatacagacgaaaccagcaaaaagattgcccacgcaaaggcggtggcagccgaggcacaggatacagcgacaagggtgcaatcacagctgcaggccatgcaggagaatgttgagagatggcaagggcaatatgaaggcctcagaggccaagacctgggccaggctgtgctggatgcaggccatagcgtgagcacactggaaaagactcttcctcaactgctagcaaagctgtccatcttagaaaacaggggtgtccacaacgccagtctggccctgtccgcttccatcggccgtgtgagggagctcatcgcccaggccaggggtgcagccagcaaggtgaaggtacccatgaaattcaatggcaggagcggggtgcaactgaggacaccaagggacttggccgacctggctgcttacaccgcactaaagttctatcttcagggtcctgagcctgagcctggacagggcactgaggaccgatttgtgatgtatatgggctcacgccaggctacaggggactacatgggagtgagcttgcgggacaagaaagtgcattgggtgtatcagctcggagaggctggccctgctgtgttgagcattgacgaggacatcggtgaacagtttgcggcagtgagccttgatcgcacgctccagtttggtcatatgtccgttaccgtcgagagacagatgatacaggagacgaagggcgacacagtggcccctggagcagaagggctgttaaaccttaggcccgacgattttgtattctatgtgggtggatatcccagcacttttacccctcctcccttgcttcgtttcccgggttacaggggctgtatcgagatggatacactgaatgaagaagtggtctccctgtataactttgagaggacctttcagctggacacagccgtcgaccgaccatgtgctcgctctaagagcactggagatccctggctgaccgatggcagctatttagatgggactggctttgccaggatttccttcgactcccagatttcaacaaccaaaagatttgaacaagagctgaggctggtttcatacagtggagtactgttttttctgaaacagcagagccaattcctgtgtctggcagtgcaggagggctctttagtccttctgtacgactttggagccggactgaagaaggccgtcccacttcagcctcctcccccactgacctcagccagcaaggctatacaggttttcttattagggggtagtaggaagagggtgctggtcagagtagagcgagcaacagtttactcggtcgaacaggacaacgatcttgaactcgcggacgcctattatctgggaggagtgccccctgaccagctacccccttctctgcgccgtctcttccccaccggaggatctgtccggggatgcgttaaaggtataaaggcgctggggaaatatgttgacctgaaacgcctcaatactacaggagtgtccgccggatgtaccgcagacctcctggttggcagagctatgacctttcacggacatggatttttgcgcctggcactgtccaatgtggcacctctgaccggtaacgtgtattcaggctttggatttcattctgcacaggatagtgccttactctactatagggcttccccagatgggctgtgtcaggtgagccttcagcagggtcgggtgtcactgcagctgctgcgtacggaggttaagacacaagccggtttcgcagacggggcacctcactacgttgccttctattctaacgcaaccggggtgtggttgtacgtggatgaccagctccagcagatgaaacctcaccgaggaccacctcccgaacttcagcctcagcccgaagggccacctcgactgttattaggaggactaccggagtccggaaccatttataatttcagcggatgcatatccaacgtgtttgtgcagaggctgttaggccctcagcgggtcttcgacttgcagcagaacctgggaagtgtcaacgtatccacaggatgcgctcccgctctccaggctcagaccccgggactggggcctcggggactacaggccacggccaggaaagcctcgcgacgctcacgccagcctgccagacaccctgcctgcatgctgccgccacatctgaggacaacccgcgatagctaccagttcggcggaagcttatctagtcacttggagtttgttggaatacttgcacgccatagaaactggcctagcctctccatgcacgtcctgcccagaagctcccgtggccttcttctgtttactgctcggttgagaccgggatctccgagcctggccctgtttctgagcaacggccatttcgtggctcagatggaaggactggggaccaggctgagggcccagtctagacaacgatcgcgccctgggcgttggcacaaagtgtccgttagatgggagaagaatagaatcctgctggtgacagatggggcacgagcttggagccaggaaggacctcaccgtcagcatcaaggcgctgaacaccctcagccacacacattgtttgttggtgggctgcctgcttcttcccacagtagcaaactcccagtcaccgttggattttccggttgtgtcaaacgtctgagactgcatgggaggcctctgggagcacctacaaggatggcaggcgttacaccttgcatcctggggccactggaagcagggttgttcttcccaggcagcggcggagtgattacgctggacctgcccggagccactctgcccgacgtggggctagagctcgaagttcgcccacttgctgtgaccgggcttatcttccatctcggccaagcacgaacccccccatacctgcagctccaagtcacggagaagcaggtgctgctccgcgctgacgatggggctggagaattctcaaccagtgtgaccagaccttccgtcttatgtgacggccagtggcatcgactagctgttatgaagagcggcaacgtcttacgactggaggtcgatgctcagtctaatcacaccgttggccctctgctcgcggcagcagccggagccccagctcctctgtacctaggcggactgcccgagcccatggcagtgcagccatggcctcccgcatactgtggctgcatgcgcaggctggccgtcaaccgatctcctgtcgcaatgaccagaagtgtagaggtacatggcgcagtgggggcttcaggctgccccgcagcttag

SEQ ID NO: 157405 - DNA, 1503 bp, Artificial Sequence
  derived and/or modified sequence
atggcaaagaggttatgtgcaggctccgccctctgcgttcgcggaccccgaggtcctgcgccactgctcttagtggggttggccctgctgggcgctgcacgcgcacgagaggaggccggtggaggcttcagtttacaccccccatattttaacctggccgaaggcgcaaggattgcagccagcgccacctgcggggaagaagctccagccagaggcagcccacgcccaaccgaagacctgtactgtaagctagtcggagggcctgtagcaggaggagaccccaatcagactatccggggtcaatattgtgatatatgtacagcagcaaacagcaataaagcacatccagcgtcgaacgccattgatggtaccgagaggtggtggcaatcacctcccttatcccggggacttgagtataacgaagtcaatgtgacgctcgatctcgggcaagtgttccatgtggcttacgtcctcattaaatttgccaattcaccaaggccagacctttgggtgctcgagcgcagcatggactttggccgtacttaccagccgtggcagtttttcgcttcctcaaaaagagactgtctggaacgattcggtcctcaaaccctcgagcgtatcactcgggatgatgccgctatttgcaccacggaatattctcgcatcgtacccctggagaatggtgagatcgtggtcagtctcgttaatgggaggccgggagccatgaacttcagttactctcccctcctgcgtgagttcacaaaggccaccaacgttcgcctgagatttctgcgtacaaacactctgctgggccaccttatgggcaaagcactgagagaccccaccgtgactcggagatattattactcgataaaagatattagcatcggtgggcgttgtgtgtgtcatggtcacgctgacgcctgtgacgccaaggaccctaccgatccgttcaggctccagtgcacctgccagcacaatacatgcgggggtacctgcgaccgctgttgccctggctttaaccaacagccatggaagcccgcaacagcaaactcagccaatgaatgtcagtcttgcaattgttacgggcacgctaccgattgctactacgaccccgaggtcgacagaaggcgcgcatcccagagcttggacggcacctaccagggagggggagtctgcattgactgtcagcaccatacgaccggcgtgaattgtgagcgatgccttcccggtttctatagatctccgaatcatcccctggattcaccccacgtgtgccgacgctgtaactgtgaaagtgattttaccgacggcacgtgtgaggatctcactgggagatgctactgtaggcccaacttcagcggcgagcggtgcgacgtatgcgccgaaggcttcaccggttttccgtcatgctaccccaccccctcctcgtcaaatgatacgcgggagcaagttctaccagccggacagattgtcacaaacacaaagatctcatgggtttag

SEQ ID NO: 157406 - DNA, 1587 bp, Artificial Sequence
  derived and/or modified sequence
atggccaagagactctgcgctggatcggccctctgtgttcggggacctcgagggccagctcctctactcctggtcggactagccctgttaggcgcagcacgggcaagagaggaagcagggggtggcttctcactccacccgccatattttaacctggctgaaggtgccagaattgctgcctctgcaacgtgtggtgaagaagcccctgcgagaggatcgccccgacctactgaagacctctattgtaagcttgtgggaggaccagtcgcaggcggagatccaaatcagacaattcgcggtcaatattgtgatatttgcactgctgccaattctaataaagctcacccggcttccaacgccatagacgggaccgaaagatggtggcagagcccccctttgagtaggggtttagagtataacgaagtgaacgtgactcttgacctcggccaggttttccatgtggcctacgtattaattaagttcgccaatagccctcgcccagacctatgggttttagagagatccatggatttcggcagaacataccagccgtggcaatttttcgcttcatcaaaacgcgattgtctggaacggtttggtccccagactctggagcggattacccgcgacgatgctgccatatgcacaacagagtacagcagaatagttcccctagagaacggtgagatcgtggtatctctggttaacggtagacctggagccatgaacttttcttatagtcccttgctcagggagtttactaaggccaccaatgttaggcttcgattccttagaaccaatacgctgctgggccatctgatgggcaaggcgcttcgggacccgaccgtgactaggcggtattattactctatcaaggacattagcatcggtggacggtgtgtatgtcacggacacgccgacgcgtgcgatgctaaggatcccacagacccgttccggttacaatgcacgtgtcaacacaacacatgcggcggaacctgcgaccggtgctgccccggtttcaatcagcagccttggaagcctgctaccgcgaattcggccaacgagtgccagtcctgtaattgttacggtcacgcgactgactgttactacgatccggaggtggacagacggagagcttctcagagcctggacggcacataccaggggggaggcgtgtgtattgactgccagcatcacactacaggcgtcaattgcgagcgctgcctccctggcttttatagaagtccaaatcaccccttagacagcccccacgtttgcagacggtgtaattgcgagagcgattttacggacgggacatgtgaagatctcaccggccgatgttactgtcggccaaattttagtggggagcggtgtgacgtctgtgccgaaggcttcactggcttcccttcctgttaccctaccccaagtagctctaatgatacacgggaacaagtgttgccggcaggccagattgttaacggcgttagcctttgcaggcctggctggtcagctgttgcacgatcccgccttacctccacgtctgccagttgggtgcaggcgattttgctgccgcagtcaccggagtag

SEQ ID NO: 157407 - DNA, 11088 bp, Artificial Sequence
  derived and/or modified sequence
atggccaagagactgtgcgccggcagcgccctgtgcgtgagaggccccagaggccccgcccccctgctgctggtgggcctggccctgctgggcgccgccagagccagagaggaggccggcggcggcttcagcctgcaccccccctacttcaacctggccgagggcgccagaatcgccgccagcgccacctgcggcgaggaggcccccgccagaggcagccccagacccaccgaggacctgtactgcaagctggtgggcggccccgtggccggcggcgaccccaaccagaccatcagaggccagtactgcgacatctgcaccgccgccaacagcaacaaggcccaccccgccagcaacgccatcgacggcaccgagagatggtggcagagcccccccctgagcagaggcctggagtacaacgaggtgaacgtgaccctggacctgggccaggtgttccacgtggcctacgtgctgatcaagttcgccaacagccccagacccgacctgtgggtgctggagagaagcatggacttcggcagaacctaccagccctggcagttcttcgccagcagcaagagagactgcctggagagattcggcccccagaccctggagagaatcaccagagacgacgccgccatctgcaccaccgagtacagcagaatcgtgcccctggagaacggcgagatcgtggtgagcctggtgaacggcagacccggcgccatgaacttcagctacagccccctgctgagagagttcaccaaggccaccaacgtgagactgagattcctgagaaccaacaccctgctgggccacctgatgggcaaggccctgagagaccccaccgtgaccagaagatactactacagcatcaaggacatcagcatcggcggcagatgcgtgtgccacggccacgccgacgcctgcgacgccaaggaccccaccgaccccttcagactgcagtgcacctgccagcacaacacctgcggcggcacctgcgacagatgctgccccggcttcaaccagcagccctggaagcccgccaccgccaacagcgccaacgagtgccagagctgcaactgctacggccacgccaccgactgctactacgaccccgaggtggacagaagaagagccagccagagcctggacggcacctaccagggcggcggcgtgtgcatcgactgccagcaccacaccaccggcgtgaactgcgagagatgcctgcccggcttctacagaagccccaaccaccccctggacagcccccacgtgtgcagaagatgcaactgcgagagcgacttcaccgacggcacctgcgaggacctgaccggcagatgctactgcagacccaacttcagcggcgagagatgcgacgtgtgcgccgagggcttcaccggcttccccagctgctaccccacccccagcagcagcaacgacaccagagagcaggtgctgcccgccggccagatcgtgaactgcgactgcagcgccgccggcacccagggcaacgcctgcagaaaggaccccagagtgggcagatgcctgtgcaagcccaacttccagggcacccactgcgagctgtgcgcccccggcttctacggccccggctgccagccctgccagtgcagcagccccggcgtggccgacgacagatgcgaccccgacaccggccagtgcagatgcagagtgggcttcgagggcgccacctgcgacagatgcgcccccggctacttccacttccccctgtgccagctgtgcggctgcagccccgccggcaccctgcccgagggctgcgacgaggccggcagatgcctgtgccagcccgagttcgccggcccccactgcgacagatgcagacccggctaccacggcttccccaactgccaggcctgcacctgcgaccccagaggcgccctggaccagctgtgcggcgccggcggcctgtgcagatgcagacccggctacaccggcaccgcctgccaggagtgcagccccggcttccacggcttccccagctgcgtgccctgccactgcagcgccgagggcagcctgcacgccgcctgcgaccccagaagcggccagtgcagctgcagacccagagtgaccggcctgagatgcgacacctgcgtgcccggcgcctacaacttcccctactgcgaggccggcagctgccaccccgccggcctggcccccgtggaccccgccctgcccgaggcccaggtgccctgcatgtgcagagcccacgtggagggccccagctgcgacagatgcaagcccggcttctggggcctgagccccagcaaccccgagggctgcaccagatgcagctgcgacctgagaggcaccctgggcggcgtggccgagtgccagcccggcaccggccagtgcttctgcaagccccacgtgtgcggccaggcctgcgccagctgcaaggacggcttcttcggcctggaccaggccgactacttcggctgcagaagctgcagatgcgacatcggcggcgccctgggccagagctgcgagcccagaaccggcgtgtgcagatgcagacccaacacccagggccccacctgcagcgagcccgccagagaccactacctgcccgacctgcaccacctgagactggagctggaggaggccgccacccccgagggccacgccgtgagattcggcttcaaccccctggagttcgagaacttcagctggagaggctacgcccagatggcccccgtgcagcccagaatcgtggccagactgaacctgaccagccccgacctgttctggctggtgttcagatacgtgaacagaggcgccatgagcgtgagcggcagagtgagcgtgagagaggagggcagaagcgccacctgcgccaactgcaccgcccagagccagcccgtggccttcccccccagcaccgagcccgccttcatcaccgtgccccagagaggcttcggcgagcccttcgtgctgaaccccggcacctgggccctgagagtggaggccgagggcgtgctgctggactacgtggtgctgctgcccagcgcctactacgaggccgccctgctgcagctgagagtgaccgaggcctgcacctacagacccagcgcccagcagagcggcgacaactgcctgctgtacacccacctgcccctggacggcttccccagcgccgccggcctggaggccctgtgcagacaggacaacagcctgcccagaccctgccccaccgagcagctgagccccagccacccccccctgatcacctgcaccggcagcgacgtggacgtgcagctgcaggtggccgtgccccagcccggcagatacgccctggtggtggagtacgccaacgaggacgccagacaggaggtgggcgtggccgtgcacaccccccagagagccccccagcagggcctgctgagcctgcacccctgcctgtacagcaccctgtgcagaggcaccgccagagacacccaggaccacctggccgtgttccacctggacagcgaggccagcgtgagactgaccgccgagcaggccagattcttcctgcacggcgtgaccctggtgcccatcgaggagttcagccccgagttcgtggagcccagagtgagctgcatcagcagccacggcgccttcggccccaacagcgccgcctgcctgcccagcagattccccaagcccccccagcccatcatcctgagagactgccaggtgatccccctgccccccggcctgcccctgacccacgcccaggacctgacccccgccatgagccccgccggccccagacccagaccccccaccgccgtggaccccgacgccgagcccaccctgctgagagagccccaggccaccgtggtgttcaccacccacgtgcccaccctgggcagatacgccttcctgctgcacggctaccagcccgcccaccccaccttccccgtggaggtgctgatcaacgccggcagagtgtggcagggccacgccaacgccagcttctgcccccacggctacggctgcagaaccctggtggtgtgcgagggccaggccctgctggacgtgacccacagcgagctgaccgtgaccgtgagagtgcccaagggcagatggctgtggctggactacgtgctggtggtgcccgagaacgtgtacagcttcggctacctgagagaggagcccctggacaagagctacgacttcatcagccactgcgccgcccagggctaccacatcagccccagcagcagcagcctgttctgcagaaacgccgccgccagcctgagcctgttctacaacaacggcgccagaccctgcggctgccacgaggtgggcgccaccggccccacctgcgagcccttcggcggccagtgcccctgccacgcccacgtgatcggcagagactgcagcagatgcgccaccggctactggggcttccccaactgcagaccctgcgactgcggcgccagactgtgcgacgagctgaccggccagtgcatctgcccccccagaaccatcccccccgactgcctgctgtgccagccccagaccttcggctgccaccccctggtgggctgcgaggagtgcaactgcagcggccccggcatccaggagctgaccgaccccacctgcgacaccgacagcggccagtgcaagtgcagacccaacgtgaccggcagaagatgcgacacctgcagccccggcttccacggctaccccagatgcagaccctgcgactgccacgaggccggcaccgcccccggcgtgtgcgaccccctgaccggccagtgctactgcaaggagaacgtgcagggccccaagtgcgaccagtgcagcctgggcaccttcagcctggacgccgccaaccccaagggctgcaccagatgcttctgcttcggcgccaccgagagatgcagaagcagcagctacaccagacaggagttcgtggacatggagggctgggtgctgctgagcaccgacagacaggtggtgccccacgagagacagcccggcaccgagatgctgagagccgacctgagacacgtgcccgaggccgtgcccgaggccttccccgagctgtactggcaggccccccccagctacctgggcgacagagtgagcagctacggcggcaccctgagatacgagctgcacagcgagacccagagaggcgacgtgttcgtgcccatggagagcagacccgacgtggtgctgcagggcaaccagatgagcatcaccttcctggagcccgcctaccccacccccggccacgtgcacagaggccagctgcagctggtggagggcaacttcagacacaccgagaccagaaacaccgtgagcagagaggagctgatgatggtgctggccagcctggagcagctgcagatcagagccctgttcagccagatcagcagcgccgtgttcctgagaagagtggccctggaggtggccagccccgccggccagggcgccctggccagcaacgtggagctgtgcctgtgccccgccagctacagaggcgacagctgccaggagtgcgcccccggcttctacagagacgtgaagggcctgttcctgggcagatgcgtgccctgccagtgccacggccacagcgacagatgcctgcccggcagcggcgtgtgcgtggactgccagcacaacaccgagggcgcccactgcgagagatgccaggccggcttcgtgagcagcagagacgaccccagcgccccctgcgtgagctgcccctgccccctgagcgtgcccagcaacaacttcgccgagggctgcgtgctgagaggcggcagaacccagtgcctgtgcaagcccggctacgccggcgccagctgcgagagatgcgcccccggcttcttcggcaaccccctggtgctgggcagcagctgccagccctgcgactgcagcggcaacggcgaccccaacctgctgttcagcgactgcgaccccctgaccggcgcctgcagaggctgcctgagacacaccaccggccccagatgcgagatctgcgcccccggcttctacggcaacgccctgctgcccggcaactgcaccagatgcgactgcaccccctgcggcaccgaggcctgcgacccccacagcggccactgcctgtgcaaggccggcgtgaccggcagaagatgcgacagatgccaggagggccacttcggcttcgacggctgcggcggctgcagaccctgcgcctgcggccccgccgccgagggcagcgagtgccacccccagagcggccagtgccactgcagacccggcaccatgggcccccagtgcagagagtgcgcccccggctactggggcctgcccgagcagggctgcagaagatgccagtgccccggcggcagatgcgacccccacaccggcagatgcaactgcccccccggcctgagcggcgagagatgcgacacctgcagccagcagcaccaggtgcccgtgcccggcggccccgtgggccacagcatccactgcgaggtgtgcgaccactgcgtggtgctgctgctggacgacctggagagagccggcgccctgctgcccgccatccacgagcagctgagaggcatcaacgccagcagcatggcctgggccagactgcacagactgaacgccagcatcgccgacctgcagagccagctgagaagccccctgggccccagacacgagaccgcccagcagctggaggtgctggagcagcagagcaccagcctgggccaggacgccagaagactgggcggccaggccgtgggcaccagagaccaggccagccagctgctggccggcaccgaggccaccctgggccacgccaagaccctgctggccgccatcagagccgtggacagaaccctgagcgagctgatgagccagaccggccacctgggcctggccaacgccagcgcccccagcggcgagcagctgctgagaaccctggccgaggtggagagactgctgtgggagatgagagccagagacctgggcgccccccaggccgccgccgaggccgagctggccgccgcccagagactgctggccagagtgcaggagcagctgagcagcctgtgggaggagaaccaggccctggccacccagaccagagacagactggcccagcacgaggccggcctgatggacctgagagaggccctgaacagagccgtggacgccaccagagaggcccaggagctgaacagcagaaaccaggagagactggaggaggccctgcagagaaagcaggagctgagcagagacaacgccaccctgcaggccaccctgcacgccgccagagacaccctggccagcgtgttcagactgctgcacagcctggaccaggccaaggaggagctggagagactggccgccagcctggacggcgccagaacccccctgctgcagagaatgcagaccttcagccccgccggcagcaagctgagactggtggaggccgccgaggcccacgcccagcagctgggccagctggccctgaacctgagcagcatcatcctggacgtgaaccaggacagactgacccagagagccatcgaggccagcaacgcctacagcagaatcctgcaggccgtgcaggccgccgaggacgccgccggccaggccctgcagcaggccgaccacacctgggccaccgtggtgagacagggcctggtggacagagcccagcagctgctggccaacagcaccgccctggaggaggccatgctgcaggagcagcagagactgggcctggtgtgggccgccctgcagggcgccagaacccagctgagagacgtgagagccaagaaggaccagctggaggcccacatccaggccgcccaggccatgctggccatggacaccgacgagaccagcaagaagatcgcccacgccaaggccgtggccgccgaggcccaggacaccgccaccagagtgcagagccagctgcaggccatgcaggagaacgtggagagatggcagggccagtacgagggcctgagaggccaggacctgggccaggccgtgctggacgccggccacagcgtgagcaccctggagaagaccctgccccagctgctggccaagctgagcatcctggagaacagaggcgtgcacaacgccagcctggccctgagcgccagcatcggcagagtgagagagctgatcgcccaggccagaggcgccgccagcaaggtgaaggtgcccatgaagttcaacggcagaagcggcgtgcagctgagaacccccagagacctggccgacctggccgcctacaccgccctgaagttctacctgcagggccccgagcccgagcccggccagggcaccgaggacagattcgtgatgtacatgggcagcagacaggccaccggcgactacatgggcgtgagcctgagagacaagaaggtgcactgggtgtaccagctgggcgaggccggccccgccgtgctgagcatcgacgaggacatcggcgagcagttcgccgccgtgagcctggacagaaccctgcagttcggccacatgagcgtgaccgtggagagacagatgatccaggagaccaagggcgacaccgtggcccccggcgccgagggcctgctgaacctgagacccgacgacttcgtgttctacgtgggcggctaccccagcaccttcacccccccccccctgctgagattccccggctacagaggctgcatcgagatggacaccctgaacgaggaggtggtgagcctgtacaacttcgagagaaccttccagctggacaccgccgtggacagaccctgcgccagaagcaagagcaccggcgacccctggctgaccgacggcagctacctggacggcaccggcttcgccagaatcagcttcgacagccagatcagcaccaccaagagattcgagcaggagctgagactggtgagctacagcggcgtgctgttcttcctgaagcagcagagccagttcctgtgcctggccgtgcaggagggcagcctggtgctgctgtacgacttcggcgccggcctgaagaaggccgtgcccctgcagccccccccccccctgaccagcgccagcaaggccatccaggtgttcctgctgggcggcagcagaaagagagtgctggtgagagtggagagagccaccgtgtacagcgtggagcaggacaacgacctggagctggccgacgcctactacctgggcggcgtgccccccgaccagctgccccccagcctgagaagactgttccccaccggcggcagcgtgagaggctgcgtgaagggcatcaaggccctgggcaagtacgtggacctgaagagactgaacaccaccggcgtgagcgccggctgcaccgccgacctgctggtgggcagagccatgaccttccacggccacggcttcctgagactggccctgagcaacgtggcccccctgaccggcaacgtgtacagcggcttcggcttccacagcgcccaggacagcgccctgctgtactacagagccagccccgacggcctgtgccaggtgagcctgcagcagggcagagtgagcctgcagctgctgagaaccgaggtgaagacccaggccggcttcgccgacggcgccccccactacgtggccttctacagcaacgccaccggcgtgtggctgtacgtggacgaccagctgcagcagatgaagccccacagaggccccccccccgagctgcagccccagcccgagggcccccccagactgctgctgggcggcctgcccgagagcggcaccatctacaacttcagcggctgcatcagcaacgtgttcgtgcagagactgctgggcccccagagagtgttcgacctgcagcagaacctgggcagcgtgaacgtgagcaccggctgcgcccccgccctgcaggcccagacccccggcctgggccccagaggcctgcaggccaccgccagaaaggccagcagaagaagcagacagcccgccagacaccccgcctgcatgctgcccccccacctgagaaccaccagagacagctaccagttcggcggcagcctgagcagccacctggagttcgtgggcatcctggccagacacagaaactggcccagcctgagcatgcacgtgctgcccagaagcagcagaggcctgctgctgttcaccgccagactgagacccggcagccccagcctggccctgttcctgagcaacggccacttcgtggcccagatggagggcctgggcaccagactgagagcccagagcagacagagaagcagacccggcagatggcacaaggtgagcgtgagatgggagaagaacagaatcctgctggtgaccgacggcgccagagcctggagccaggagggcccccacagacagcaccagggcgccgagcacccccagccccacaccctgttcgtgggcggcctgcccgccagcagccacagcagcaagctgcccgtgaccgtgggcttcagcggctgcgtgaagagactgagactgcacggcagacccctgggcgcccccaccagaatggccggcgtgaccccctgcatcctgggccccctggaggccggcctgttcttccccggcagcggcggcgtgatcaccctggacctgcccggcgccaccctgcccgacgtgggcctggagctggaggtgagacccctggccgtgaccggcctgatcttccacctgggccaggccagaacccccccctacctgcagctgcaggtgaccgagaagcaggtgctgctgagagccgacgacggcgccggcgagttcagcaccagcgtgaccagacccagcgtgctgtgcgacggccagtggcacagactggccgtgatgaagagcggcaacgtgctgagactggaggtggacgcccagagcaaccacaccgtgggccccctgctggccgccgccgccggcgcccccgcccccctgtacctgggcggcctgcccgagcccatggccgtgcagccctggccccccgcctactgcggctgcatgagaagactggccgtgaacagaagccccgtggccatgaccagaagcgtggaggtgcacggcgccgtgggcgccagcggctgccccgccgcctag

SEQ ID NO: 157408 - DNA, 1503 bp, Artificial Sequence
  derived and/or modified sequence
atggccaagagactgtgcgccggcagcgccctgtgcgtgagaggccccagaggccccgcccccctgctgctggtgggcctggccctgctgggcgccgccagagccagagaggaggccggcggcggcttcagcctgcaccccccctacttcaacctggccgagggcgccagaatcgccgccagcgccacctgcggcgaggaggcccccgccagaggcagccccagacccaccgaggacctgtactgcaagctggtgggcggccccgtggccggcggcgaccccaaccagaccatcagaggccagtactgcgacatctgcaccgccgccaacagcaacaaggcccaccccgccagcaacgccatcgacggcaccgagagatggtggcagagcccccccctgagcagaggcctggagtacaacgaggtgaacgtgaccctggacctgggccaggtgttccacgtggcctacgtgctgatcaagttcgccaacagccccagacccgacctgtgggtgctggagagaagcatggacttcggcagaacctaccagccctggcagttcttcgccagcagcaagagagactgcctggagagattcggcccccagaccctggagagaatcaccagagacgacgccgccatctgcaccaccgagtacagcagaatcgtgcccctggagaacggcgagatcgtggtgagcctggtgaacggcagacccggcgccatgaacttcagctacagccccctgctgagagagttcaccaaggccaccaacgtgagactgagattcctgagaaccaacaccctgctgggccacctgatgggcaaggccctgagagaccccaccgtgaccagaagatactactacagcatcaaggacatcagcatcggcggcagatgcgtgtgccacggccacgccgacgcctgcgacgccaaggaccccaccgaccccttcagactgcagtgcacctgccagcacaacacctgcggcggcacctgcgacagatgctgccccggcttcaaccagcagccctggaagcccgccaccgccaacagcgccaacgagtgccagagctgcaactgctacggccacgccaccgactgctactacgaccccgaggtggacagaagaagagccagccagagcctggacggcacctaccagggcggcggcgtgtgcatcgactgccagcaccacaccaccggcgtgaactgcgagagatgcctgcccggcttctacagaagccccaaccaccccctggacagcccccacgtgtgcagaagatgcaactgcgagagcgacttcaccgacggcacctgcgaggacctgaccggcagatgctactgcagacccaacttcagcggcgagagatgcgacgtgtgcgccgagggcttcaccggcttccccagctgctaccccacccccagcagcagcaacgacaccagagagcaggtgctgcccgccggccagatcgtgaccaacaccaagatcagctgggtgtag

SEQ ID NO: 157409 - DNA, 1587 bp, Artificial Sequence
  derived and/or modified sequence
atggccaagagactgtgcgccggcagcgccctgtgcgtgagaggccccagaggccccgcccccctgctgctggtgggcctggccctgctgggcgccgccagagccagagaggaggccggcggcggcttcagcctgcaccccccctacttcaacctggccgagggcgccagaatcgccgccagcgccacctgcggcgaggaggcccccgccagaggcagccccagacccaccgaggacctgtactgcaagctggtgggcggccccgtggccggcggcgaccccaaccagaccatcagaggccagtactgcgacatctgcaccgccgccaacagcaacaaggcccaccccgccagcaacgccatcgacggcaccgagagatggtggcagagcccccccctgagcagaggcctggagtacaacgaggtgaacgtgaccctggacctgggccaggtgttccacgtggcctacgtgctgatcaagttcgccaacagccccagacccgacctgtgggtgctggagagaagcatggacttcggcagaacctaccagccctggcagttcttcgccagcagcaagagagactgcctggagagattcggcccccagaccctggagagaatcaccagagacgacgccgccatctgcaccaccgagtacagcagaatcgtgcccctggagaacggcgagatcgtggtgagcctggtgaacggcagacccggcgccatgaacttcagctacagccccctgctgagagagttcaccaaggccaccaacgtgagactgagattcctgagaaccaacaccctgctgggccacctgatgggcaaggccctgagagaccccaccgtgaccagaagatactactacagcatcaaggacatcagcatcggcggcagatgcgtgtgccacggccacgccgacgcctgcgacgccaaggaccccaccgaccccttcagactgcagtgcacctgccagcacaacacctgcggcggcacctgcgacagatgctgccccggcttcaaccagcagccctggaagcccgccaccgccaacagcgccaacgagtgccagagctgcaactgctacggccacgccaccgactgctactacgaccccgaggtggacagaagaagagccagccagagcctggacggcacctaccagggcggcggcgtgtgcatcgactgccagcaccacaccaccggcgtgaactgcgagagatgcctgcccggcttctacagaagccccaaccaccccctggacagcccccacgtgtgcagaagatgcaactgcgagagcgacttcaccgacggcacctgcgaggacctgaccggcagatgctactgcagacccaacttcagcggcgagagatgcgacgtgtgcgccgagggcttcaccggcttccccagctgctaccccacccccagcagcagcaacgacaccagagagcaggtgctgcccgccggccagatcgtgaacggcgtgagcctgtgcagacccggctggagcgccgtggccagaagcagactgaccagcaccagcgccagctgggtgcaggccatcctgctgccccagagccccgagtag

SEQ ID NO: 157410 - protein, 417 aa, Artificial Sequence
  derived and/or modified sequence
MAAPGSARRPLLLLLLLLLLGLMHCASAAMFMVKNGNGTACIMANFSAAFSVNYDTKSGPKNMTFDLPSDATVVLNRSSCGKENTSDPSLVIAFGRGHTLTLNFTRNATRYSVQLMSFVYNLSDTHLFPNASSKEIKTVESITDIRADIDKKYRCVSGTQVHMNNVTVTLHDATIQAYLSNSSFSRGETRCEQDRPSPTTAPPAPPSPSPSPVPKSPSVDKYNVSGTNGTCLLASMGLQLNLTYERKDNTTVTRLLNINPNKTSASGSCGAHLVTLELHSEGTTVLLFQFGMNASSSRFFLQGIQLNTILPDARDPAFKAANGSLRALQATVGNSYKCNAEEHVRVTKAFSVNIFKVWVQAFKVEGGQFGSVEECLLDENSMLIPIAVGGALAGLVLIVLIAYLVGRKRSHAGYQTI

SEQ ID NO: 157411 - DNA, 1254 bp, Artificial Sequence
  derived and/or modified sequence
atggccgcacctggaagcgcccgtagacccctcttactcctgctgttgctcctcttgctcgggctgatgcactgtgcctctgccgctatgtttatggtcaagaatggcaacggcaccgcgtgcataatggccaacttctcggccgcgtttagtgtcaattacgatactaaatccgggccgaagaatatgacattcgacctgccttccgacgccaccgtcgtgctcaacagatccagctgcggaaaggagaatacttccgatccaagcctagtcatcgcttttgggcgcggtcatactctcacacttaatttcactaggaacgccactcgatactctgtgcagcttatgtccttcgtttacaacctctccgatacccacctgtttccaaatgcaagtagcaaggagataaagaccgtcgaatcgataacggatattagggccgatattgataaaaagtacaggtgtgttagcggcacccaagtgcacatgaataacgtgaccgtgacactgcacgacgccacaattcaggcatatctgtctaattcaagtttcagccgcggagaaacccgttgcgaacaggatcgaccaagcccaaccactgcccctcccgcacccccatcaccttcaccgtcccccgtgcccaaaagtccgagtgttgacaaatacaacgtcagcggcacaaatggaacatgtctattggccagtatgggactccagctgaatctgacctatgagcggaaagacaataccacagtaacacggcttttgaacatcaatccgaataagacttcagcctcagggtcttgcggcgcgcatctggtgacactggagctgcactccgaggggacaactgttctgctctttcagtttggcatgaacgcatcatcctcacgtttttttcttcagggcatccaactgaacaccatcctacctgacgcgagggatcctgcattcaaggcagcgaacgggtccctgagggccctgcaggccacagtaggtaattcatataaatgcaacgcggaggaacatgtgcgcgttacaaaagcgttcagcgtgaatatattcaaagtctgggtccaggcttttaaggtggaggggggacagttcggaagcgttgaagagtgcctgctcgatgagaacagcatgcttattccgatagctgtgggtggagcactggctggcttagtgctgattgttctgatcgcttacctggtcgggcggaagaggtctcacgcggggtatcagacgatctag

SEQ ID NO: 157412 - DNA, 1254 bp, Artificial Sequence
  derived and/or modified sequence
atggccgcccctggcagcgcccggcggcccctgctgctgctgctgctgctgctgctgctgggcctgatgcactgtgccagcgctgccatgttcatggtgaagaatggaaatggaacagcctgcatcatggccaacttctctgctgccttctctgtgaactatgacaccaagagcggccccaagaacatgacctttgacctgcccagtgatgccaccgtggtgctgaacagaagcagctgtgggaaggagaacaccagtgaccccagcctggtgattgccttcggccggggccacaccctgaccctgaacttcaccagaaatgccacccgctacagcgtgcagctgatgagctttgtgtacaacctgagtgacacccacctgttccccaatgccagcagcaaggagatcaagacagtggagagcatcacagacatccgggctgacatcgacaagaagtaccgctgtgtgtctggcacccaggtgcacatgaacaacgtgacagtgaccctgcatgatgccaccatccaggcctacctgagcaacagcagcttcagcagaggagagacccgctgtgagcaggaccggcccagccccaccacagcccccccagccccacccagccccagccccagccctgtgcccaagagccccagcgtggacaagtacaacgtgtctggcaccaacggcacctgcctgctggcctccatgggcctgcagctgaacctgacctatgaaaggaaggacaacaccaccgtgacccggctgctgaacatcaaccccaacaagaccagcgccagcggcagctgtggggcccacctggtgaccctggagctgcacagcgagggcaccaccgtgctgctcttccagtttggcatgaatgccagcagcagccgcttcttcctgcagggcatccagctgaacaccatcctgcctgatgcccgggaccctgccttcaaggccgccaacggcagcctgcgggccctgcaggccaccgtgggcaacagctacaagtgcaatgctgaggagcacgtgcgggtgaccaaggccttctctgtgaacatcttcaaggtgtgggtgcaggccttcaaggtggagggcggccagtttggatctgtggaggagtgcctgctggatgaaaattccatgctgatccccatcgctgtgggcggggccctggccggcctggtgctgattgtgctgattgcctacctggtgggcaggaagaggagccacgccggctaccagaccatctag

SEQ ID NO: 157413 - DNA, 2699 bp, Artificial Sequence
  derived and/or modified sequence
gtgacaagcgctgccggccgcggtgtcttcttcgtgccggcgtcgcagtggccgggcctcttgcgtctggtaacgccgctgtctctaacgccagcccttggcgcccgcgccccgccaccgcagcgcccggcagtccgcggcccaaccgccgcccgcgcccccgctccccgcaccgtacccggccgcctcgcgccatggcggcccccggcagcgcccggcgacccctgctgctgctactgctgttgctgctgctcggcctcatgcattgtgcgtcagcagcaatgtttatggtgaaaaatggcaacgggaccgcgtgcataatggccaacttctctgctgccttctcagtgaactacgacaccaagagtggccctaagaacatgacctttgacctgccatcagatgccacagtggtgctcaaccgcagctcctgtggaaaagagaacacttctgaccccagtctcgtgattgcttttggaagaggacatacactcactctcaatttcacgagaaatgcaacacgttacagcgtccagctcatgagttttgtttataacttgtcagacacacaccttttccccaatgcgagctccaaagaaatcaagactgtggaatctataactgacatcagggcagatatagataaaaaatacagatgtgttagtggcacccaggtccacatgaacaacgtgaccgtaacgctccatgatgccaccatccaggcgtacctttccaacagcagcttcagccggggagagacacgctgtgaacaagacaggccttccccaaccacagcgccccctgcgccacccagcccctcgccctcacccgtgcccaagagcccctctgtggacaagtacaacgtgagcggcaccaacgggacctgcctgctggccagcatggggctgcagctgaacctcacctatgagaggaaggacaacacgacggtgacaaggcttctcaacatcaaccccaacaagacctcggccagcgggagctgcggcgcccacctggtgactctggagctgcacagcgagggcaccaccgtcctgctcttccagttcgggatgaatgcaagttctagccggtttttcctacaaggaatccagttgaatacaattcttcctgacgccagagaccctgcctttaaagctgccaacggctccctgcgagcgctgcaggccacagtcggcaattcctacaagtgcaacgcggaggagcacgtccgtgtcacgaaggcgttttcagtcaatatattcaaagtgtgggtccaggctttcaaggtggaaggtggccagtttggctctgtggaggagtgtctgctggacgagaacagcatgctgatccccatcgctgtgggtggtgccctggcggggctggtcctcatcgtcctcatcgcctacctcgtcggcaggaagaggagtcacgcaggctaccagactatctagcctggtgcacgcaggcacagcagctgcaggggcctctgttcctttctctgggcttagggtcctgtcgaaggggaggcacactttctggcaaacgtttctcaaatctgcttcatccaatgtgaagttcatcttgcagcatttactatgcacaacagagtaactatcgaaatgacggtgttaattttgctaactgggttaaatattttgctaactggttaaacattaatatttaccaaagtaggattttgagggtgggggtgctctctctgagggggtgggggtgccgctgtctctgaggggtgggggtgccgctgtctctgaggggtgggggtgccgctctctctgagggggtgggggtgccgctttctctgagggggtgggggtgccgctctctctgagggggtgggggtgctgctctctccgaggggtggaatgccgctgtctctgaggggtgggggtgccgctctaaattggctccatatcatttgagtttagggttctggtgtttggtttcttcattctttactgcactcagatttaagccttacaaagggaaagcctctggccgtcacacgtaggacgcatgaaggtcactcgtggtgaggctgacatgctcacacattacaacagtagagagggaacatcctaagacagaggaactccagagatgagtgtctggagcgcttcagttcagctttaaaggccaggacgggccacacgtggctggcggcctcgttccagtggcggcacgtccttgggcgtctctaatgtctgcagctcaagggctggcacttttttaaatataaaaatgggtgttatttttatttttatttgtaaagtgatttttggtcttctgttgacattcggggtgatcctgttctgcgctgtgtacaatgtgagatcggtgcgttctcctgatgttttgccgtggcttggggattgtacacgggaccagctcacgtaatgcattgcctgtaacaatgtaataaaaagcctctttctttttggggtgggccttgtccttctgtcagctaaaatgggagctcatgagagaaggacgtcagggaaacggggttgagggtggtctcggtgcagagagaagggtgtcagggaaacggggggtgagggtggtcttggtgccagacgtagggaatggtgttgggagtggcccgagtgcctggcacagttgtctggttcattcatgtaacatgataatttttaaatcattaaaaaaattacctttcatacaga

SEQ ID NO: 157414 - DNA, 1254 bp, Artificial Sequence
  derived and/or modified sequence
atggccgcccccggcagcgcccggcggcccctgctgctgctgctgttgctcttgttgctcggactaatgcactgcgccagcgccgccatgttcatggttaagaacgggaacgggaccgcttgcattatggcgaacttcagcgccgcctttagcgtgaactatgatactaaatcaggccctaagaatatgacatttgatctaccctccgacgcaacagtggttttgaataggtcaagttgcgggaaagaaaatacttcagatcccagcctggtcattgccttcggacggggccacaccctcacactgaacttcacccgcaatgcaacgcgttattccgtgcagctgatgtccttcgtctacaatctctctgacacacatctgtttccaaacgcctccagcaaagaaatcaagactgttgaatcgattacagacatcagggccgacattgataaaaagtacaggtgtgtgtccggcacccaggtacacatgaataacgttactgtgacattgcatgatgcgacaatacaggcttacctgtccaacagcagtttttctagaggcgaaacccggtgcgagcaagacaggccatctcccacaaccgctccacccgcccccccgagtcctagccccagtcctgtaccgaagagcccgtccgtggataagtataatgtgtctggaacaaatgggacatgcttgctggccagcatgggtctccaactgaacctaacttatgagcgtaaggataacacaaccgtgactcgcctcttgaacataaaccccaataaaacctcagcctctggcagctgcggggcccacttggttactctggaactccactctgaagggacaacagtgctccttttccaattcggtatgaatgcctctagcagtcgcttttttcttcagggcattcagttgaatacaatattaccagatgccagagatccagcctttaaagccgcaaacggaagtctgcgagctctacaggctactgttggcaacagctacaagtgtaatgctgaagagcatgtccgagtaactaaggccttctcagtgaacatcttcaaggtatgggttcaggcctttaaagtcgaaggaggacaattcggttccgttgaggaatgtttactcgacgaaaacagtatgcttatccctattgcagtaggaggtgccctcgctggactggtcctgattgtattaattgcatacctcgtcggcagaaagcgctcccatgcgggatatcagactatttag

SEQ ID NO: 157415 - DNA, 1254 bp, Artificial Sequence
  derived and/or modified sequence
atggcagccccaggttctgctcggcgtccactgctgctgctgttgctgctgctcctgctggggttgatgcactgcgcttctgccgctatgttcatggttaagaatggcaatggcaccgcatgtataatggctaacttctcagcagcgttctccgtaaattacgacaccaaaagcggtccaaagaatatgacattcgatctcccaagcgacgccactgttgtgctgaatcggtcctcttgcggcaaggaaaatacttccgatccatctctggtcatcgcctttggcaggggacatacacttactctcaacttcacaaggaatgctacacgttattcggtgcagctcatgtctttcgtttataacctctcagacacccacttattccccaacgcctcttctaaggagattaagaccgtggagtctattaccgatatccgggcagatattgacaaaaagtaccgctgtgtcagtggtacccaggtacacatgaacaacgtcaccgtgactctgcatgacgccaccatacaagcctacttgtcgaacagcagcttttcaaggggggagactagatgcgagcaggatcgcccttccccaactacagcacctcctgcacccccaagtccctcgccctccccggttcccaagagccctagtgtcgacaagtataacgtgtcaggcaccaacggaacttgccttttggcatctatgggcctgcaactaaacctgacatacgagagaaaggacaacaccaccgtcacccggctgctcaatatcaacccgaataagacgtctgcttccggatcttgcggagctcacctggtgacccttgaattgcactctgagggtaccaccgtgctgctgtttcagttcgggatgaatgcatcctccagccggtttttccttcagggaatccagctcaacacaatcttgccagacgctagagaccccgctttcaaagccgctaacggttcactcagggccctgcaggctaccgtggggaactcttacaagtgtaacgctgaagagcacgtgcgagttacaaaggcctttagcgtgaatatttttaaggtttgggtgcaggcctttaaggtagaagggggacagttcggcagtgtcgaggaatgccttctcgacgagaacagcatgttgatccctatcgccgtgggaggagcccttgcaggactggtcctgatcgtattgatcgcctatttagttggacgcaaaagatcacacgctggctatcagacaatttag

SEQ ID NO: 157416 - DNA, 1254 bp, Artificial Sequence
  derived and/or modified sequence
atggccgcccccggcagcgccagaagacccctgctgctgctgctgctgctgctgctgctgggcctgatgcactgcgccagcgccgccatgttcatggtgaagaacggcaacggcaccgcctgcatcatggccaacttcagcgccgccttcagcgtgaactacgacaccaagagcggccccaagaacatgaccttcgacctgcccagcgacgccaccgtggtgctgaacagaagcagctgcggcaaggagaacaccagcgaccccagcctggtgatcgccttcggcagaggccacaccctgaccctgaacttcaccagaaacgccaccagatacagcgtgcagctgatgagcttcgtgtacaacctgagcgacacccacctgttccccaacgccagcagcaaggagatcaagaccgtggagagcatcaccgacatcagagccgacatcgacaagaagtacagatgcgtgagcggcacccaggtgcacatgaacaacgtgaccgtgaccctgcacgacgccaccatccaggcctacctgagcaacagcagcttcagcagaggcgagaccagatgcgagcaggacagacccagccccaccaccgccccccccgccccccccagccccagccccagccccgtgcccaagagccccagcgtggacaagtacaacgtgagcggcaccaacggcacctgcctgctggccagcatgggcctgcagctgaacctgacctacgagagaaaggacaacaccaccgtgaccagactgctgaacatcaaccccaacaagaccagcgccagcggcagctgcggcgcccacctggtgaccctggagctgcacagcgagggcaccaccgtgctgctgttccagttcggcatgaacgccagcagcagcagattcttcctgcagggcatccagctgaacaccatcctgcccgacgccagagaccccgccttcaaggccgccaacggcagcctgagagccctgcaggccaccgtgggcaacagctacaagtgcaacgccgaggagcacgtgagagtgaccaaggccttcagcgtgaacatcttcaaggtgtgggtgcaggccttcaaggtggagggcggccagttcggcagcgtggaggagtgcctgctggacgagaacagcatgctgatccccatcgccgtgggcggcgccctggccggcctggtgctgatcgtgctgatcgcctacctggtgggcagaaagagaagccacgccggctaccagaccatctag

SEQ ID NO: 157417 - protein, 1193 aa, Artificial Sequence
  derived and/or modified sequence
MPALWLGCCLCFSLLLPAARATSRREVCDCNGKSRQCIFDRELHRQTGNGFRCLNCNDNTDGIHCEKCKNGFYRHRERDRCLPCNCNSKGSLSARCDNSGRCSCKPGVTGARCDRCLPGFHMLTDAGCTQDQRLLDSKCDCDPAGIAGPCDAGRCVCKPAVTGERCDRCRSGYYNLDGGNPEGCTQCFCYGHSASCRSSAEYSVHKITSTFHQDVDGWKAVQRNGSPAKLQWSQRHQDVFSSAQRLDPVYFVAPAKFLGNQQVSYGQSLSFDYRVDRGGRHPSAHDVILEGAGLRITAPLMPLGKTLPCGLTKTYTFRLNEHPSNNWSPQLSYFEYRRLLRNLTALRIRATYGEYSTGYIDNVTLISARPVSGAPAPWVEQCICPVGYKGQFCQDCASGYKRDSARLGPFGTCIPCNCQGGGACDPDTGDCYSGDENPDIECADCPIGFYNDPHDPRSCKPCPCHNGFSCSVMPETEEVVCNNCPPGVTGARCELCADGYFGDPFGEHGPVRPCQPCQCNNNVDPSASGNCDRLTGRCLKCIHNTAGIYCDQCKAGYFGDPLAPNPADKCRACNCNPMGSEPVGCRSDGTCVCKPGFGGPNCEHGAFSCPACYNQVKIQMDQFMQQLQRMEALISKAQGGDGVVPDTELEGRMQQAEQALQDILRDAQISEGASRSLGLQLAKVRSQENSYQSRLDDLKMTVERVRALGSQYQNRVRDTHRLITQMQLSLAESEASLGNTNIPASDHYVGPNGFKSLAQEATRLAESHVESASNMEQLTRETEDYSKQALSLVRKALHEGVGSGSGSPDGAVVQGLVEKLEKTKSLAQQLTREATQAEIEADRSYQHSLRLLDSVSRLQGVSDQSFQVEEAKRIKQKADSLSSLVTRHMDEFKRTQKNLGNWKEEAQQLLQNGKSGREKSDQLLSRANLAKSRAQEALSMGNATFYEVESILKNLREFDLQVDNRKAEAEEAMKRLSYISQKVSDASDKTQQAERALGSAAADAQRAKNGAGEALEISSEIEQEIGSLNLEANVTADGALAMEKGLASLKSEMREVEGELERKELEFDTNMDAVQMVITEAQKVDTRAKNAGVTIQDTLNTLDGLLHLMDQPLSVDEEGLVLLEQKLSRAKTQINSQLRPMMSELEERARQQRGHLHLLETSIDGILADVKNLENIRDNLPPGCYNTQALEQQ

SEQ ID NO: 157418 - protein, 1010 aa, Artificial Sequence
  derived and/or modified sequence
MPALWLGCCLCFSLLLPAARATSRREVCDCNGKSRQCIFDRELHRQTGNGFRCLNCNDNTDGIHCEKCKNGFYRHRERDRCLPCNCNSKGSLSARCDNSGRCSCKPGVTGARCDRCLPGFHMLTDAGCTQDQRLLDSKCDCDPAGIAGPCDAGRCVCKPAVTGERCDRCRSGYYNLDGGNPEGCTQCFCYGHSASCRSSAEYSVHKITSTFHQDVDGWKAVQRNGSPAKLQWSQRHQDVFSSAQRLDPVYFVAPAKFLGNQQVSYGQSLSFDYRVDRGGRHPSAHDVILEGAGLRITAPLMPLGKTLPCGLTKTYTFRLNEHPSNNWSPQLSYFEYRRLLRNLTALRIRATYGEYSTGYIDNVTLISARPVSGAPAPWVEQCICPVGYKGQFCQDCASGYKRDSARLGPFGTCIPCNCQGGGACDPDTGDCYSGDENPDIECADCPIGFYNDPHDPRSCKPCPCHNGFSCSVMPETEEVVCNNCPPGVTGARCELCADGYFGDPFGEHGPVRPCQPCQCNNNVDPSASGNCDRLTGRCLKCIHNTAGIYCDQCKAGYFGDPLAPNPADKCRACNCNPMGSEPVGCRSDGTCVCKPGFGGPNCEHGAFSCPACYNQVKIQMDQFMQQLQRMEALISKAQGGDGVVPDTELEGRMQQAEQALQDILRDAQISEGASRSLGLQLAKVRSQENSYQSRLDDLKMTVERVRALGSQYQNRVRDTHRLITQMQLSLAESEASLGNTNIPASDHYVGPNGFKSLAQEATRLAESHVESASNMEQLTRETEDYSKQALSLVRKALHEGVGSGSGSPDGAVVQGLVEKLEKTKSLAQQLTREATQAEIEADRSYQHSLRLLDSVSRLQGVSDQSFQVEEAKRIKQKADSLSSLVTRHMDEFKRTQKNLGNWKEEAQQLLQNGKSGREKSDQLLSRANLAKSRAQEALSMGNATFYEVESILKNLREFDLQVDNRKAEAFPSQDPDQQPTAAHDVRAGREGTSAEGPPPFAGDKHRWDSG

SEQ ID NO: 157419 - DNA, 3582 bp, Artificial Sequence
  derived and/or modified sequence
atgcctgccctttggcttggctgttgcctgtgtttctcgttattgctccccgccgcccgagccacttcccggagagaagtctgcgactgtaacgggaagtcccgccagtgcatttttgaccgggaattacatcgtcagacggggaacggattccgatgcttgaactgcaatgataatacagacggcatacattgtgagaaatgtaaaaatggcttctatcgccatagggaacgagatcgctgcctgccatgtaattgcaactcgaaaggcagtctcagtgcccgatgtgataacagtggtaggtgttcctgtaaaccaggagtgacaggcgctagatgcgatcggtgcctgcccggcttccacatgctgaccgacgcaggatgcacccaagatcagcgactgctggattctaagtgcgattgtgaccccgccgggatcgctgggccttgcgatgctggtcggtgcgtgtgcaaacctgccgtaactggggaaaggtgcgacagatgtcgttctgggtattataacctggatggggggaaccctgaggggtgcacacaatgcttctgctatggccactcggcttcttgcaggtctagcgctgaatatagcgtgcacaaaatcacaagcactttccaccaggatgtggacggatggaaggcagttcagcgcaacggctccccagccaaattgcagtggagccagagacatcaggatgttttcagctccgcacaaagacttgaccccgtctattttgtggctccagctaagttcctcggcaatcagcaggtttcttacgggcagtctcttagttttgattaccgcgtggataggggaggtaggcacccaagcgcccatgacgtgatcttggaaggagctggcttgcgcatcacagcccccctgatgccactgggtaagaccctgccctgcgggttgacaaagacctatacgtttcgcctgaatgaacaccccagtaataactggtcgcctcagctgtcatacttcgaatacaggcgcctgctccgcaatttgacagcactgcgcatccgggcgacctacggagagtactcaactggatacatagataatgtaactttaatcagcgcccgaccagtttcaggggcccctgccccgtgggtggaacaatgtatctgtcctgtgggttacaaggggcagttctgccaagactgcgcatcgggctacaaacgggatagtgccagacttgggccctttggcacctgcattccctgcaactgtcagggcgggggcgcctgcgaccccgacacaggggactgttactctggcgacgaaaacccggatatagagtgtgcagattgtcctattggcttttacaacgatccacacgatcctagatcttgcaaaccatgtccctgtcataacgggttctcttgctccgtgatgcctgagaccgaagaggtggtgtgtaacaactgccctcccggcgtgactggtgccagatgcgagctgtgtgccgacgggtactttggcgacccattcggtgaacatggccctgttcgaccatgccagccgtgtcagtgcaataacaatgtggatcctagtgctagcggcaattgcgacagactgacaggtcgctgcttgaagtgcatccataacactgctggcatatattgcgaccagtgcaaagctggttactttggggacccgcttgcccctaaccccgccgataaatgtagggcctgcaattgtaacccgatgggcagtgagcctgtgggttgtcgttcagacggtacttgtgtttgcaagcccgggtttggaggccctaattgcgagcacggagccttttcatgcccagcctgttataaccaggtaaagatccagatggatcaatttatgcaacagctgcagcgtatggaagccctaatctctaaagctcaaggcggggatggagttgtgcccgacaccgagctcgagggtagaatgcaacaagctgaacaggcccttcaagatatccttcgcgacgcacaaatctccgagggcgcatctaggtctctgggtcttcagctcgccaaggtgcgcagccaggagaattcgtatcagtcccgactggacgatcttaaaatgaccgtggagcgcgtcagagcccttgggtctcagtaccagaatagagtcagagacacacatcgcctgattacacagatgcagctgtcgctcgccgagtccgaggcctcgctaggaaataccaatatccctgccagtgaccattacgtcgggcccaatggattcaaatccctagcgcaagaggccacaaggttagccgagtcacacgttgagtccgcctctaacatggaacaactgactagggagactgaggactattctaaacaggccctgagcctggtcaggaaggctctccatgaaggcgtaggcagtggaagtggaagccccgacggcgctgtagtccagggccttgttgagaaactggagaagactaagagcctcgctcagcaactcactagagaagccacccaggccgagatcgaagccgatagatcatatcaacacagcctgcggctactggactctgtcagtcgtctacagggagtgagcgatcagagcttccaggttgaggaggccaagcggatcaaacaaaaagccgattcacttagtagccttgtgacgcgacatatggatgagtttaaaaggacccagaagaacctgggaaattggaaggaggaggcccagcagctcttacagaatggtaagtccgggcgggaaaagtctgatcagcttctctcacgggctaacctcgcaaagtcccgggcgcaggaagccttgtcaatgggcaacgctaccttctacgaagttgagagcattctgaagaacctgcgcgagttcgacctgcaggtggataacagaaaagcggaggctgaagaggctatgaaacgtctgtcttacatctcccagaaagttagcgatgcatcagataagacacagcaagccgaaagggctctcggctccgcagccgccgatgcccagcgggcaaaaaacggcgccggcgaagccctagagatctcttcagagattgagcaggagataggcagtctgaatttagaggccaatgtcaccgccgacggcgcgctcgctatggaaaagggcctagcgtcactgaagtccgagatgcgggaggttgagggggaactggagcgcaaagagttagaatttgacacgaatatggatgctgtgcagatggtcatcaccgaagctcagaaagtggacacaagggccaaaaacgctggtgtcacaatccaggatacactgaataccttagacggattactgcacctgatggaccagcctctttctgttgacgaggaggggctcgtgctgcttgagcaaaaactcagccgtgccaagactcagatcaactcacagctgaggcctatgatgagcgagttagaggagagagcaagacaacaacgtggccacctccacctactagaaacatccatcgacggcatccttgcagatgtcaagaacctcgagaatattcgcgataacctacctccaggatgctacaacacacaggctctggagcagcagtag

SEQ ID NO: 157420 - DNA, 5147 bp, Artificial Sequence
  derived and/or modified sequence
accaaccgaggcgccgggcagcgacccctgcagcggagacagagactgagcggcccggccccgccatgcctgcgctctggctgggctgctgcctctgcttctcgctcctcctgcccgcagcccgggccacctccaggagggaagtctgtgattgcaatgggaagtccaggcagtgtatctttgatcgggaacttcacagacaaactggtaatggattccgctgcctcaactgcaatgacaacactgatggcattcactgcgagaagtgcaagaatggcttttaccggcacagagaaagggaccgctgtttgccctgcaattgtaactccaaaggttctcttagtgctcgatgtgacaactccggacggtgcagctgtaaaccaggtgtgacaggagccagatgcgaccgatgtctgccaggcttccacatgctcacggatgcggggtgcacccaagaccagagactgctagactccaagtgtgactgtgacccagctggcatcgcagggccctgtgacgcgggccgctgtgtctgcaagccagctgtcactggagaacgctgtgataggtgtcgatcaggttactataatctggatggggggaaccctgagggctgtacccagtgtttctgctatgggcattcagccagctgccgcagctctgcagaatacagtgtccataagatcacctctacctttcatcaagatgttgatggctggaaggctgtccaacgaaatgggtctcctgcaaagctccaatggtcacagcgccatcaagatgtgtttagctcagcccaacgactagaccctgtctattttgtggctcctgccaaatttcttgggaatcaacaggtgagctatggtcaaagcctgtcctttgactaccgtgtggacagaggaggcagacacccatctgcccatgatgtgattctggaaggtgctggtctacggatcacagctcccttgatgccacttggcaagacactgccttgtgggctcaccaagacttacacattcaggttaaatgagcatccaagcaataattggagcccccagctgagttactttgagtatcgaaggttactgcggaatctcacagccctccgcatccgagctacatatggagaatacagtactgggtacattgacaatgtgaccctgatttcagcccgccctgtctctggagccccagcaccctgggttgaacagtgtatatgtcctgttgggtacaaggggcaattctgccaggattgtgcttctggctacaagagagattcagcgagactggggccttttggcacctgtattccttgtaactgtcaagggggaggggcctgtgatccagacacaggagattgttattcaggggatgagaatcctgacattgagtgtgctgactgcccaattggtttctacaacgatccgcacgacccccgcagctgcaagccatgtccctgtcataacgggttcagctgctcagtgatgccggagacggaggaggtggtgtgcaataactgccctcccggggtcaccggtgcccgctgtgagctctgtgctgatggctactttggggacccctttggtgaacatggcccagtgaggccttgtcagccctgtcaatgcaacaacaatgtggaccccagtgcctctgggaattgtgaccggctgacaggcaggtgtttgaagtgtatccacaacacagccggcatctactgcgaccagtgcaaagcaggctacttcggggacccattggctcccaacccagcagacaagtgtcgagcttgcaactgtaaccccatgggctcagagcctgtaggatgtcgaagtgatggcacctgtgtttgcaagccaggatttggtggccccaactgtgagcatggagcattcagctgtccagcttgctataatcaagtgaagattcagatggatcagtttatgcagcagcttcagagaatggaggccctgatttcaaaggctcagggtggtgatggagtagtacctgatacagagctggaaggcaggatgcagcaggctgagcaggcccttcaggacattctgagagatgcccagatttcagaaggtgctagcagatcccttggtctccagttggccaaggtgaggagccaagagaacagctaccagagccgcctggatgacctcaagatgactgtggaaagagttcgggctctgggaagtcagtaccagaaccgagttcgggatactcacaggctcatcactcagatgcagctgagcctggcagaaagtgaagcttccttgggaaacactaacattcctgcctcagaccactacgtggggccaaatggctttaaaagtctggctcaggaggccacaagattagcagaaagccacgttgagtcagccagtaacatggagcaactgacaagggaaactgaggactattccaaacaagccctctcactggtgcgcaaggccctgcatgaaggagtcggaagcggaagcggtagcccggacggtgctgtggtgcaagggcttgtggaaaaattggagaaaaccaagtccctggcccagcagttgacaagggaggccactcaagcggaaattgaagcagataggtcttatcagcacagtctccgcctcctggattcagtgtctcggcttcagggagtcagtgatcagtcctttcaggtggaagaagcaaagaggatcaaacaaaaagcggattcactctcaagcctggtaaccaggcatatggatgagttcaagcgtacacagaagaatctgggaaactggaaagaagaagcacagcagctcttacagaatggaaaaagtgggagagagaaatcagatcagctgctttcccgtgccaatcttgctaaaagcagagcacaagaagcactgagtatgggcaatgccactttttatgaagttgagagcatccttaaaaacctcagagagtttgacctgcaggtggacaacagaaaagcagaagctgaagaagccatgaagagactctcctacatcagccagaaggtttcagatgccagtgacaagacccagcaagcagaaagagccctggggagcgctgctgctgatgcacagagggcaaagaatggggccggggaggccctggaaatctccagtgagattgaacaggagattgggagtctgaacttggaagccaatgtgacagcagatggagccttggccatggaaaagggactggcctctctgaagagtgagatgagggaagtggaaggagagctggaaaggaaggagctggagtttgacacgaatatggatgcagtacagatggtgattacagaagcccagaaggttgataccagagccaagaacgctggggttacaatccaagacacactcaacacattagacggcctcctgcatctgatggaccagcctctcagtgtagatgaagaggggctggtcttactggagcagaagctttcccgagccaagacccagatcaacagccaactgcggcccatgatgtcagagctggaagagagggcacgtcagcagaggggccacctccatttgctggagacaagcatagatgggattctggctgatgtgaagaacttggagaacattagggacaacctgcccccaggctgctacaatacccaggctcttgagcaacagtgaagctgccataaatatttctcaactgaggttcttgggatacagatctcagggctcgggagccatgtcatgtgagtgggtgggatggggacatttgaacatgtttaatgggtatgctcaggtcaactgacctgaccccattcctgatcccatggccaggtggttgtcttattgcaccatactccttgcttcctgatgctgggcaatgaggcagatagcactgggtgtgagaatgatcaaggatctggaccccaaagaatagactggatggaaagacaaactgcacaggcagatgtttgcctcataatagtcgtaagtggagtcctggaatttggacaagtgctgttgggatatagtcaacttattctttgagtaatgtgactaaaggaaaaaactttgactttgcccaggcatgaaattcttcctaatgtcagaacagagtgcaacccagtcacactgtggccagtaaaatactattgcctcatattgtcctctgcaagcttcttgctgatcagagttcctcctacttacaacccagggtgtgaacatgttctccattttcaagctggaagaagtgagcagtgttggagtgaggacctgtaaggcaggcccattcagagctatggtgcttgctggtgcctgccaccttcaagttctggacctgggcatgacatcctttcttttaatgatgccatggcaacttagagattgcatttttattaaagcatttcctaccagcaaagcaaatgttgggaaagtatttactttttcggtttcaaagtgatagaaaagtgtggcttgggcattgaaagaggtaaaattctctagatttattagtcctaattcaatcctacttttcgaacaccaaaaatgatgcgcatcaatgtattttatcttattttctcaatctcctctctctttcctccacccataataagagaatgttcctactcacacttcagctgggtcacatccatccctccattcatccttccatccatctttccatccattacctccatccatccttccaacatatatttattgagtacctactgtgtgccaggggctggtgggacagtggtgacatagtctctgccctcatagagttgattgtctagtgaggaagacaagcatttttaaaaaataaatttaaacttacaaactttgtttgtcacaagtggtgtttattgcaataaccgcttggtttgcaacctctttgctcaacagaacatatgttgcaagaccctcccatgggggcacttgagttttggcaaggctgacagagctctgggttgtgcacatttctttgcattccagctgtcactctgtgcctttctacaactgattgcaacagactgttgagttatgataacaccagtgggaattgctggaggaaccagaggcacttccaccttggctgggaagactatggtgctgccttgcttctgtatttccttggattttcctgaaagtgtttttaaataaagaacaattgttaga

SEQ ID NO: 157421 - DNA, 3582 bp, Artificial Sequence
  derived and/or modified sequence
atgcctgccctgtggctgggctgctgcctgtgcttcagcctgctgctgcctgctgcccgggccaccagccggcgggaggtgtgtgactgcaatggcaagagccggcagtgcatctttgaccgggagctgcaccggcagacaggaaatggcttccgctgcctgaactgcaatgacaacacagatggcatccactgtgagaagtgcaagaatggcttctaccgccaccgggagcgggaccgctgcctgccctgcaactgcaacagcaagggcagcctgagcgcccgctgtgacaacagcggccgctgcagctgcaagccaggagtgactggagcccgctgtgaccgctgcctgcccggcttccacatgctgacagatgctggctgcacccaggaccagaggctgctggacagcaaatgtgactgtgaccctgctggcattgctggcccctgtgatgctggccgctgtgtgtgcaagccagctgtgactggagagcgctgtgaccgctgccgcagcggctactacaacctggatggcggcaaccctgagggctgcacccagtgcttctgctacggccacagcgccagctgccgcagcagcgctgagtacagcgtgcacaagatcaccagcaccttccaccaggatgtggatggctggaaggctgtgcagagaaatggcagccctgccaagctgcagtggagccagaggcaccaggatgtgttcagcagcgcccagaggctggaccctgtgtactttgtggccccagccaagttcctgggcaaccagcaggtgtcctatggccagagcctgagctttgactacagagtggaccggggcggccgccaccccagcgcccatgatgtgatcctggagggcgccggcctgcgcatcacagcccccctgatgcccctgggcaagaccctgccctgtggcctgaccaagacctacaccttccggctgaatgagcaccccagcaacaactggagcccccagctgagctactttgagtacagaaggctgctgaggaacctgacagccctgcgcatccgggccacctacggggagtacagcacaggctacatcgacaacgtgaccctcatcagcgcccggcctgtgtctggggccccagccccctgggtggagcagtgcatctgccctgtgggctacaagggccagttctgccaggactgtgccagcggctacaagagggacagcgcccggctgggccccttcggcacctgcatcccctgcaactgccagggcggcggggcctgtgaccctgacaccggggactgctacagcggagatgagaacccagacattgaatgtgccgactgccccatcggcttctacaatgacccccatgaccccaggagctgcaagccctgcccctgccacaacggcttcagctgcagcgtgatgcctgagacagaggaggtggtgtgcaacaactgccccccaggagtgactggagcccgctgtgagctgtgtgctgatggctactttggagacccctttggagagcacggccctgtgcggccctgccagccctgccagtgcaacaacaacgtggaccccagcgccagcggcaactgtgaccggctgaccggccgctgcctgaagtgcatccacaacacagctggcatctactgtgaccagtgcaaggccggctactttggagaccccctggcccccaacccagctgacaagtgccgggcctgcaactgcaaccccatgggcagcgagcctgtgggctgccgcagtgatggcacctgtgtgtgcaagccaggctttggaggccccaactgtgagcacggggccttcagctgcccagcctgctacaaccaggtgaagatccagatggaccagttcatgcagcagctgcagaggatggaggccctgatcagcaaggcccagggcggagatggagtggtgcctgacacagagctggagggccgcatgcagcaggccgagcaggccctgcaggacatcctgagagatgcccagatcagcgagggcgccagccgcagcctgggcctgcagctggccaaggtgcgcagccaggagaacagctaccagagccggctggatgacctgaagatgacagtggagcgggtgcgggccctgggcagccagtaccagaacagagtgcgggacacccacaggctcatcacccagatgcagctgagcctggccgagagcgaggccagcctgggcaacaccaacatcccagccagtgaccactacgtgggccccaacggcttcaagagcctggcccaggaggccacccggctggccgagagccacgtggagagcgccagcaacatggagcagctgacccgggagacagaggactacagcaagcaggccctgagcctggtgaggaaggccctgcacgagggcgtgggcagcggcagcggcagcccagatggagctgtggtgcagggcctggtggagaagctggagaagaccaagagcctggcccagcagctgacccgggaggccacccaggccgagattgaagctgacaggagctaccagcacagcctgcggctgctggacagcgtgtcccggctgcagggcgtgtctgaccagagcttccaggtggaggaggccaagaggatcaagcagaaggctgacagcctgagcagcctggtgaccaggcacatggatgagttcaagaggacccagaagaacctgggcaactggaaggaggaggcccagcagctgctgcagaatggcaagagcggccgggagaagagtgaccagctgctgagccgggccaacctggccaagagccgggcccaggaggccctgtccatgggaaatgccaccttctatgaggtggagagcatcctgaagaacctgcgggagtttgacctgcaggtggacaacaggaaggccgaggccgaggaggccatgaagaggctgagctacatcagccagaaggtgtctgatgccagtgacaagacccagcaggccgagcgggccctgggcagcgctgctgctgatgcccagagggccaagaatggagctggggaggccctggagatcagcagcgagattgagcaggagatcggcagcctgaacctggaggccaacgtgacagcagatggagccctggccatggagaagggcctggccagcctgaagtctgagatgagggaggtggagggggagctggagaggaaggagctggagtttgacaccaacatggatgctgtgcagatggtgatcacagaggcccagaaggtggacacccgggccaagaatgctggggtgaccatccaggacaccctgaacaccctggatggcctgctgcacctgatggaccagcccctgtctgtggatgaggagggcctggtgctgctggagcagaagctgagccgggccaagacccagatcaacagccagctgcggcccatgatgtctgagctggaggagcgggcccggcagcagaggggccacctgcacctgctggagaccagcattgatggcatcctggctgatgtgaagaacctggagaacatccgggacaacctgcccccaggctgctacaacacccaggccctggagcagcagtag

SEQ ID NO: 157422 - DNA, 3582 bp, Artificial Sequence
  derived and/or modified sequence
atgcccgccctgtggctgggctgctgcctgtgcttcagcctgctgctccccgccgctcgcgcgacttcccgtcgcgaggtctgtgattgtaatgggaaaagtcggcagtgtattttcgaccgtgagctccatagacagactgggaatgggtttcggtgtctgaattgtaacgataatacggatggtatccattgtgaaaagtgtaagaatggtttctaccgacatagggagagggatagatgtctgccttgcaactgcaactcaaaaggatcactgtcagcgcgctgtgacaatagcggtcgatgctcatgtaagccaggcgtcaccggggcccgctgtgaccgctgtctgccgggtttccacatgctcaccgacgccggctgtacacaagatcaacgtttgctggacagtaagtgtgactgcgaccccgccggtattgcgggaccttgtgacgcaggacgatgtgtatgcaagccagccgtaaccggtgaacgatgcgatcggtgccggagcgggtactataatttggacggcggaaatcccgagggttgtacccagtgcttctgctatgggcacagtgcgtcatgtcgctctagcgccgaatattcagtacataagataacaagtacattccaccaggacgtcgacgggtggaaggctgtgcaacggaacggttcacccgctaagttacagtggagccagcgccaccaggacgtgttttcctcagcccagcggctcgatccggtgtacttcgtggccccagccaagttcctcggcaatcagcaggtgtcttacggccaatctctaagttttgattaccgagtggaccgtggcggccgccatccttctgcacacgacgtgatcctggaaggggcaggtctaaggatcacggctccgctgatgccactcgggaaaaccttgccctgcggcttgaccaagacatatacttttagactgaatgaacacccatccaataactggtcccctcaactctcatacttcgagtatcggaggctcctccgcaacttaacagcccttaggattcgggccacctacggtgagtattctaccggttatatagacaacgtgacactcatttctgccaggccggtgagcggcgcccctgctccatgggtcgaacagtgtatttgtcccgtcgggtacaaagggcaattttgccaagactgcgctagcggatacaagcgtgattcagcccggctgggaccgtttggcacatgtattccatgtaactgccaagggggaggggcctgcgatcctgatactggagactgctattccggggacgagaacccagatattgagtgcgcagactgtcctattggcttctacaacgatcctcacgatcccaggtcttgtaaaccctgcccctgccacaacggtttctcgtgttccgtcatgccagaaaccgaggaagttgtgtgtaataactgcccacccggagtgacaggggctcgctgcgagctctgtgctgatggctattttggggacccattcggcgagcacggccccgtacggccatgccagccctgccagtgtaacaacaatgtagatccgagtgcgtccggtaattgcgatcgcctcactggccgatgtctgaagtgcatccataacaccgcaggaatctattgtgaccaatgcaaggcagggtacttcggtgatcccctcgctccaaatcctgctgacaaatgcagagcctgcaactgtaaccctatgggaagcgagccagtcggatgccggagcgatggcacgtgcgtctgcaagcccggcttcggtgggccaaattgtgaacatggcgctttcagctgtcccgcatgctacaaccaagtgaaaatccaaatggaccagttcatgcagcagctccagaggatggaggcgttgattagcaaggcgcaggggggcgatggggttgtccccgatactgagctggaggggcgaatgcaacaggcggagcaagcactccaggacatcctgagggacgctcagattagcgagggcgcatcccggtctctggggctccagttggccaaagtgaggagccaggagaactcataccagtctcgactggatgatctcaagatgaccgtggaaagagttagagcactggggagccagtatcagaatagggtcagggatacccaccgcctgatcactcagatgcagctgagccttgccgagtctgaggcctctctgggaaataccaatattcccgctagcgatcactatgttggccccaatggcttcaaaagtctcgcgcaggaggcgacaagattggcggaatctcacgtggaaagcgccagcaacatggagcagttaacccgggaaaccgaagattacagcaaacaggctctctcccttgtccgcaaggcactccatgaaggtgtcgggagcggcagtggttcccctgatggcgccgttgttcaggggctcgtggagaagctggagaaaaccaaatcgttggctcaacaactgaccagggaagcaacacaggccgaaatcgaagcagatcggagttaccagcactcccttcgcctcctggacagtgtctcacgtctccaaggagtaagcgatcagtcattccaagtcgaggaggccaagcgaatcaaacagaaggctgactccctgtccagcttagtgacgagacatatggacgagttcaaacggacccaaaaaaacttaggcaactggaaagaagaggcccagcaattattgcagaacggaaaaagcggaagggaaaagtccgatcagctgctgtccagagccaatctggcaaaatccagagcccaagaggctctgtccatgggtaacgcaacgttctatgaggtagaatccatccttaaaaacctccgcgagtttgacttgcaggtggataacagaaaagctgaagctgaagaagccatgaagcgacttagctatatttctcagaaggtatccgatgcaagtgacaagacccagcaagcagaacgcgctctgggttccgccgcagcagacgctcaacgcgctaagaatggcgcaggagaagctctggaaatatcctctgagatcgaacaagagataggctccttaaatctggaagccaatgtcaccgctgacggtgctctggctatggagaaagggttagcctccctaaagagcgaaatgcgagaggtggagggcgagcttgagcgcaaggagttggagttcgacaccaatatggatgctgtccagatggtcatcacggaagctcagaaggtggatacgcgtgctaagaatgccggggtgactatccaggatacccttaatacgctcgacggtctccttcacctaatggatcaacctctcagcgtagacgaggaaggactggttttactggagcagaaactgtctagagccaaaacacagattaattctcagctccgtcccatgatgtccgagttggaagagagagcgagacaacaacggggtcaccttcacctgctcgaaacctctatcgacggtatcctggcggacgtgaagaatctcgaaaacattcgcgacaatctcccaccaggctgttacaatactcaggcgttggagcaacagtag

SEQ ID NO: 157423 - DNA, 3582 bp, Artificial Sequence
  derived and/or modified sequence
atgcccgctctctggcttggatgttgcttatgcttttccctgttgctgccagcagccagggccaccagtaggagggaagtatgtgactgtaacggaaagtctagacaatgtattttcgacagagaacttcatagacagactggtaacggttttaggtgcctgaactgtaatgacaacactgatggcatccattgtgaaaaatgcaagaacgggttttacaggcatcgagaacgagatagatgtttaccatgcaactgtaactcaaaaggctctctgtctgctcggtgcgacaacagcggacgctgttcgtgcaagccaggtgttacaggtgcccgttgcgatcggtgcctgcctggatttcacatgctcactgacgccggatgcactcaggatcagagactgctggattccaaatgcgattgcgaccccgcaggcatcgccggaccttgtgatgctggtaggtgcgtgtgtaagcccgctgtgactggcgaacggtgcgaccgctgcagaagcggatattacaatctggacgggggaaaccccgagggatgtactcagtgtttctgttatgggcacagtgcctcttgccgcagctctgccgaatattccgtgcacaagattacctccacttttcaccaagatgtcgacggttggaaggcagtgcagcgcaacgggagtccagccaagctgcaatggtctcagaggcaccaagatgtgttttcttctgcgcagagattggatcccgtgtactttgttgctcccgctaaatttctggggaatcagcaagttagctacggacagtcactgtcattcgactaccgcgtcgaccgcggagggcgacacccgtctgctcatgacgtgattctggaaggagctggtcttaggattactgcccctttgatgcccctcggcaagactttgccctgcggacttactaagacctacacatttcggttgaatgaacatccaagtaataattggtcacctcagcttagttactttgagtatcggagactgttacgcaacctcactgcgctcagaatcagagctacttacggtgagtactcaactgggtatatagacaatgtgactctgatttcagccagaccggtttccggcgctcccgctccctgggtagagcagtgtatatgccccgtaggctataagggacaattctgccaagactgtgcctcgggctataagcgagattccgcgagacttgggccattcggtacctgtatcccttgcaattgccagggcggaggcgcttgcgatcccgacactggggattgttatagtggagatgaaaaccctgatatcgagtgtgcggactgccccattggattctataacgacccccatgatcccaggagttgcaaaccttgcccatgtcataatggctttagctgttccgtgatgccagaaaccgaggaagtggtttgcaataactgtccccctggggtgaccggcgctagatgcgagctctgcgccgacggctactttggagatcccttcggtgagcacggccctgttcgtccctgtcagccatgtcagtgcaacaacaatgtggaccccagtgcgtccggtaactgtgataggctgaccggaaggtgcctaaagtgtattcacaataccgcaggtatttattgtgaccagtgtaaggccggatactttggggacccacttgctcccaaccccgcagacaagtgtagggcatgcaactgtaaccccatggggtccgaacctgtggggtgcagatccgacggtacgtgcgtatgcaagcccggttttggtggtcctaattgtgagcacggtgcctttagctgtcccgcatgctataatcaggtgaaaattcagatggatcagtttatgcagcagttgcaacgcatggaagccctgatcagcaaggctcaaggaggagacggggtcgttcccgataccgagttagagggcaggatgcagcaagcagaacaagccctgcaggacattcttagggatgcacagatctccgagggagcatcgcgatccttaggcttgcagctagccaaggtgaggagtcaagaaaacagctaccagtcaaggctggatgacctcaaaatgactgtggagagggtgcgtgcgcttggttcccagtatcaaaacagagtcagagatactcacagactgatcacacagatgcagctgtctctggctgagagcgaggcaagcctggggaacactaacataccagcgagcgatcactacgtgggcccaaacggtttcaaaagcctcgcacaggaagcaacccgactcgcagagagccatgtcgagagtgcttcaaacatggagcagctcacccgagagactgaagattactcgaagcaggccctaagcctcgtgaggaaggctttgcacgagggggttggttctggatcaggctcgccagatggcgcagtggtgcagggattggttgaaaagctcgaaaaaactaaaagtcttgcacagcagctgacccgcgaggccacccaagctgagatcgaggccgatcgaagctatcaacacagcctccggcttctggattccgtgtccagactccaaggcgtgagtgatcagagcttccaagtagaagaagcgaagcgaattaagcagaaggccgacagcttaagctctttagtcacacggcatatggacgagtttaagcgtacacagaaaaatcttggcaattggaaggaagaagcgcagcagctcctacaaaatggcaaaagcggccgagagaaatcagatcagcttctgagcagggctaacctggctaagtcacgggctcaagaagccctgtctatgggcaatgccaccttctacgaggtggagagcattctgaagaatctgcgggaattcgacttgcaggtagacaacaggaaggctgaggccgaagaagcaatgaaaaggctttcgtatataagccagaaggtgtcagacgcatccgataagactcagcaagccgaacgtgcgctgggatcagccgcagcagatgctcaacgcgctaagaacggtgcaggcgaggccctggagatatccagtgagattgaacaggagatagggtctctgaatctggaagctaatgtcacagccgacggagcactggctatggagaaaggattagcctcactgaaatctgagatgcgggaggttgagggtgagctggaaaggaaggagttggagttcgatactaatatggacgcggtacagatggtgatcacagaagcccagaaggtagacactcgtgccaagaacgccggtgtcacgatccaggatactctaaacaccctggacggactcctgcacttaatggatcagccattatctgttgacgaggaaggcctcgtgctgttagagcagaagttgagtcgcgctaagacacagattaatagccagctccgaccgatgatgagcgaactggaggaacgtgcacgccagcagcgcggtcaccttcacctgctcgaaacctctatcgatggaatcctggcagacgtaaagaatctggagaatatcagagacaacctcccccctggctgctacaatacccaagccttagaacagcagtag

SEQ ID NO: 157424 - DNA, 3582 bp, Artificial Sequence
  derived and/or modified sequence
atgcccgccctgtggctgggctgctgcctgtgcttcagcctgctgctgcccgccgccagagccaccagcagaagagaggtgtgcgactgcaacggcaagagcagacagtgcatcttcgacagagagctgcacagacagaccggcaacggcttcagatgcctgaactgcaacgacaacaccgacggcatccactgcgagaagtgcaagaacggcttctacagacacagagagagagacagatgcctgccctgcaactgcaacagcaagggcagcctgagcgccagatgcgacaacagcggcagatgcagctgcaagcccggcgtgaccggcgccagatgcgacagatgcctgcccggcttccacatgctgaccgacgccggctgcacccaggaccagagactgctggacagcaagtgcgactgcgaccccgccggcatcgccggcccctgcgacgccggcagatgcgtgtgcaagcccgccgtgaccggcgagagatgcgacagatgcagaagcggctactacaacctggacggcggcaaccccgagggctgcacccagtgcttctgctacggccacagcgccagctgcagaagcagcgccgagtacagcgtgcacaagatcaccagcaccttccaccaggacgtggacggctggaaggccgtgcagagaaacggcagccccgccaagctgcagtggagccagagacaccaggacgtgttcagcagcgcccagagactggaccccgtgtacttcgtggcccccgccaagttcctgggcaaccagcaggtgagctacggccagagcctgagcttcgactacagagtggacagaggcggcagacaccccagcgcccacgacgtgatcctggagggcgccggcctgagaatcaccgcccccctgatgcccctgggcaagaccctgccctgcggcctgaccaagacctacaccttcagactgaacgagcaccccagcaacaactggagcccccagctgagctacttcgagtacagaagactgctgagaaacctgaccgccctgagaatcagagccacctacggcgagtacagcaccggctacatcgacaacgtgaccctgatcagcgccagacccgtgagcggcgcccccgccccctgggtggagcagtgcatctgccccgtgggctacaagggccagttctgccaggactgcgccagcggctacaagagagacagcgccagactgggccccttcggcacctgcatcccctgcaactgccagggcggcggcgcctgcgaccccgacaccggcgactgctacagcggcgacgagaaccccgacatcgagtgcgccgactgccccatcggcttctacaacgacccccacgaccccagaagctgcaagccctgcccctgccacaacggcttcagctgcagcgtgatgcccgagaccgaggaggtggtgtgcaacaactgcccccccggcgtgaccggcgccagatgcgagctgtgcgccgacggctacttcggcgaccccttcggcgagcacggccccgtgagaccctgccagccctgccagtgcaacaacaacgtggaccccagcgccagcggcaactgcgacagactgaccggcagatgcctgaagtgcatccacaacaccgccggcatctactgcgaccagtgcaaggccggctacttcggcgaccccctggcccccaaccccgccgacaagtgcagagcctgcaactgcaaccccatgggcagcgagcccgtgggctgcagaagcgacggcacctgcgtgtgcaagcccggcttcggcggccccaactgcgagcacggcgccttcagctgccccgcctgctacaaccaggtgaagatccagatggaccagttcatgcagcagctgcagagaatggaggccctgatcagcaaggcccagggcggcgacggcgtggtgcccgacaccgagctggagggcagaatgcagcaggccgagcaggccctgcaggacatcctgagagacgcccagatcagcgagggcgccagcagaagcctgggcctgcagctggccaaggtgagaagccaggagaacagctaccagagcagactggacgacctgaagatgaccgtggagagagtgagagccctgggcagccagtaccagaacagagtgagagacacccacagactgatcacccagatgcagctgagcctggccgagagcgaggccagcctgggcaacaccaacatccccgccagcgaccactacgtgggccccaacggcttcaagagcctggcccaggaggccaccagactggccgagagccacgtggagagcgccagcaacatggagcagctgaccagagagaccgaggactacagcaagcaggccctgagcctggtgagaaaggccctgcacgagggcgtgggcagcggcagcggcagccccgacggcgccgtggtgcagggcctggtggagaagctggagaagaccaagagcctggcccagcagctgaccagagaggccacccaggccgagatcgaggccgacagaagctaccagcacagcctgagactgctggacagcgtgagcagactgcagggcgtgagcgaccagagcttccaggtggaggaggccaagagaatcaagcagaaggccgacagcctgagcagcctggtgaccagacacatggacgagttcaagagaacccagaagaacctgggcaactggaaggaggaggcccagcagctgctgcagaacggcaagagcggcagagagaagagcgaccagctgctgagcagagccaacctggccaagagcagagcccaggaggccctgagcatgggcaacgccaccttctacgaggtggagagcatcctgaagaacctgagagagttcgacctgcaggtggacaacagaaaggccgaggccgaggaggccatgaagagactgagctacatcagccagaaggtgagcgacgccagcgacaagacccagcaggccgagagagccctgggcagcgccgccgccgacgcccagagagccaagaacggcgccggcgaggccctggagatcagcagcgagatcgagcaggagatcggcagcctgaacctggaggccaacgtgaccgccgacggcgccctggccatggagaagggcctggccagcctgaagagcgagatgagagaggtggagggcgagctggagagaaaggagctggagttcgacaccaacatggacgccgtgcagatggtgatcaccgaggcccagaaggtggacaccagagccaagaacgccggcgtgaccatccaggacaccctgaacaccctggacggcctgctgcacctgatggaccagcccctgagcgtggacgaggagggcctggtgctgctggagcagaagctgagcagagccaagacccagatcaacagccagctgagacccatgatgagcgagctggaggagagagccagacagcagagaggccacctgcacctgctggagaccagcatcgacggcatcctggccgacgtgaagaacctggagaacatcagagacaacctgccccccggctgctacaacacccaggccctggagcagcagtag

SEQ ID NO: 157425 - protein, 198 aa, Artificial Sequence
  derived and/or modified sequence
MPLGLLWLGLALLGALHAQAQDSTSDLIPAPPLSKVPLQQNFQDNQFQGKWYVVGLAGNAILREDKDPQKMYATIYELKEDKSYNVTSVLFRKKKCDYWIRTFVPGCQPGEFTLGNIKSYPGLTSYLVRVVSTNYNQHAMVFFKKVSQNREYFKITLYGRTKELTSELKENFIRFSKSLGLPENHIVFPVPIDQCIDG

SEQ ID NO: 157426 - protein, 200 aa, Artificial Sequence
  derived and/or modified sequence
MPLGLLWLGLALLGALHAQAQDSTSDLIPAPPLSKVPLQQNFQDNQFQGKWYVVGLAGNAILREDKDPQKMYATIYELKEDKSYNVTSVLFREKAQKCDYWIRTFVPGCQPGEFTLGNIKSYPGLTSYLVRVVSTNYNQHAMVFFKKVSQNREYFKITLYGRTKELTSELKENFIRFSKSLGLPENHIVFPVPIDQCIDG

SEQ ID NO: 157427 - protein, 200 aa, Artificial Sequence
  derived and/or modified sequence
MPLGLLWLGLALLGALHAQAQDSTSDLIPAPPLSKVPLQQNFQDNQFQGKWYVVGLAGNAILREDKDPQKMYATIYELKEDKSYNVTSVLFRQWKKKCDYWIRTFVPGCQPGEFTLGNIKSYPGLTSYLVRVVSTNYNQHAMVFFKKVSQNREYFKITLYGRTKELTSELKENFIRFSKSLGLPENHIVFPVPIDQCIDG

SEQ ID NO: 157428 - protein, 198 aa, Artificial Sequence
  derived and/or modified sequence
MPLGLLWLGLALLGALHAQAQDSTSDLIPAPPLSKVPLQQNFQDNQFQGKWYVVGLAGNAILREDKDPQKMYATIYELKEDKSYNVTSVLFRKKKCDYWIRTFVPGCQPGEFTLGNIKSYPGLTSYLVRVVSTNYNQHAMVFFKKVSQNREYFKITLYGRTKELTSELKENFIRFSKSLGLPENHIVFPVPIGNGQSG

SEQ ID NO: 157429 - DNA, 597 bp, Artificial Sequence
  derived and/or modified sequence
atgccattaggtctcctctggctagggttagccctcctaggcgcactgcatgctcaggcacaagattctacatcggatctgattccagcccccccactatctaaggttcctctccaacagaattttcaggataaccaattccagggaaagtggtatgttgtagggctggccgggaacgccatcctgcgggaagacaaggaccctcaaaaaatgtatgccaccatctacgagctcaaagaggacaaatcctacaacgtcacgagcgtattgtttagaaaaaagaagtgtgactactggatccggacgttcgtaccaggttgtcagcctggtgagtttaccctgggaaacattaagtcctatccagggctgacaagttacctggttcgggtggtgagcacaaactacaatcaacacgccatggtattctttaagaaagtcagtcagaatcgagagtacttcaaaattacactctacggaagaaccaaggaactgaccagtgagctgaaggaaaattttatccgtttttctaagtctcttggtcttccagaaaaccacattgtgtttcctgtcccaattgaccagtgcatagatgggtag

SEQ ID NO: 157430 - DNA, 603 bp, Artificial Sequence
  derived and/or modified sequence
atgccactcggactcctgtggctggggctcgccctgctgggagctcttcacgcccaggcacaggactcgactagtgatctgatacctgctccaccactgtctaaggtccctctgcagcagaatttccaagacaaccagttccaaggaaagtggtatgtggtcggactggccggtaacgcaattctgcgtgaggacaaggacccacagaagatgtacgccaccatctatgaactgaaggaggataagtcctacaatgttacatccgtccttttccgggagaaggctcagaagtgcgactactggattcggaccttcgtccctggatgtcagccaggcgagtttactcttgggaacataaagagctatcccggcctcaccagctacctggtgagagttgtgtcaacaaattacaatcaacacgctatggtatttttcaaaaaagtttcacagaaccgggagtacttcaagataaccctgtatggtaggactaaagaattgacaagtgaactgaaagagaatttcattaggttttccaagtcccttggcctgccagagaaccatattgtcttccctgtccccattgaccagtgcattgacggttag

SEQ ID NO: 157431 - DNA, 603 bp, Artificial Sequence
  derived and/or modified sequence
atgccattaggactgctgtggcttgggctggcccttctcggtgcccttcacgctcaggcacaagattccacttcagacctgattcccgccccccctctcagcaaagtgccgctgcagcagaactttcaggacaaccaattccagggaaagtggtacgtagttggattagctggtaatgctattctgagagaggataaagaccctcagaagatgtacgcaacaatctatgaactgaaggaggataagtcgtacaatgtgaccagcgtcctgttccgtcagtggaaaaaaaaatgcgattactggatccgcacttttgtccctgggtgccagcccggcgaatttacgctcggaaacatcaaatcctaccccgggttgacatcttatctagtcagggtggtaagtaccaattacaaccagcatgctatggtctttttcaagaaagtcagccagaatcgggaatatttcaagattactctatatggtcggacaaaagagttgacgtccgaactgaaggaaaacttcattagattctccaagtctttgggcctgccagagaatcatattgtctttccagtcccaattgaccagtgcatcgatggttag

SEQ ID NO: 157432 - DNA, 597 bp, Artificial Sequence
  derived and/or modified sequence
atgcctttagggctcctgtggctgggccttgccctgctgggtgctctgcacgcccaagcacaggactccacatctgatttgatcccggcacctcccctgtcaaaagtgcccctgcagcagaatttccaggacaaccagtttcaaggtaagtggtacgtcgtcggccttgccggcaacgctatcctccgcgaggataaggacccccagaagatgtatgcaactatatatgagctgaaggaagacaagtcttacaacgtgacctccgtgttattccggaagaaaaaatgtgactattggattagaacattcgtgcccggatgtcagccaggagaattcactctggggaatatcaagtcgtatccagggttaacaagctacctggtaagggttgtgtccaccaattataaccagcacgccatggtgttctttaagaaagtatcacaaaatcgagaatatttcaagattactttgtatggcagaaccaaggaactcactagcgagctcaaggagaatttcatccggttttccaagtcgctagggctccccgagaaccacatcgtctttcctgtgcccatcgaccagtgtattgacggttag

SEQ ID NO: 157433 - DNA, 597 bp, Artificial Sequence
  derived and/or modified sequence
atgcctctggggcttctgtggcttggcctagccttgcttggcgctctgcacgcccaagcgcaagatagcacttccgacctgatcccagctccacccctgtccaaagttccactacagcagaattttcaggataaccagtttcagggtaaatggtatgtcgtggggcttgccggaaacgctattctgagggaggacaaggatcctcagaagatgtatgccaccatctatgagctgaaagaagataaatcgtataacgtgacatccgtgctgtttcggaagaaaaagtgcgattactggattcgtacatttgtgcccggctgccagcccggagagtttacacttggcaacataaaatcgtatcccggcttgacgagttacctcgtgagggtggtgtcgaccaactacaaccagcacgccatggtctttttcaagaaggtgagtcagaatagggagtacttcaagattacactgtacggtcgtaccaaagagctcacttctgagttgaaggagaactttatccggttttccaagagcttgggattgccggaaaaccacatcgtgttcccagtccccatcgggaacgggcaaagtgggtag

SEQ ID NO: 157434 - DNA, 597 bp, Artificial Sequence
  derived and/or modified sequence
atgcccctgggcctgctgtggctgggcctggccctgctgggcgccctgcacgcccaggcccaggacagcaccagtgacctgatcccagccccacccctgagcaaggtgcccctgcagcagaacttccaggacaaccagttccagggcaagtggtacgtggtgggcctggccggaaatgccatcctgcgggaggacaaggacccccagaagatgtatgccaccatctatgagctgaaggaggacaagagctacaacgtgacctctgtgctcttcaggaagaagaagtgtgactactggatccgcacctttgtgcccggctgccagcctggagagttcaccctgggcaacatcaagagctacccaggcctgaccagctacctggtgcgggtggtgtccaccaactacaaccagcacgccatggtgttcttcaagaaggtgtcccagaaccgggagtacttcaagatcaccctgtatggccgcaccaaggagctgaccagcgagctgaaggagaacttcatccgcttcagcaagagcctgggcctgcctgagaaccacatcgtgtttcctgtgcccatcgaccagtgcattgatggatag

SEQ ID NO: 157435 - DNA, 603 bp, Artificial Sequence
  derived and/or modified sequence
atgcccctgggcctgctgtggctgggcctggccctgctgggcgccctgcacgcccaggcccaggacagcaccagtgacctgatcccagccccacccctgagcaaggtgcccctgcagcagaacttccaggacaaccagttccagggcaagtggtacgtggtgggcctggccggaaatgccatcctgcgggaggacaaggacccccagaagatgtatgccaccatctatgagctgaaggaggacaagagctacaacgtgacctctgtgctcttccgggagaaggcccagaagtgtgactactggatccgcacctttgtgcccggctgccagcctggagagttcaccctgggcaacatcaagagctacccaggcctgaccagctacctggtgcgggtggtgtccaccaactacaaccagcacgccatggtgttcttcaagaaggtgtcccagaaccgggagtacttcaagatcaccctgtatggccgcaccaaggagctgaccagcgagctgaaggagaacttcatccgcttcagcaagagcctgggcctgcctgagaaccacatcgtgtttcctgtgcccatcgaccagtgcattgatggatag

SEQ ID NO: 157436 - DNA, 603 bp, Artificial Sequence
  derived and/or modified sequence
atgcccctgggcctgctgtggctgggcctggccctgctgggcgccctgcacgcccaggcccaggacagcaccagtgacctgatcccagccccacccctgagcaaggtgcccctgcagcagaacttccaggacaaccagttccagggcaagtggtacgtggtgggcctggccggaaatgccatcctgcgggaggacaaggacccccagaagatgtatgccaccatctatgagctgaaggaggacaagagctacaacgtgacctctgtgctcttccggcagtggaagaagaagtgtgactactggatccgcacctttgtgcccggctgccagcctggagagttcaccctgggcaacatcaagagctacccaggcctgaccagctacctggtgcgggtggtgtccaccaactacaaccagcacgccatggtgttcttcaagaaggtgtcccagaaccgggagtacttcaagatcaccctgtatggccgcaccaaggagctgaccagcgagctgaaggagaacttcatccgcttcagcaagagcctgggcctgcctgagaaccacatcgtgtttcctgtgcccatcgaccagtgcattgatggatag

SEQ ID NO: 157437 - DNA, 597 bp, Artificial Sequence
  derived and/or modified sequence
atgcccctgggcctgctgtggctgggcctggccctgctgggcgccctgcacgcccaggcccaggacagcaccagtgacctgatcccagccccacccctgagcaaggtgcccctgcagcagaacttccaggacaaccagttccagggcaagtggtacgtggtgggcctggccggaaatgccatcctgcgggaggacaaggacccccagaagatgtatgccaccatctatgagctgaaggaggacaagagctacaacgtgacctctgtgctcttcaggaagaagaagtgtgactactggatccgcacctttgtgcccggctgccagcctggagagttcaccctgggcaacatcaagagctacccaggcctgaccagctacctggtgcgggtggtgtccaccaactacaaccagcacgccatggtgttcttcaagaaggtgtcccagaaccgggagtacttcaagatcaccctgtatggccgcaccaaggagctgaccagcgagctgaaggagaacttcatccgcttcagcaagagcctgggcctgcctgagaaccacatcgtgtttcctgtgcccatcggaaatggccagagcggctag

SEQ ID NO: 157438 - DNA, 822 bp, Artificial Sequence
  derived and/or modified sequence
actcgccacctcctcttccacccctgccaggcccagcagccaccacagcgcctgcttcctcggccctgaaatcatgcccctaggtctcctgtggctgggcctagccctgttgggggctctgcatgcccaggcccaggactccacctcagacctgatcccagccccacctctgagcaaggtccctctgcagcagaacttccaggacaaccaattccaggggaagtggtatgtggtaggcctggcagggaatgcaattctcagagaagacaaagacccgcaaaagatgtatgccaccatctatgagctgaaagaagacaagagctacaatgtcacctccgtcctgtttaggaaaaagaagtgtgactactggatcaggacttttgttccaggttgccagcccggcgagttcacgctgggcaacattaagagttaccctggattaacgagttacctcgtccgagtggtgagcaccaactacaaccagcatgctatggtgttcttcaagaaagtttctcaaaacagggagtacttcaagatcaccctctacgggagaaccaaggagctgacttcggaactaaaggagaacttcatccgcttctccaaatctctgggcctccctgaaaaccacatcgtcttccctgtcccaatcgaccagtgtatcgacggctgagtgcacaggtgccgccagctgccgcaccagcccgaacaccattgagggagctgggagaccctccccacagtgccacccatgcagctgctccccaggccaccccgctgatggagccccaccttgtctgctaaataaacatgtgccctcaggcc

SEQ ID NO: 157439 - DNA, 631 bp, Artificial Sequence
  derived and/or modified sequence
ctgaaatcatgcccctaggtctcctgtggctgggcctagccctgttgggggctctgcatgcccaggcccaggactccacctcagacctgatcccagccccacctctgagcaaggtccctctgcagcagaacttccaggacaaccaattccaggggaagtggtatgtggtaggcctggcagggaatgcaattctcagagaagacaaagacccgcaaaagatgtatgccaccatctatgagctgaaagaagacaagagctacaatgtcacctccgtcctgtttagggagaaggcccagaagtgtgactactggatcaggacttttgttccaggttgccagcccggcgagttcacgctgggcaacattaagagttaccctggattaacgagttacctcgtccgagtggtgagcaccaactacaaccagcatgctatggtgttcttcaagaaagtttctcaaaacagggagtacttcaagatcaccctctacgggagaaccaaggagctgacttcggaactaaaggagaacttcatccgcttctccaaatctctgggcctccctgaaaaccacatcgtcttccctgtcccaatcgaccagtgtatcgacggctgagtgcacagtgagtgtggctg

SEQ ID NO: 157440 - DNA, 828 bp, Artificial Sequence
  derived and/or modified sequence
actcgccacctcctcttccacccctgccaggcccagcagccaccacagcgcctgcttcctcggccctgaaatcatgcccctaggtctcctgtggctgggcctagccctgttgggggctctgcatgcccaggcccaggactccacctcagacctgatcccagccccacctctgagcaaggtccctctgcagcagaacttccaggacaaccaattccaggggaagtggtatgtggtaggcctggcagggaatgcaattctcagagaagacaaagacccgcaaaagatgtatgccaccatctatgagctgaaagaagacaagagctacaatgtcacctccgtcctgtttagacagtggaaaaagaagtgtgactactggatcaggacttttgttccaggttgccagcccggcgagttcacgctgggcaacattaagagttaccctggattaacgagttacctcgtccgagtggtgagcaccaactacaaccagcatgctatggtgttcttcaagaaagtttctcaaaacagggagtacttcaagatcaccctctacgggagaaccaaggagctgacttcggaactaaaggagaacttcatccgcttctccaaatctctgggcctccctgaaaaccacatcgtcttccctgtcccaatcgaccagtgtatcgacggctgagtgcacaggtgccgccagctgccgcaccagcccgaacaccattgagggagctgggagaccctccccacagtgccacccatgcagctgctccccaggccaccccgctgatggagccccaccttgtctgctaaataaacatgtgccctcaggcc

SEQ ID NO: 157441 - DNA, 848 bp, Artificial Sequence
  derived and/or modified sequence
ggcattcattctttcctttctgtgggtgtggggaggggaccacagggcacataccccaccctgggatccagctgagcaggggggtcagagatgacagctcttccggctcacaggccaccggcccacatacagggcaatcagaagaaagaaacagcacaaggaaggcacagagggagtcgttgtccctgccagaggcccagcagccaccacagcgcctgcttcctcggccctgaaatcatgcccctaggtctcctgtggctgggcctagccctgttgggggctctgcatgcccaggcccaggactccacctcagacctgatcccagccccacctctgagcaaggtccctctgcagcagaacttccaggacaaccaattccaggggaagtggtatgtggtaggcctggcagggaatgcaattctcagagaagacaaagacccgcaaaagatgtatgccaccatctatgagctgaaagaagacaagagctacaatgtcacctccgtcctgtttaggaaaaagaagtgtgactactggatcaggacttttgttccaggttgccagcccggcgagttcacgctgggcaacattaagagttaccctggattaacgagttacctcgtccgagtggtgagcaccaactacaaccagcatgctatggtgttcttcaagaaagtttctcaaaacagggagtacttcaagatcaccctctacgggagaaccaaggagctgacttcggaactaaaggagaacttcatccgcttctccaaatctctgggcctccctgaaaaccacatcgtcttccctgtcccaatcgaccagtgtatcgacggctgagtgcacagtgagtg

SEQ ID NO: 157442 - DNA, 1109 bp, Artificial Sequence
  derived and/or modified sequence
actcgccacctcctcttccacccctgccaggcccagcagccaccacagcgcctgcttcctcggccctgaaatcatgcccctaggtctcctgtggctgggcctagccctgttgggggctctgcatgcccaggcccaggactccacctcagacctgatcccagccccacctctgagcaaggtccctctgcagcagaacttccaggacaaccaattccaggggaagtggtatgtggtaggcctggcagggaatgcaattctcagagaagacaaagacccgcaaaagatgtatgccaccatctatgagctgaaagaagacaagagctacaatgtcacctccgtcctgtttaggaaaaagaagtgtgactactggatcaggacttttgttccaggttgccagcccggcgagttcacgctgggcaacattaagagttaccctggattaacgagttacctcgtccgagtggtgagcaccaactacaaccagcatgctatggtgttcttcaagaaagtttctcaaaacagggagtacttcaagatcaccctctacgggagaaccaaggagctgacttcggaactaaaggagaacttcatccgcttctccaaatctctgggcctccctgaaaaccacatcgtcttccctgtcccaatcggtaatggccagtctggatgaggggacggggacatggggactgttcaggcaggatgcttccctaccagggatcagggagaggagggactccgtcctcagcttcagtcactggagcagtggatggtccaggagctccttggaagccactctgggcccaggaagactgtgccccaccccagggtctatgggactcccagggacccaggccgcaagtgctctttcctggcagtttagcccgggtctgcccagacaaggatttcaggcccaggcctgagtatccatttctcagtctcactggcctgacacctctggccaccctcccaggcccccttgttctgggccatctcccccgaccctcccaggcctcgtcaccctgggttttgctgtcctggctgtcctctctcccctggggacttgctcaccactgacttgggagctgtccttgactccagggagcctg

SEQ ID NO: 157443 - DNA, 597 bp, Artificial Sequence
  derived and/or modified sequence
atgcccctgggcctgctgtggctgggcctggccctgctgggcgccctgcatgcccaagcccaggactctacctccgatctgattccagccccccccctgtctaaagtaccgctccaacagaacttccaagacaatcagttccaaggcaagtggtacgtcgtgggcctggccggcaatgccatcctccgagaagataaggacccacagaaaatgtatgcaactatctatgaattgaaggaggacaaaagctacaacgtcacatccgtgctgttccggaagaagaagtgcgattactggatacgtacttttgtcccagggtgccaacccggcgagtttactttggggaacatcaaaagttatcctggtctcacttcttatttagtccgagtggtgtcaactaactacaaccagcacgcaatggtcttcttcaaaaaagtgtctcagaaccgcgaatactttaaaataaccttatacggtagaacaaaggagttgacgagtgaactgaaagagaacttcatcaggttctccaaatcactgggactacctgagaaccatatcgtgttccctgtgccaattgaccaatgtatagatggctag

SEQ ID NO: 157444 - DNA, 603 bp, Artificial Sequence
  derived and/or modified sequence
atgcccctgggcctgctgtggctgggcctggccctgctgggcgccctgcacgcacaggcccaggacagtacctctgatttgatacccgctccacccctgtctaaagtgccattgcagcagaattttcaggataatcagttccagggcaaatggtacgtggtagggctggctggtaacgctattctgcgtgaagacaaggatccccaaaagatgtatgcaactatttatgaactgaaggaggataagtcctacaatgtgacatccgtgctttttcgcgagaaagctcagaaatgtgactactggattcgaacctttgttccgggctgccagccaggggagttcacccttgggaatatcaagagctatccagggctgaccagctatctagtgcgggtggtgtccactaattacaaccagcacgccatggtcttcttcaagaaggtgagtcagaaccgggagtactttaagattactttgtatggtagaaccaaagagctgacatccgagctgaaggagaattttatacgattctcgaagtcactgggtctgcccgagaatcacatcgtttttccggttcccatcgaccagtgcatcgatggatag

SEQ ID NO: 157445 - DNA, 603 bp, Artificial Sequence
  derived and/or modified sequence
atgcccctgggcctgctgtggctgggcctggccctgctgggcgccctgcatgcacaggcacaagattccacttccgacctcatcccagcaccccctctctcaaaagttcctctccagcaaaatttccaagataaccagtttcagggtaaatggtacgttgttggattagcgggtaacgccatactgcgagaagataaggatccacagaagatgtatgcaaccatatacgaactcaaggaggacaagtcgtacaatgtcacgtccgtgctgtttcgtcagtggaagaaaaaatgcgactattggattcggaccttcgtgcccggatgccagcctggcgaatttactctcggaaacattaaatcctacccaggcctaacaagttacctggtgagggtggtaagtaccaattacaaccagcatgctatggtgttttttaagaaagtatcacagaatagggagtatttcaaaataactctgtatggtagaaccaaggaactgacgtccgaactgaaggaaaatttcatccgcttttccaagagcctggggcttccagagaaccatattgtgttcccagtcccaatcgatcagtgcatcgatggttag

SEQ ID NO: 157446 - DNA, 597 bp, Artificial Sequence
  derived and/or modified sequence
atgcccctgggcctgctgtggctgggcctggccctgctgggcgccctacatgcacaggcacaggatagcacttcagatctgatacctgcccccccacttagtaaggttccgctgcagcaaaatttccaagacaaccagtttcaaggaaaatggtatgtggtggggctggccgggaacgccatcctaagggaggacaaagacccgcagaagatgtacgccaccatttatgaactgaaggaggataagtcctacaacgtgacctctgtgctgtttcgcaaaaagaagtgcgattactggatcagaacattcgtgcctgggtgccagccgggtgagtttacactggggaacatcaaaagctacccaggacttacaagttacctggttcgcgtggtctcaactaattataatcagcacgccatggtgtttttcaagaaagtatcacaaaatagggagtattttaaaatcactttgtatgggcggaccaaggaactgacatccgaactcaaagaaaatttcatccggttcagtaagtctctggggctacctgagaaccacatagtcttccctgtacccatagatcagtgcattgacggttag

SEQ ID NO: 157447 - DNA, 597 bp, Artificial Sequence
  derived and/or modified sequence
atgcccctgggcctgctgtggctgggcctggccctgctgggcgccttacatgcacaggctcaggatagtacaagcgacttgatcccagcccctccactttccaaggtccctttacagcagaattttcaggacaatcagttccagggcaagtggtacgtagtgggcctagccggtaatgcaattctgcgcgaagacaaagatcctcagaaaatgtatgcgacaatctatgaactgaaagaggacaagagttacaatgtgaccagtgtgctattccgaaaaaagaagtgcgactattggatccggactttcgtgcctggctgtcagcccggcgagttcaccctcgggaatattaagtcctacccagggctgacatcgtacttggtgagggtggtgtctactaactataaccagcacgctatggtgttttttaaaaaagtgagccagaacagggaatactttaaaataaccctgtatggaaggaccaaggaacttacaagtgagctgaaagagaatttcataaggttcagtaagagtctaggactgccagagaatcacattgtatttcctgtaccaattggcaatggtcagagcggatag

SEQ ID NO: 157448 - DNA, 597 bp, Artificial Sequence
  derived and/or modified sequence
atgccccttggtctcctgtggctaggactcgctttgctcggagctctccacgcccaggcccaggactctacttctgacctcatccccgctcctccgttatctaaggtcccactccagcagaatttccaggataaccaatttcagggcaaatggtatgtggtggggctggccggtaatgctattctgagggaagacaaagaccctcagaaaatgtatgcaaccatctacgaattaaaggaggataagagctataacgtgacctctgtcctgttccgcaagaaaaagtgtgattattggattcggaccttcgtccctggctgccagcccggagaatttaccttaggcaacatcaagtcgtaccctggactgacatcatacctggtgcgggtcgtgtccacgaattataatcagcacgccatggtgttcttcaaaaaagtctctcagaaccgagaatatttcaagatcaccctgtatggcagaaccaaggaattgaccagtgaactgaaggaaaatttcatccggttcagcaagtcgcttggtctgccagagaatcacatagtatttccagtacccattgaccaatgcattgatggctag

SEQ ID NO: 157449 - DNA, 603 bp, Artificial Sequence
  derived and/or modified sequence
atgccgctcggcctattatggctgggactggcgctcctgggcgcactacatgcccaggcacaagactctactagcgacctgatccctgctccgccattgtccaaggttccactgcagcaaaatttccaggacaatcagttccaaggaaagtggtacgtagtcggcctggccggaaatgccattctgagggaagacaaggaccctcaaaagatgtatgccacaatctacgaactgaaagaggacaagagttataacgtgacttctgtactgttccgcgagaaggcacagaaatgcgattattggatccgcacgttcgtccctgggtgccagcccggagagtttactctcggcaacatcaagagctacccaggcttaacctcttacctggtgcgagtggtgtccacaaattataatcagcacgccatggtgttcttcaaaaaagtatcgcaaaaccgcgaatacttcaagattactctatatggcagaactaaagaactgacatctgagttaaaggaaaattttattcgctttagtaagagcctcggcttacccgagaaccatattgtttttcctgtaccaatagatcagtgcatcgacggctag

SEQ ID NO: 157450 - DNA, 603 bp, Artificial Sequence
  derived and/or modified sequence
atgccactggggcttctgtggctggggttggcactccttggcgcactacacgctcaggcgcaagacagtacctccgacttgattccagccccacctctcagcaaagtgcccttgcagcagaacttccaggacaaccaatttcaaggcaaatggtacgtggtagggttggcgggtaacgctatcctgcgagaagacaaggatcctcagaagatgtacgctacaatttatgagctgaaagaagataaatcatacaatgttacttctgttttgtttcggcagtggaagaagaagtgcgactattggatccgtacctttgtccccggatgccagcctggcgagttcacgttgggaaacatcaagtcttacccgggactcacaagttacctggttcgcgtggtctccacaaattataaccagcacgccatggtttttttcaagaaggttagtcagaatagggagtatttcaagataaccttgtacggtcgcacaaaggagctgacatccgaactcaaggagaacttcataagattttccaagtcgctggggctgcccgagaaccatatcgtgtttcccgttcccattgatcaatgtatagacggctag

SEQ ID NO: 157451 - DNA, 597 bp, Artificial Sequence
  derived and/or modified sequence
atgcccctgggtctcctgtggcttggcctggcattgttgggcgctcttcacgcccaggctcaggacagcacctccgatctgatccctgccccacccctgtcgaaggtgccactgcagcaaaactttcaggataatcaatttcagggcaagtggtatgtggtagggctggccggtaacgccatccttagggaagataaggatccccagaaaatgtacgcaactatctacgaactcaaggaagacaagtcttacaacgtgacttcagtgctgtttcgcaagaaaaaatgtgactattggatccgaacctttgtgcctggctgccagcccggtgaatttactcttggtaatatcaagtcttacccaggcctcacatcataccttgtcagggtcgtctccacgaactataatcagcacgccatggttttttttaagaaggtgagtcagaaccgagaatacttcaagattactttatacggtcggacaaaggagctcacaagtgaactgaaagagaactttatccggttcagcaaaagcctgggccttccagaaaaccacattgtgttcccggtgccaattgaccagtgtatagacggttag

SEQ ID NO: 157452 - DNA, 597 bp, Artificial Sequence
  derived and/or modified sequence
atgccactgggcctgctttggcttggcctcgccctgctgggagcactgcatgcgcaggcgcaggactccacctctgacctgattcctgcaccgcctctctcaaaagtacctctccagcagaactttcaagacaatcagttccaagggaagtggtacgtggtgggactcgcaggcaatgcgattctgagagaggataaagacccccagaaaatgtacgctactatctatgaactcaaggaagacaagagctacaacgtgacttccgtcctgttcaggaagaaaaagtgcgattattggatcagaacattcgtcccaggatgtcagcccggtgagttcacgctggggaacatcaaaagttatccaggcctgacctcttacctggtgagggttgttagtactaattataatcagcacgccatggtgttttttaaaaaggttagtcaaaatcgtgaatattttaagattactctgtacggaagaactaaggaactcaccagcgagcttaaggaaaactttatccggttttccaagagcctaggtttgcctgagaatcacattgtattcccagtacccatcggaaacgggcagtctggctag

SEQ ID NO: 157453 - DNA, 597 bp, Artificial Sequence
  derived and/or modified sequence
atgcccctgggcctgctgtggctgggcctggccctgctgggcgccctgcacgcccaggcccaggacagcaccagcgacctgatccccgccccccccctgagcaaggtgcccctgcagcagaacttccaggacaaccagttccagggcaagtggtacgtggtgggcctggccggcaacgccatcctgagagaggacaaggacccccagaagatgtacgccaccatctacgagctgaaggaggacaagagctacaacgtgaccagcgtgctgttcagaaagaagaagtgcgactactggatcagaaccttcgtgcccggctgccagcccggcgagttcaccctgggcaacatcaagagctaccccggcctgaccagctacctggtgagagtggtgagcaccaactacaaccagcacgccatggtgttcttcaagaaggtgagccagaacagagagtacttcaagatcaccctgtacggcagaaccaaggagctgaccagcgagctgaaggagaacttcatcagattcagcaagagcctgggcctgcccgagaaccacatcgtgttccccgtgcccatcgaccagtgcatcgacggctag

SEQ ID NO: 157454 - DNA, 603 bp, Artificial Sequence
  derived and/or modified sequence
atgcccctgggcctgctgtggctgggcctggccctgctgggcgccctgcacgcccaggcccaggacagcaccagcgacctgatccccgccccccccctgagcaaggtgcccctgcagcagaacttccaggacaaccagttccagggcaagtggtacgtggtgggcctggccggcaacgccatcctgagagaggacaaggacccccagaagatgtacgccaccatctacgagctgaaggaggacaagagctacaacgtgaccagcgtgctgttcagagagaaggcccagaagtgcgactactggatcagaaccttcgtgcccggctgccagcccggcgagttcaccctgggcaacatcaagagctaccccggcctgaccagctacctggtgagagtggtgagcaccaactacaaccagcacgccatggtgttcttcaagaaggtgagccagaacagagagtacttcaagatcaccctgtacggcagaaccaaggagctgaccagcgagctgaaggagaacttcatcagattcagcaagagcctgggcctgcccgagaaccacatcgtgttccccgtgcccatcgaccagtgcatcgacggctag

SEQ ID NO: 157455 - DNA, 603 bp, Artificial Sequence
  derived and/or modified sequence
atgcccctgggcctgctgtggctgggcctggccctgctgggcgccctgcacgcccaggcccaggacagcaccagcgacctgatccccgccccccccctgagcaaggtgcccctgcagcagaacttccaggacaaccagttccagggcaagtggtacgtggtgggcctggccggcaacgccatcctgagagaggacaaggacccccagaagatgtacgccaccatctacgagctgaaggaggacaagagctacaacgtgaccagcgtgctgttcagacagtggaagaagaagtgcgactactggatcagaaccttcgtgcccggctgccagcccggcgagttcaccctgggcaacatcaagagctaccccggcctgaccagctacctggtgagagtggtgagcaccaactacaaccagcacgccatggtgttcttcaagaaggtgagccagaacagagagtacttcaagatcaccctgtacggcagaaccaaggagctgaccagcgagctgaaggagaacttcatcagattcagcaagagcctgggcctgcccgagaaccacatcgtgttccccgtgcccatcgaccagtgcatcgacggctag

SEQ ID NO: 157456 - DNA, 597 bp, Artificial Sequence
  derived and/or modified sequence
atgcccctgggcctgctgtggctgggcctggccctgctgggcgccctgcacgcccaggcccaggacagcaccagcgacctgatccccgccccccccctgagcaaggtgcccctgcagcagaacttccaggacaaccagttccagggcaagtggtacgtggtgggcctggccggcaacgccatcctgagagaggacaaggacccccagaagatgtacgccaccatctacgagctgaaggaggacaagagctacaacgtgaccagcgtgctgttcagaaagaagaagtgcgactactggatcagaaccttcgtgcccggctgccagcccggcgagttcaccctgggcaacatcaagagctaccccggcctgaccagctacctggtgagagtggtgagcaccaactacaaccagcacgccatggtgttcttcaagaaggtgagccagaacagagagtacttcaagatcaccctgtacggcagaaccaaggagctgaccagcgagctgaaggagaacttcatcagattcagcaagagcctgggcctgcccgagaaccacatcgtgttccccgtgcccatcggcaacggccagagcggctag

SEQ ID NO: 157457 - protein, 533 aa, Artificial Sequence
  derived and/or modified sequence
MALRNVPFRSEVLGWDPDSLADYFKKLNYKDCEKAVKKYHIDGARFLNLTENDIQKFPKLRVPILSKLSQEINKNEERRSIFTRKPQVPRFPEETESHEEDNGGWSSFEEDDYESPNDDQDGEDDGDYESPNEEEEAPVEDDADYEPPPSNDEEALQNSILPAKPFPNSNSMYIDRPPSGKTPQQPPVPPQRPMAALPPPPAGRNHSPLPPPQTNHEEPSRSRNHKTAKLPAPSIDRSTKPPLDRSLAPFDREPFTLGKKPPFSDKPSIPAGRSLGEHLPKIQKPPLPPTTERHERSSPLPGKKPPVPKHGWGPDRRENDEDDVHQRPLPQPALLPMSSNTFPSRSTKPSPMNPLPSSHMPGAFSESNSSFPQSASLPPYFSQGPSNRPPIRAEGRNFPLPLPNKPRPPSPAEEENSLNEEWYVSYITRPEAEAALRKINQDGTFLVRDSSKKTTTNPYVLMVLYKDKVYNIQIRYQKESQVYLLGTGLRGKEDFLSVSDIIDYFRKMPLLLIDGKNRGSRYQCTLTHAAGYP

SEQ ID NO: 157458 - DNA, 1602 bp, Artificial Sequence
  derived and/or modified sequence
atggcacttcgcaatgtaccattcaggtccgaggtcttgggatgggatccagattccctagccgattactttaagaagctgaactacaaagactgtgagaaggccgtgaagaagtatcacattgatggtgccaggtttctgaacctgacagaaaatgatatccagaagtttccaaaactgcgtgtgcctatactcagtaagctcagccaggagatcaacaaaaatgaagagcgtaggagcatttttacaaggaaaccccaggtgccccgttttccagaagagacagagtcccatgaagaggataacggcggttggtctagcttcgaggaggatgattatgagtctcccaatgacgaccaagacggcgaggacgacggggactacgagtctccaaacgaggaagaagaagcgcccgtggaagatgatgccgattacgagccaccgccgtcaaacgacgaagaggcgcttcagaattctatcctgcctgctaaaccgttcccaaatagcaactctatgtacatcgatagacccccctccggtaaaacgcctcagcagccccccgtgcctccacagcgcccgatggcggctctgcctcccccccccgctggacggaaccacagcccgctgcctcctccacagaccaatcacgaagagccctcccggagccgaaaccataagacagctaagctcccggccccctccattgacagaagtacaaaaccaccattggatcgctccttggctcccttcgaccgggaaccttttaccctcgggaagaagcccccgttctctgacaagcccagcattcccgcaggtcgttccttaggagagcacctgccaaaaattcagaagcctcctctgcctcctacaacagaaagacacgagaggagcagtcccctccctggcaagaagcccccagtgcccaaacacggatggggcccggatagaagggaaaacgacgaggatgatgtacaccagcgccctcttccgcagccagccctcctccccatgtcaagtaatactttcccgagtcgcagtactaaaccttctcctatgaatcctctgccaagctcacatatgccaggtgcctttagcgagagtaactcatcttttccacaaagcgcaagcctgccaccttacttctcacaggggccgtcaaatcgaccccccattagagctgaaggcaggaactttccattaccactccccaataaacctcgcccgccgagccccgcagaggaagagaacagcctgaacgaagaatggtatgttagctatatcacacggcctgaggctgaagcagccctccgtaaaatcaaccaagatggcacctttttggtaagagattcaagcaagaagacaacaaccaacccttacgtgctcatggtgttatacaaggataaagtttataatatccagatcaggtaccagaaagagagccaagtatatctgctgggaactgggctacggggtaaagaagacttccttagcgtgtctgacattatcgattacttcaggaagatgcctctgctgctgatagatggcaagaatcgaggctccagataccaatgcactttgacccatgcggccgggtatccatag

SEQ ID NO: 157459 - DNA, 1602 bp, Artificial Sequence
  derived and/or modified sequence
atggccctgagaaatgtgcccttccgctctgaggtgctgggctgggaccctgacagcctggccgactacttcaagaagctgaactacaaggactgtgagaaggctgtgaagaagtaccacattgatggagcccgcttcctgaacctgacagaaaatgacatccagaagttccccaagctgcgggtgcccatcctgagcaagctgagccaggagatcaacaagaatgaggagcggcgcagcatcttcaccaggaagccccaggtgccccgcttccctgaggagacagagagccatgaggaggacaatggaggctggagcagctttgaggaggatgattatgagagccccaatgatgaccaggatggagaagatgatggagactatgagagccccaatgaggaggaggaggcccctgtggaggatgatgctgactatgagcccccacccagcaatgatgaggaggccctgcagaacagcatcctgcctgccaagcccttccccaacagcaacagcatgtacatcgacaggcctccttctgggaagaccccccagcagccccctgtgcccccccagaggcccatggccgccctgcccccacctcctgctggcaggaaccacagccccctgcccccaccccagaccaaccacgaggagcccagccgcagcaggaaccacaagacagccaagctgcctgcccccagcattgacaggagcaccaagccacccctggacaggagcctggccccctttgaccgggagcccttcaccctgggcaagaagccacccttcagtgacaagcccagcatcccagctggccgcagcctgggggagcacctgcccaagatccagaagccacccctgccccccaccacagaaagacatgagaggagcagccccctgcccgggaagaagccccctgtgcccaagcacggctggggccctgaccggcgggagaatgatgaagatgatgtgcaccagaggcccctgccccagcctgccctgctgcccatgagcagcaacaccttccccagccgcagcaccaagcccagccccatgaaccccctgcccagcagccacatgcctggggccttcagcgagagcaacagcagcttcccccagagcgccagcctgcccccctacttcagccagggccccagcaacagaccacccatccgggcagagggcaggaacttccccctgcccctgcccaacaagccccggccccccagccctgctgaggaggagaacagcctgaatgaggagtggtacgtgtcctacatcaccaggcctgaggccgaggccgccctgaggaagatcaaccaggacggcaccttcctggtgcgggacagcagcaagaagaccaccaccaacccctacgtgctgatggtgctgtacaaggacaaggtgtacaacatccagatccgctaccagaaggagagccaggtgtacctgctgggcaccggcctgcggggcaaggaggacttcctgtctgtgtctgacatcatcgactacttcaggaagatgcccctgctgctgattgatggcaagaacagaggcagccgctaccagtgcaccctgacccatgctgctggctacccctag

SEQ ID NO: 157460 - DNA, 4678 bp, Artificial Sequence
  derived and/or modified sequence
gacaactgtaaagaggcagctgaaagaatcccagtctttgatggtgggaggggaaagtggttggaaagcattaaaaaaacatgctccagcagttcactgatgtgggaaattgtctgtatttcaggtcaaccgtcaggatagattttggtctgcaaagccccagctgagcaagaatgcagtgtagacatatgggtgcccagagtttaaaggaaaattactcagactcacattggagtttaagaccccttcattgcctctcctactgggttggggtgactggagccagtggggaattaccaaccctgtggctctctctgcatctcaagcctccagagctgggcttccttgtttacttatttagagcccagcagaggaagtggtaaaggaaactagctgagtcgttttctgagaagagaccatatttgttcgcagaggaagccgttgctttctgggatctggctacgccagaaaagacatcggctccaacaggggtgttccacagggtagctgggagttggaagagccaagaacgcctccgagctctggatttgagcttctctgcccatgggtgaagcgcccatgctcagcttgtgagcttcttcccgggagagcagccatggcactgaggaatgtgccctttcgctcagaggtcctgggctgggaccccgacagccttgctgactatttcaagaagctcaactataaggactgtgagaaggcagtgaagaagtaccacatcgatggggctcgcttcttgaacctgacagaaaatgacatccagaagttccccaagctccgggtgccgattctcagtaagttaagtcaggaaatcaacaagaacgaagagaggaggagcatcttcacacgcaaaccccaagtcccgcggtttcctgaagagacagaaagccacgaagaggacaatgggggctggtcgtcctttgaagaagacgattatgaaagtcccaatgatgaccaggatggggaggatgatggagactatgagtcccccaatgaggaggaagaggcacccgtggaagatgacgcggattatgagccgccaccctccaatgacgaggaagctctgcagaactccatcctgcctgccaagcctttccccaactccaactccatgtacatcgaccggcccccctctgggaaaaccccccagcagcctcctgtgcccccccagagaccgatggccgccctcccgcccccaccagccggccggaatcactcgccactgcccccaccccagaccaaccacgaagaacccagcagaagcagaaaccacaaaacggcaaagctccctgctccttcaatagacagaagcacgaaacctcccctagatcgttcattagctccgtttgatagagaacccttcacactaggaaagaaaccaccattttctgacaagccctcgattccagcgggaaggtcactcggggagcatttacccaagattcaaaagcctcctttaccaccgaccacggaaagacatgaaaggagcagccccctgccagggaagaagccacctgtgccaaagcatggatggggaccagacagaagagagaatgatgaagatgatgtgcatcagagacctttgccccagccagcactacttcctatgagctccaacactttcccttcaagatctactaagccaagtcccatgaaccctctcccatcctctcacatgcctggagcattctcagaaagtaacagcagttttccacagagtgcctccctgccaccatacttctctcaaggccctagcaacagaccacctatcagagccgaaggcagaaacttccccttgccacttccaaacaaacctcggcccccatcccccgcggaggaagagaattcattaaatgaagagtggtacgtttcttatattacccgaccagaggcagaagctgctcttagaaagataaaccaggatggcacatttctggtcagagacagctctaaaaaaacaacaaccaatccatatgtcctcatggtgttgtacaaagataaagtttacaacatccagatccgttatcagaaggaaagtcaagtttacttgttgggaactggactccgagggaaagaggactttctgtctgtgtcagatattattgactacttcaggaaaatgccacttctgctcattgatgggaaaaaccgaggttccagataccagtgcacattaacgcatgctgcagggtacccatagcaagttatagccgagcaaatgaaccgtcctcctgcctctgttgccaacacgagatcaatcagccttggtcaatggacaaacacttaggactgaactgaacccctccccatgaacacaagggttttatcctttcctttaaaaacagtgtttgaaatgaagactgtcaactatcccataatttatttattcttcttcaatgtttgtaaagtgcatgagtcatgttcacacttgaagtctagtagtgcactgtaataattcattttttaaaagattatttaatgcccatttcaaaatacagtagtttacacagctacagaaacaatttggggcaagttttaaaacactgaaacagtaatagttattggtgtcacataaaactgatttgttttttacagccaaacctctgtcagtcagaggcattcattagttttatacatgtaatttgaaaatcactaaacctcgttttctcagcagcaataatttaagaggcttcaaaaatataatttcactcttatttagtattttttcctgggggcatttttacgtaatttttttatgaaaagacaaatgcatgttgagataacttctgggattaaaatagtcttttgctttacttttttggtttcctaaaacaactttattgacttttagtccatactgttatatttttgtcttaaagaaaatttaaactacaaataccaaaagaaaacattttaaatttagggatgagactttggtgtatcgtgggtctaggtttaatgaacacatctggggttaagttggcatttcttcacatctccacacccacaccaaccatcacagccccccaccaaccttctcccaaccccaaaagcattgtccagggatatagattttaccaaaggcttcctgggaagacgagggagcaacactttagattaaatgtgatcagactttcctattagatatggctcttctgtctcttgttatccccctgacagctctgccataaagtcccttctcctcatccttcccaaacaggctgtataagtgctttgaggtaattaaactctttcctccagtttacaaatatcacttaacaaaaaatataggcattcagccagattaaaaaactggtattcagccaaatagtgacaatcagttgttcttcaagtttttccctttgggaccttggttgttattgcacaacttttattagcaacaatttttggcgtctctgcttaatctacaagttttcgaaatggaaaagagtatcttgcagcttcattttcatgagctaataaaaggggtattggaaggaatctaagaagtcaccattttaaaactgatgatatgttaaaataaggagtatgcagaaggtagagacttttaactgatgataaaaatggtgtttcacaaaatctcatccttaacaaccagaagttctcagtttagggtccaaaacttgggagtttaaggctgaaaaccctgcattcatttacacgtctacacaacgggctattcagcaagtatttacttagtggctcttctgtgttaaacaagtgagctaggtacaaggtagtaaggatagcatacaccataggttctagtatcgagtaagctccacttgtcttgctttgccgtattctatctttacaattcaaaaatatctaaaatgaaggacctgatagatttcaaagcaactatttggtagcgaatcatgtttataaaacaaaccaaagctcattttaagtctattagtggaaagtgccatcaggattaagatgttctgttccatggctatgactgaaatcaatgttgggaagctaatgttttcatgactagcattctctctctgttcaagcaccgacaactccttttggctgggccttgcctcttttggccacagaccttctatatgaccccaggtgcatcagtcacagttgctcagaaccctgctcagtgataaacatcttactaaagctgggtcaatcagggtcactctctggaatgttaaacatgaagcctgagacaagatctctcttttatctggggtccccaaaggcaatgctgtacacttggagctgcctgctgccctgcaactactcccatttaccaattatctggaagaaccagtctacaatagaagacaacgaggccaacacacaaaaacacagtaaaagtatggacaaattagtgggatccctgaaatctattccaactatgtgcttccaagtcacatgactcaataaatgcttcagctggttgagttgtgcttggcgttcactaccaggagagttctgattaataaaaactcattccatcaattaataatttagtagctctctttcaacctgagccaaattcaagcataagctaaaggataagcagtgacccatggccaatttcctatgtcatacacttgccattagtgacgtaagttaagccattcttcaaaacattaaacagccttcaagaaca

SEQ ID NO: 157461 - DNA, 1602 bp, Artificial Sequence
  derived and/or modified sequence
atggccctgcggaacgtgcccttccggagcgaggtgctgggctgggaccccgattccctggccgactacttcaagaagttgaactacaaagattgtgagaaggccgtgaagaaatatcatatcgacggagctcgcttcctgaatttgacagagaacgacatacagaagtttccaaaactgcgggtaccaatcctttcaaaactgagccaagagataaacaagaacgaagaaaggcgctcgatcttcacgcggaagccccaagtgccaaggttccctgaggaaactgagtcacatgaggaagacaatggtgggtggtcgtcattcgaagaggacgactacgagtcccccaatgatgatcaggatggggaggatgatggtgattatgagtccccaaacgaagaggaggaggcccctgttgaggacgatgcagactacgagccacccccatcaaatgacgaggaggcattgcaaaattccattctacctgccaagccatttcctaatagcaactcaatgtacattgaccggcccccatctgggaagactccccagcagcccccagtgcccccgcaacggcctatggcagcacttcccccgccccccgccggtcggaaccattcacccctgccacctccacagaccaaccatgaggaaccaagtagaagtcgcaaccataaaacagccaagctcccagccccttccatcgaccgctccacgaagccgccactggacaggtccttggctccgtttgatagagagcccttcacactcgggaagaaacccccgttcagcgacaagccgtctatccccgccggacggagtctaggagaacaccttcctaagatccagaagccccccctccccccgacgaccgagaggcacgagcgttccagccccctgccgggcaagaagcctccggtgcccaagcatggctggggacccgaccgcagagagaacgacgaggacgatgtgcaccagcggccactgccacagcctgccctgcttcctatgtctagtaacaccttcccttcaaggtcgaccaaaccttcccccatgaatcctttgccatccagccacatgccaggggccttcagcgaatccaattcctccttcccccagtccgcatctttacctccgtacttcagccaaggaccgagtaatcggccccccatccgggctgaagggagaaatttccccctgcctctgcctaacaagccgagaccaccatcacctgccgaggaggaaaatagcctgaatgaggaatggtacgtatcctacatcacaaggccagaggccgaggctgcattgagaaagatcaaccaggacggcaccttccttgtgagagattcgtccaaaaaaacaaccacgaacccatacgtgctgatggtgctgtataaggacaaggtctacaacattcaaattcgataccagaaggagagccaggtctatttgctgggaactggcctcaggggcaaggaagattttttaagcgtctccgacataattgactatttcaggaagatgcccctgttgttgattgatggtaagaatcggggtagcagatatcaatgcacactaacacatgctgccggatatccgtag

SEQ ID NO: 157462 - DNA, 1602 bp, Artificial Sequence
  derived and/or modified sequence
atggccctcagaaacgttcccttccggtcagaagttctggggtgggatccagactctttggccgactatttcaaaaagcttaactataaggattgtgaaaaggcagttaaaaaataccacatcgacggggcaagattcttgaacctcactgaaaatgatatccagaagttccctaagctacgggtccctattctctctaagttaagccaggagatcaataagaacgaagagcggcgttccatatttacccgcaagccacaggtccctaggtttccagaggaaacagaatcccatgaagaagataatgggggatggagcagttttgaggaagacgactacgagtccccaaatgatgatcaggatggagaagacgacggcgattacgagagccccaacgaggaggaggaggctcctgtggaagatgacgctgattacgaacctcctccttcgaatgacgaggaggcccttcagaatagtatcttgcctgcaaaacctttccctaactctaactcaatgtacatcgataggcctccctcgggcaagactcctcagcaacccccagttcccccacaaagacccatggccgcactgccccctcctccagccggtcgtaatcacagcccactgccccctcctcagacgaatcatgaggagccgagtcgttcacgcaaccataaaacagctaaactgcctgctcctagcatcgacagatctacaaaacccccactcgatagatcccttgcacctttcgatagagaaccatttacactaggaaaaaagcctccttttagtgacaagccgtccatacccgcaggacgtagtctaggcgaacatctacccaagatccagaagcccccattgccacccacgacggagaggcacgagagaagcagccccctgcccggaaaaaagcccccagtgcccaagcacggttggggaccagaccgaagggagaatgatgaagatgacgtgcaccagcgacccctaccacaacccgctcttctccctatgagttctaataccttccctagcaggtccactaagccatcaccgatgaaccccctgccatcttcacatatgcctggggctttttctgaaagcaattctagcttcccccagagtgctagcttgcccccttatttcagccaaggacccagtaatcgacctccgatccgtgccgaaggtcgaaactttcccctgccgctgccgaataaacccagacccccatcgccagctgaagaggagaacagcctgaatgaagagtggtatgtcagctacataacccgccctgaggctgaagccgcactgagaaagatcaatcaagacgggacattcctcgtgcgtgacagctctaaaaagacgacaaccaacccctatgttctgatggtgctttataaggataaagtgtacaatatccagatacgctatcagaaagagtcccaggtctatttgttgggtacaggcctgcgcggaaaggaggatttcctgtctgtgtcagacatcatcgattacttccggaagatgcccctcttgcttatcgacgggaagaaccgcggtagccgctaccagtgtacgctgactcatgccgctggctacccttag

SEQ ID NO: 157463 - DNA, 1602 bp, Artificial Sequence
  derived and/or modified sequence
atggccctgagaaatgtgccgttcagaagtgaggtgctgggatgggatcctgactctttggcggattacttcaaaaaacttaactataaagattgtgaaaaagccgttaaaaagtatcacatcgacggtgctaggttcctgaatctgactgaaaatgacatccagaaatttccaaaactccgggttcccatcttatcaaagcttagccaggaaatcaacaaaaacgaggaaaggcgctccatctttacacgtaagcctcaagtcccccggttccctgaggaaaccgagtctcacgaagaggataacggaggttggagctcttttgaagaagacgattacgaatcccctaacgatgaccaggacggtgaggatgacggggactatgaaagtccgaacgaggaagaagaagcaccagtagaagatgacgcagactatgagcctcccccgtcgaacgatgaggaggctctgcaaaactcaatcttgcccgccaagccattcccaaactccaacagcatgtatatcgaccggcctcccagtggaaagactccccagcagccacccgtccctccgcaacggccgatggctgctctcccacccccacccgcaggtcgtaatcattccccactcccccccccacaaactaaccatgaagagcctagtagatcacgcaatcacaagaccgctaaactccccgccccatctattgaccgaagcactaaacctcccttagatagatctctggctccattcgacagggaaccttttaccctcggtaaaaaaccgccattttccgacaaaccctcaattcccgctgggcggagcctgggagaacatttgcccaaaatacagaaaccaccccttccaccgacaactgagcggcacgagcgtagcagccccctgcccggaaagaaaccccccgtgcctaaacatgggtggggccctgatcgcagagagaatgatgaggatgatgtgcaccaaaggcccctgcctcaaccagccctcctgcctatgtcttctaacacgttccctagtcgctcaaccaaaccctctccgatgaacccactacctagttcccacatgcccggagctttcagcgagtccaattcctcattcccacagtccgcttctcttcccccctatttctcacaaggtccaagtaacaggcctcccatccgagcagagggacggaattttccactgccccttccaaataagcctaggccaccatcgccagctgaagaggaaaattccttgaatgaggaatggtatgtgagctacatcacccggcctgaggcagaggctgccctacgcaaaattaaccaggatggtaccttcctagtacgtgacagctccaaaaagaccaccaccaatccttacgtacttatggtgctgtataaggataaagtgtataacatacagatcagatatcagaaagagagccaggtgtacctgcttggaacaggcctgagaggcaaagaggatttcctgtctgtaagcgacattatcgactacttccgcaaaatgccgctactgcttatcgacgggaaaaacaggggctcgcgctaccaatgtactttgacacacgcggctggctacccatag

SEQ ID NO: 157464 - DNA, 1602 bp, Artificial Sequence
  derived and/or modified sequence
atggctttgaggaatgtaccttttcgcagcgaggtcctggggtgggatcccgattcactagccgattatttcaagaagcttaattataaagattgcgagaaggcagtgaagaagtatcatatcgacggagcacggtttctcaatctaacagaaaatgatatccagaagttcccaaagcttagagtcccaatcttatccaagctctcccaagagatcaacaagaacgaagaacgtcgcagcatattcacccgtaaacctcaggttcccagattccccgaggaaaccgagtcacatgaggaggacaacggcggttggagcagttttgaggaagatgattacgaaagccctaacgatgaccaggatggggaggacgatggcgactacgaatcccccaatgaggaagaagaagccccagttgaagacgatgccgactacgaacccccgccttctaacgacgaggaagctctgcagaatagcatactcccagcaaagccattcccgaactccaattcaatgtatatagatagacctccatctggcaagacacctcagcagccccccgtccccccccaacgccccatggctgcactaccaccaccacctgcaggcagaaatcattcacctttgccccccccacagaccaatcatgaggaacctagtaggtcacgcaatcacaaaaccgccaagctgccggccccttccattgaccgttcaaccaaacctcctttagaccgctccctcgctccatttgatcgtgagccttttacactcggcaagaagccaccatttagcgacaaaccctcaataccagccggacgcagtcttggagagcacctccccaaaatccagaagccccccctgccccccaccaccgagagacatgagcgatccagtcccctcccaggaaaaaaaccgcccgttccaaaacacggatggggtccagacagacgcgagaacgacgaagacgatgtgcatcagagaccactgccccagcccgccctcctgcccatgtcttctaatacttttccttccaggtcaactaaaccctcacccatgaatccactgccctcctctcatatgcctggggctttttcagaatccaactctagctttcctcagagcgccagtctcccaccatatttttctcagggtccctctaatagacccccaattcgcgcggaaggccgcaacttccctctcccgctgccgaataaacctagaccccctagtcctgccgaggaggagaattcgctgaacgaagaatggtacgtgtcttacatcacccgacccgaagctgaggctgccctgcggaagatcaatcaggatgggacatttctagttagggacagcagcaagaagacaaccaccaacccttatgtactgatggtattgtacaaagataaagtttacaatattcagattagatatcaaaaagagtcacaagtttatctgctcggaaccgggttgcgcggaaaagaagatttcctatctgtgtccgacataattgactatttccgtaaaatgccgcttctgctcattgacgggaaaaatagaggctcccgctaccaatgcacccttactcatgctgctggctacccatag

SEQ ID NO: 157465 - DNA, 1602 bp, Artificial Sequence
  derived and/or modified sequence
atggccctgagaaacgtgcccttcagaagcgaggtgctgggctgggaccccgacagcctggccgactacttcaagaagctgaactacaaggactgcgagaaggccgtgaagaagtaccacatcgacggcgccagattcctgaacctgaccgagaacgacatccagaagttccccaagctgagagtgcccatcctgagcaagctgagccaggagatcaacaagaacgaggagagaagaagcatcttcaccagaaagccccaggtgcccagattccccgaggagaccgagagccacgaggaggacaacggcggctggagcagcttcgaggaggacgactacgagagccccaacgacgaccaggacggcgaggacgacggcgactacgagagccccaacgaggaggaggaggcccccgtggaggacgacgccgactacgagcccccccccagcaacgacgaggaggccctgcagaacagcatcctgcccgccaagcccttccccaacagcaacagcatgtacatcgacagaccccccagcggcaagaccccccagcagccccccgtgcccccccagagacccatggccgccctgccccccccccccgccggcagaaaccacagccccctgccccccccccagaccaaccacgaggagcccagcagaagcagaaaccacaagaccgccaagctgcccgcccccagcatcgacagaagcaccaagccccccctggacagaagcctggcccccttcgacagagagcccttcaccctgggcaagaagccccccttcagcgacaagcccagcatccccgccggcagaagcctgggcgagcacctgcccaagatccagaagccccccctgccccccaccaccgagagacacgagagaagcagccccctgcccggcaagaagccccccgtgcccaagcacggctggggccccgacagaagagagaacgacgaggacgacgtgcaccagagacccctgccccagcccgccctgctgcccatgagcagcaacaccttccccagcagaagcaccaagcccagccccatgaaccccctgcccagcagccacatgcccggcgccttcagcgagagcaacagcagcttcccccagagcgccagcctgcccccctacttcagccagggccccagcaacagaccccccatcagagccgagggcagaaacttccccctgcccctgcccaacaagcccagaccccccagccccgccgaggaggagaacagcctgaacgaggagtggtacgtgagctacatcaccagacccgaggccgaggccgccctgagaaagatcaaccaggacggcaccttcctggtgagagacagcagcaagaagaccaccaccaacccctacgtgctgatggtgctgtacaaggacaaggtgtacaacatccagatcagataccagaaggagagccaggtgtacctgctgggcaccggcctgagaggcaaggaggacttcctgagcgtgagcgacatcatcgactacttcagaaagatgcccctgctgctgatcgacggcaagaacagaggcagcagataccagtgcaccctgacccacgccgccggctacccctag

SEQ ID NO: 157466 - protein, 332 aa, Artificial Sequence
  derived and/or modified sequence
MATLKDQLIYNLLKEEQTPQNKITVVGVGAVGMACAISILMKDLADELALVDVIEDKLKGEMMDLQHGSLFLRTPKIVSGKDYNVTANSKLVIITAGARQQEGESRLNLVQRNVNIFKFIIPNVVKYSPNCKLLIVSNPVDILTYVAWKISGFPKNRVIGSGCNLDSARFRYLMGERLGVHPLSCHGWVLGEHGDSSVPVWSGMNVAGVSLKTLHPDLGTDKDKEQWKEVHKQVVESAYEVIKLKGYTSWAIGLSVADLAESIMKNLRRVHPVSTMIKGLYGIKDDVFLSVPCILGQNGISDLVKVTLTSEEEARLKKSADTLWGIQKELQF

SEQ ID NO: 157467 - protein, 305 aa, Artificial Sequence
  derived and/or modified sequence
MATLKDQLIYNLLKEEQTPQNKITVVGVGAVGMACAISILMKDLADELAIVSGKDYNVTANSKLVIITAGARQQEGESRLNLVQRNVNIFKFIIPNVVKYSPNCKLLIVSNPVDILTYVAWKISGFPKNRVIGSGCNLDSARFRYLMGERLGVHPLSCHGWVLGEHGDSSVPVWSGMNVAGVSLKTLHPDLGTDKDKEQWKEVHKQVVESAYEVIKLKGYTSWAIGLSVADLAESIMKNLRRVHPVSTMIKGLYGIKDDVFLSVPCILGQNGISDLVKVTLTSEEEARLKKSADTLWGIQKELQF

SEQ ID NO: 157468 - protein, 144 aa, Artificial Sequence
  derived and/or modified sequence
MATLKDQLIYNLLKEEQTPQNKITVVGVGAVGMACAISILMKDLADELALVDVIEDKLKGEMMDLQHGSLFLRTPKIVSGKDYNVTANSKLVIITAGARQQEGESRLNLVQRNVNIFKFIIPNVVKYSPNCKLLIVSNPGEAFD

SEQ ID NO: 157469 - protein, 157 aa, Artificial Sequence
  derived and/or modified sequence
MATLKDQLIYNLLKEEQTPQNKITVVGVGAVGMACAISILMKDLADELALVDVIEDKLKGEMMDLQHGSLFLRTPKIVSGKDYNVTANSKLVIITAGARQQEGESRLNLVQRNVNIFKFIIPNVVKYSPNCKLLIVSNPVDILTYVAWKISGFPKNR

SEQ ID NO: 157470 - DNA, 999 bp, Artificial Sequence
  derived and/or modified sequence
atggccaccctgaaggaccagctgatctacaacctgctgaaggaggagcagaccccccagaacaagatcaccgtggtgggcgtgggcgccgtgggcatggcctgcgccatcagcatcctgatgaaggacctggccgacgagctggccctggtggacgtgatcgaggacaagctgaagggcgagatgatggacctgcagcacggcagcctgttcctgagaacccccaagatcgtgagcggcaaggactacaacgtgaccgccaacagcaagctggtgatcatcaccgccggcgccagacagcaggagggcgagagcagactgaacctggtgcagagaaacgtgaacatcttcaagttcatcatccccaacgtggtgaagtacagccccaactgcaagctgctgatcgtgagcaaccccgtggacatcctgacctacgtggcctggaagatcagcggcttccccaagaacagagtgatcggcagcggctgcaacctggacagcgccagattcagatacctgatgggcgagagactgggcgtgcaccccctgagctgccacggctgggtgctgggcgagcacggcgacagcagcgtgcccgtgtggagcggcatgaacgtggccggcgtgagcctgaagaccctgcaccccgacctgggcaccgacaaggacaaggagcagtggaaggaggtgcacaagcaggtggtggagagcgcctacgaggtgatcaagctgaagggctacaccagctgggccatcggcctgagcgtggccgacctggccgagagcatcatgaagaacctgagaagagtgcaccccgtgagcaccatgatcaagggcctgtacggcatcaaggacgacgtgttcctgagcgtgccctgcatcctgggccagaacggcatcagcgacctggtgaaggtgaccctgaccagcgaggaggaggccagactgaagaagagcgccgacaccctgtggggcatccagaaggagctgcagttctag

SEQ ID NO: 157471 - DNA, 918 bp, Artificial Sequence
  derived and/or modified sequence
atggccaccctgaaggaccagctgatctacaacctgctgaaggaggagcagaccccccagaacaagatcaccgtggtgggcgtgggcgccgtgggcatggcctgcgccatcagcatcctgatgaaggacctggccgacgagctggccatcgtgagcggcaaggactacaacgtgaccgccaacagcaagctggtgatcatcaccgccggcgccagacagcaggagggcgagagcagactgaacctggtgcagagaaacgtgaacatcttcaagttcatcatccccaacgtggtgaagtacagccccaactgcaagctgctgatcgtgagcaaccccgtggacatcctgacctacgtggcctggaagatcagcggcttccccaagaacagagtgatcggcagcggctgcaacctggacagcgccagattcagatacctgatgggcgagagactgggcgtgcaccccctgagctgccacggctgggtgctgggcgagcacggcgacagcagcgtgcccgtgtggagcggcatgaacgtggccggcgtgagcctgaagaccctgcaccccgacctgggcaccgacaaggacaaggagcagtggaaggaggtgcacaagcaggtggtggagagcgcctacgaggtgatcaagctgaagggctacaccagctgggccatcggcctgagcgtggccgacctggccgagagcatcatgaagaacctgagaagagtgcaccccgtgagcaccatgatcaagggcctgtacggcatcaaggacgacgtgttcctgagcgtgccctgcatcctgggccagaacggcatcagcgacctggtgaaggtgaccctgaccagcgaggaggaggccagactgaagaagagcgccgacaccctgtggggcatccagaaggagctgcagttctag

SEQ ID NO: 157472 - DNA, 999 bp, Artificial Sequence
  derived and/or modified sequence
atggccactcttaaagatcaactgatttataacctgttgaaggaggaacagacacctcagaacaagatcaccgtggtcggcgtgggggccgttggtatggcctgcgccattagcattctgatgaaggatctcgcagacgagcttgcactcgttgacgtgattgaagacaaattgaagggcgagatgatggacctgcagcatgggtccctatttctcagaactcctaaaatcgtgtcaggtaaagactacaatgtaaccgcaaatagcaagttagtaatcattaccgcaggtgcccggcagcaggagggtgaaagtagactgaatctggtgcaacgaaatgtcaacatatttaaattcataatccctaacgtggttaagtattccccaaattgcaagcttctgatcgtatccaatcctgtcgatatcttaacttatgtagcatggaaaatatccggctttcctaaaaatcgcgtgattggttctggctgcaatctcgatagcgccagattccgttacctgatgggtgagcgccttggcgtgcatccacttagctgccatgggtgggtgctaggtgaacacggtgatagttcagtgccagtttggtcaggaatgaacgtggccggcgtttcactgaagactctgcatcccgacttggggacagacaaggacaaggaacaatggaaagaggtccacaagcaggtggtggaatctgcatatgaggtgatcaaactcaagggttatacctcctgggccattgggctgtctgtcgcggacctggccgaatccatcatgaaaaacctgaggagagtccatccggtcagtacgatgattaagggcctctacgggatcaaagacgatgtctttctatctgtaccttgtatacttggacaaaacgggatctccgacctggtgaaagtgactcttacgagcgaagaagaggcacgtcttaagaagagcgctgacactttgtggggaatacaaaaagagttacagttctag

SEQ ID NO: 157473 - DNA, 999 bp, Artificial Sequence
  derived and/or modified sequence
atggcaaccttgaaggatcagctgatctataacctgcttaaagaagaacaaacaccacagaacaaaatcactgtggtgggagtcggtgctgtcggaatggcatgcgcaataagtattctgatgaaggacttagcggacgaactggccctggtggatgtaatcgaggacaagcttaaaggtgagatgatggacttgcagcacgggtcactgttcctgcgcacccctaaaatcgtaagcggtaaggactacaacgtcaccgctaattccaaactggtaatcatcactgccggagcacgccagcaggagggggagtcaagacttaacctggtccagagaaacgtgaatatcttcaagtttataattccgaacgttgtgaaatacagccccaactgcaaacttctcatcgtgagtaaccctgtggatattcttacttatgtggcctggaagatctctgggtttcccaaaaaccgagtaatcggaagcgggtgcaatttggacagtgcccgctttaggtatttaatgggcgaacgccttggagtgcatcccctctcgtgtcatgggtgggtgcttggggaacatggagatagctctgtgccagtctggagtggaatgaacgtcgccggagtaagtctgaaaaccctgcacccagatctggggacagacaaggataaagagcaatggaaggaggttcataagcaagtcgtggaaagtgcatatgaagtgataaagttgaagggctataccagttgggccataggtctgtcggtcgcagatttggccgagtcaattatgaagaacttacggagagttcatcctgtttccacaatgatcaaaggcctttacggcattaaggatgatgtttttttgtccgtgccctgcatcctcgggcaaaacggcatttccgatctggtcaaagtcacacttacaagcgaagaggaggcgcgacttaagaaaagtgccgatacactctggggcattcagaaggaactgcaattttag

SEQ ID NO: 157474 - DNA, 918 bp, Artificial Sequence
  derived and/or modified sequence
atggccaccctcaaggatcagttgatctacaacctgctaaaagaagagcagaccccccagaataagattaccgtagtcggagtgggcgccgtgggaatggcttgtgccatctcgattctaatgaaggatctggccgatgaactagctatcgtgagcggcaaggactataatgtcaccgccaacagtaaactagtgatcatcacggccggcgccaggcaacaggagggcgagtcgcggctcaatctcgtacagaggaacgtgaacatttttaaatttatcattccaaatgtggttaaatactccccgaattgcaagctattgatcgtgtccaatcccgtggacattctcacatacgttgcttggaagatctccgggtttcctaagaaccgggtgattggttctggatgcaacctggattctgcaagattcagatacctgatgggggaaaggttgggtgtgcatcctctttcttgccacggctgggtcttgggtgaacatggagattcctccgtgccggtttggtcaggaatgaatgtagctggcgtctcgctcaagacccttcatcccgatctcggtacagataaggataaagaacaatggaaagaagtacataagcaggtcgtcgagagcgcgtatgaagtaataaaactgaagggctacacaagctgggccatcgggctctcggtggcagacttggccgaaagcattatgaaaaatttgaggcgagtacacccggtgtctaccatgatcaaaggactttatggaatcaaggacgacgtattcctcagtgtgccgtgcatcttgggccagaacggcatcagcgacttggtcaaagtaaccctaacatctgaggaggaagcgcggctgaagaagtccgccgacactctgtggggaatccagaaagaactgcagttctag

SEQ ID NO: 157475 - DNA, 999 bp, Artificial Sequence
  derived and/or modified sequence
atggccaccctgaaggatcagctaatttacaacctcctgaaagaagaacagaccccccagaataagatcaccgtggttggcgtgggcgcggttggcatggcttgtgctataagcattttgatgaaggacctcgccgacgaactcgccctcgtagacgtcatagaagacaagcttaagggcgaaatgatggatcttcaacacggaagcttgtttttacgaacacccaaaatcgtatcagggaaggactataacgtaacggctaactctaagcttgttatcatcaccgcaggggcacgtcaacaagagggcgaatcgcgactgaatcttgttcaacgcaacgtcaatatattcaagtttatcattcccaacgtggtcaaatattctcccaactgtaagctcttgatcgttagcaatcctgtggatatcctaacgtacgttgcatggaaaatctccggctttcctaagaacagagtcataggatctggttgcaaccttgattccgccagattcaggtacctgatgggagaaaggctgggagtccatccactgtcttgccacggctgggtgctcggggaacatggggacagttcggtcccagtctggagcggtatgaatgttgccggagtttcacttaagacgctccacccggatctgggcacggacaaagataaggagcagtggaaggaggttcataagcaagttgtggaatcagcctatgaggtaatcaaattaaaagggtatacatcttgggctatcggtctgtcggttgctgatctcgccgagtcaattatgaagaatctaaggcgcgttcaccccgtgagcaccatgataaaaggactttacgggattaaagatgatgtgttcctcagtgtaccttgcattctcgggcagaacggcataagcgatttagtcaaggtcacgctgactagtgaagaggaggctcggctgaagaagtcggccgacactctgtggggcatccaaaaggagctgcaattctag

SEQ ID NO: 157476 - DNA, 999 bp, Artificial Sequence
  derived and/or modified sequence
atggccaccctgaaggaccagctgatctacaacctgctgaaggaggagcagaccccccagaacaagatcaccgtggtgggcgtgggcgctgtgggcatggcctgtgccatcagcatcctgatgaaggacctggctgatgagctggccctggtggatgtgattgaggacaagctgaagggggagatgatggacctgcagcacggcagcctcttcctgcggacccccaagatcgtgtctgggaaggactacaacgtgacagccaacagcaagctggtgatcatcacagctggggcccggcagcaggagggggagagccggctgaacctggtgcagagaaatgtgaacatcttcaagttcatcatccccaacgtggtgaagtacagccccaactgcaagctgctgattgtgagcaaccctgtggacatcctgacctacgtggcctggaagatcagcggcttccccaagaacagagtgattggcagcggctgcaacctggacagcgcccgcttccgctacctgatgggagagcggctgggcgtgcaccccctgagctgccacggctgggtgctgggggagcacggggacagctctgtgcctgtgtggagcggcatgaatgtggccggcgtgtccctgaagaccctgcacccagacctgggcacagacaaggacaaggagcagtggaaggaggtgcacaagcaggtggtggagagcgcctatgaagtcatcaagctgaagggctacacctcctgggccatcggcctgtctgtggccgacctggccgagagcatcatgaagaacctgcggcgggtgcaccctgtgtccaccatgatcaagggcctgtatggcatcaaggatgatgtgttcctgtctgtgccctgcatcctgggccagaatggcatcagtgacctggtgaaggtgaccctgaccagcgaggaggaggcccggctgaagaagtctgctgacaccctgtggggcatccagaaggagctgcagttctag

SEQ ID NO: 157477 - DNA, 918 bp, Artificial Sequence
  derived and/or modified sequence
atggccaccctgaaggaccagctgatctacaacctgctgaaggaggagcagaccccccagaacaagatcaccgtggtgggcgtgggcgctgtgggcatggcctgtgccatcagcatcctgatgaaggacctggctgatgagctggccatcgtgtctgggaaggactacaacgtgacagccaacagcaagctggtgatcatcacagctggggcccggcagcaggagggggagagccggctgaacctggtgcagagaaatgtgaacatcttcaagttcatcatccccaacgtggtgaagtacagccccaactgcaagctgctgattgtgagcaaccctgtggacatcctgacctacgtggcctggaagatcagcggcttccccaagaacagagtcatcggcagcggctgcaacctggacagcgcccgcttccgctacctgatgggagagcggctgggcgtgcaccccctgagctgccacggctgggtgctgggggagcacggggacagctctgtgcctgtgtggagcggcatgaatgtggccggcgtgtccctgaagaccctgcacccagacctgggcacagacaaggacaaggagcagtggaaggaggtgcacaagcaggtggtggagagcgcctatgaggtgatcaagctgaagggctacacctcctgggccatcggcctgtctgtggccgacctggccgagagcatcatgaagaacctgcggcgggtgcaccctgtgtccaccatgatcaagggcctgtatggcatcaaggatgatgtgttcctgtctgtgccctgcatcctgggccagaatggcatcagtgacctggtgaaggtgaccctgaccagcgaggaggaggcccggctgaagaagtctgctgacaccctgtggggcatccagaaggagctgcagttctag

SEQ ID NO: 157478 - DNA, 999 bp, Artificial Sequence
  derived and/or modified sequence
atggccaccctgaaggaccagctgatctacaacctgctgaaggaggagcagacgccccagaataagattacggtggtgggtgtcggtgcagtcggtatggcctgcgccatttctatcctgatgaaggacttggccgacgaactggcactggtggatgtgatcgaagacaagctgaagggcgagatgatggacctgcaacacggatctctcttcttaaggactcccaagatcgtgtcagggaaagattataacgtcacagcaaattctaaactcgtgatcatcactgcgggagcgcggcagcaggaaggggaaagtcggctgaacctggttcagcgcaatgtcaatatctttaagttcattattccaaatgtggtgaagtattccccaaattgtaaactgctgattgtcagtaaccctgttgacatcctgacttacgttgcatggaaaatctccgggttccctaaaaatagagtgatcggatcggggtgcaatctcgacagtgctcggttccgatacctgatgggcgaacgactgggtgtgcatcccttgtcttgccacggctgggtcttgggagagcacggagattctagtgtgcctgtctggtctggaatgaatgtggctggagtgtctctgaaaactctccatccagacctggggactgataaagacaaggagcaatggaaagaagtgcacaaacaggtggtggaaagcgcctacgaagtgattaagcttaaagggtatacatcctgggcaatcgggttatctgtggctgacctggcagagtctattatgaagaatctgaggcgggtacaccctgtgtctactatgattaaaggcctctatgggatcaaggatgacgtgtttttaagtgtaccctgtattctggggcaaaacggcatctcagacttagtgaaagtaacccttacatctgaggaagaagcaaggctgaagaaaagtgccgacaccctgtggggcatccaaaaagagctgcagttctag

SEQ ID NO: 157479 - DNA, 999 bp, Artificial Sequence
  derived and/or modified sequence
atggccaccctgaaggaccagctgatctacaacctgctgaaggaggaacagacaccccagaacaagatcaccgtagtgggtgtgggcgccgtggggatggcctgcgctatcagcattttgatgaaagatctcgccgacgaacttgctcttgtggatgtgatagaggacaagttgaaaggcgaaatgatggacctacagcatggatccctgttcctcaggacccctaaaatagtttcgggaaaagattacaatgtgactgccaactctaagctggtaataatcacagccggcgcgcggcagcaggagggggagtccagattgaatttggtccaacggaacgtcaatattttcaagtttatcattcccaacgtggtcaaatattcccccaactgcaaactgctgattgtgagtaatcctgtggacattttaacatacgtggcttggaagatctccggattccccaaaaacagagtcattggctccggttgtaacttggattccgcaagattccggtacttaatgggagaaagactgggagtgcatccactgagctgccatgggtgggtgctgggagagcacggcgacagctctgtccccgtctggtcgggcatgaatgttgccggggtttctctgaagacactccatcccgaccttggaactgacaaagacaaagaacagtggaaggaggtgcataagcaggtcgttgaatctgcctacgaagtaataaaactcaaaggctacactagctgggccatcgggttaagcgtggccgatctggccgagtccatcatgaagaatctacggcgagtgcaccccgtgtccaccatgataaagggcctgtatggcattaaagacgacgtgttcctttccgtgccttgcatcctgggacaaaacggtatttctgacctggtcaaagtaacactgaccagtgaggaagaagcgaggctcaagaagtcagccgacaccctgtggggaatccagaaggaactccagttttag

SEQ ID NO: 157480 - DNA, 918 bp, Artificial Sequence
  derived and/or modified sequence
atggccaccctgaaggaccagctgatctacaacctgctgaaggaggagcagacgccccaaaataaaatcacagtggtcggggtcggagccgttggtatggcttgcgccatctccatcctgatgaaggacctcgctgacgaattggctattgtgtctgggaaagattataatgtaacagctaacagcaagttagtaattatcactgctggagcccgacagcaggaaggtgaatctcgtctaaacctggtccagcggaatgtcaacatcttcaaattcataatcccaaatgtcgtgaaatacagccctaattgtaagcttctgatagtgtcaaacccagtggacatcctaacttacgttgcctggaaaatttctggctttcccaagaatcgagtcatcggttccggatgcaacctagactccgcccgctttcgctacctgatgggcgagaggctgggcgtgcatccgctgtcttgccatggctgggtgctcggggagcatggcgatagctctgtaccggtgtggagcggaatgaacgttgccggcgtctccctgaagaccctgcaccccgatctggggacagataaagacaaggagcaatggaaagaggtccataaacaggtcgttgagtcagcatacgaagttattaaactgaagggctacacctcttgggcaataggcctgtctgtggccgacctggctgagagtattatgaagaatctgaggcgggtgcacccagtttccaccatgataaagggcttgtatgggattaaagatgacgtatttctgagcgttccgtgtatcctggggcagaacggcatcagcgatctggtgaaagtgaccttaactagtgaggaggaggcacgtcttaagaagtcagcagacacgttatggggcatccagaaagaacttcagttctag

SEQ ID NO: 157481 - DNA, 999 bp, Artificial Sequence
  derived and/or modified sequence
atggccaccctgaaggaccagctgatctacaacctgctgaaggaggagcaaacgccccagaataagataacagtcgtcggagtaggggctgttggtatggcttgcgcaattagcattttgatgaaagacttagcagacgaactcgccctcgtggacgtaatcgaggacaagctgaaaggagaaatgatggacctgcaacacggatccctctttcttagaactccgaaaattgtttccggcaaagattataatgtgacagctaacagcaaattagtaataatcaccgccggcgctagacagcaagagggcgaaagccggctgaacctggtccaaagaaatgttaacatcttcaagtttatcatacccaatgtggtgaaatattcaccaaattgcaagcttctcatcgtgagtaaccctgtagatattctgacctatgtagcttggaaaataagcggctttcccaaaaaccgggtcatagggtcaggctgcaacctggactcagccagattcagatatttgatgggagagcgtctgggcgtgcaccccctatcatgccatgggtgggtactgggggaacatggcgattctagcgtccccgtttggtccggcatgaatgttgcgggagtatccctgaagacgctgcatcccgacttggggactgacaaggataaagagcagtggaaggaggtgcacaaacaagtggtcgaatcggcctacgaggttattaaattgaagggttacacgagttgggccatcgggctgagcgtggcagatctggctgaatcaataatgaagaacctgaggcgtgttcaccccgtttcaaccatgataaagggattatacggtatcaaggacgatgttttcctgtctgtcccctgtattctgggacaaaacggtatcagcgacttggtcaaggtgactcttaccagcgaggaggaggcccgcctcaagaagtctgcagacactctgtggggtattcagaaagagctccaattctag

SEQ ID NO: 157482 - DNA, 999 bp, Artificial Sequence
  derived and/or modified sequence
atggccactctgaaggaccagctcatttacaacctcctgaaagaagaacagacaccccagaacaaaattacagtcgtgggtgtcggagctgtgggcatggcctgcgctatttcgatccttatgaaagatctggccgacgagttggcactcgttgacgtaattgaggacaaactgaagggggaaatgatggatcttcaacatggctctctctttctcaggaccccgaagatcgtaagtggaaaggattataatgtaactgctaattccaaactcgtcataattaccgcaggcgctaggcaacaggagggtgagtcccgtctgaaccttgttcaacggaacgtaaacattttcaaattcatcataccaaatgtcgttaagtatagcccgaattgcaaattactcatcgtgtccaacccggtggacattctgacctatgtggcgtggaaaataagcggctttccaaagaatagagtaattggatcaggctgcaacctggacagcgccaggttccgatacctgatgggcgagcggctgggggtgcatcccctgtcttgccatgggtgggtcttgggcgaacacggcgactcaagcgtgccagtttggagtggtatgaatgtggcgggagtctctttaaaaacactacatccagacctaggcacagacaaggataaagagcagtggaaggaggtccacaaacaggttgtcgaatcggcctatgaagtaatcaaactcaaaggatatacctcctgggcgattggtctctctgtggctgacctagccgagagcataatgaagaacctgagaagagtgcacccggtgagtactatgatcaaaggcttgtacgggatcaaggacgacgtgttcctgtctgtaccctgtatcctgggtcagaacggcatttccgacctcgtaaaggttacgttaacgagtgaagaagaagctcgtctgaagaagtctgctgatacattatggggcatacagaaagagctacaattttag

SEQ ID NO: 157483 - DNA, 999 bp, Artificial Sequence
  derived and/or modified sequence
atggcaactttaaaggaccagctgatttacaacctgctgaaggaggagcagacaccacagaataagatcactgtggtaggcgtgggagccgtagggatggcttgtgctatatcaatcctcatgaaggacctggcagacgagttggccctggtagacgtcatcgaggacaagctgaagggcgaaatgatggacttgcagcacggcagtctattcctgagaacacctaagattgtgtcgggcaaagattacaacgtcactgctaatagtaaactcgttattataaccgctggcgctcgccagcaggaaggagagtcccgactgaacctcgtacaacgaaatgtgaatatattcaagtttattattccaaacgtggttaagtacagccctaactgtaaactgcttattgtaagtaatccggtggacatcttaacatatgttgcctggaagataagcggttttccaaaaaatagagttataggatctggttgcaaccttgactcagccagattcagatacctaatgggcgagcgcctgggcgtccatccactgtcgtgtcatggttgggtgctcggcgagcatggtgactctagcgttcctgtgtggtccggtatgaacgtcgccggtgtatctctgaagacactgcaccctgatctgggcacagacaaagataaagagcagtggaaggaggttcacaaacaagtggtggaaagcgcttatgaggtgattaaactcaagggctatacgtcatgggcaatcggactctcggtggcggatttggctgaaagcatcatgaagaacctgagaagagtgcacccagtctccacgatgataaaaggtttgtatggcatcaaggatgacgtcttccttagcgtaccgtgcatcctaggacaaaatgggatcagcgatctggtgaaagtgacccttacctccgaggaggaggccaggctgaaaaaatcagctgatacactatggggcatccagaaagagctgcaattctag

SEQ ID NO: 157484 - DNA, 918 bp, Artificial Sequence
  derived and/or modified sequence
atggcgacactcaaagaccagctgatatacaatctcctgaaggaggaacaaaccccccaaaataaaatcacggtagtaggagtcggggcagttggcatggcatgtgctattagcattcttatgaaagacttagctgatgaactggcaattgtgtccggaaaggattacaacgtgaccgctaactccaagcttgtgataatcaccgctggcgcacgtcagcaggagggagagagtcggctcaacctggtgcagaggaacgtcaatattttcaagttcattataccaaacgtggttaagtacagtcctaattgtaaactgctcattgtgtcgaacccggtggatattctcacatacgtggcctggaaaatctcaggcttccccaaaaatagagtgatcggcagcggttgtaaccttgacagcgccaggtttagatatttaatgggcgagcgtctcggcgtgcaccccctcagctgccacggctgggttctgggggagcatggggactcatccgtgcccgtgtggagcggcatgaatgtggcaggagtgagtttgaagacactccaccccgacctgggcactgacaaagataaagagcagtggaaagaggttcacaagcaggtggtcgaatcagcctacgaggtgatcaagttaaaaggatacacatcctgggcgatcggcctgagtgtggctgacttggccgaatcgataatgaagaacctccgccgtgtccaccccgtctctacaatgatcaagggcttatacggaattaaagatgacgtatttctgagcgtcccttgtatcttgggacagaatgggatcagtgatttagtgaaggtgaccctgacgagcgaggaggaagccagactgaagaaatccgccgatacattgtggggaattcagaaggagctgcagttttag

SEQ ID NO: 157485 - DNA, 999 bp, Artificial Sequence
  derived and/or modified sequence
atggcaactctcaaagatcagctcatttataatctgctgaaggaggagcagacccctcaaaacaaaatcactgtcgttggcgtcggcgctgtgggcatggcatgtgcaattagcatactcatgaaagatttagccgacgagctggcattggtggacgtgatcgaggacaagctgaaaggcgagatgatggatttacagcatggtagcctgttcctcagaaccccaaaaatagtgtccggaaaggattataacgtgacagctaacagtaagttagtcattattacagccggagctagacagcaggagggcgagtctaggctgaatctcgtccaacgcaatgtgaatatatttaagttcatcatcccaaacgtggtgaaatatagccctaactgcaagttacttatcgtttccaaccccgtcgacatattgacttacgtggcttggaagataagcgggttccctaagaatagagttatcgggagcgggtgcaatttagacagtgctaggtttagatatttgatgggagaaaggcttggagttcaccctctgagctgccacggctgggtcctaggggagcatggcgattcttccgttcccgtctggtctggcatgaatgtggccggtgtgtccctcaagacactccacccagatctgggcaccgacaaagacaaggaacagtggaaagaagtccacaaacaggtggtcgagtcagcttatgaggtcattaagctgaagggctacacaagttgggcgattggtctgtctgtggccgacctggccgaatccataatgaagaacctgcgtagagttcaccccgtgagtactatgataaagggcctgtatggtatcaaagatgatgtgtttctcagcgttccttgtatccttggccaaaatggaattagtgacctagtgaaagtgacattgacatcggaagaagaagccagactcaaaaagtctgcggatactttgtggggaatccagaaagagttacaattctag

SEQ ID NO: 157486 - protein, 585 aa, Artificial Sequence
  derived and/or modified sequence
MTPPRLFWVWLLVAGTQGVNDGDMRLADGGATNQGRVEIFYRGQWGTVCDNLWDLTDASVVCRALGFENATQALGRAAFGQGSGPIMLDEVQCTGTEASLADCKSLGWLKSNCRHERDAGVVCTNETRSTHTLDLSRELSEALGQIFDSQRGCDLSISVNVQGEDALGFCGHTVILTANLEAQALWKEPGSNVTMSVDAECVPMVRDLLRYFYSRRIDITLSSVKCFHKLASAYGARQLQGYCASLFAILLPQDPSFQMPLDLYAYAVATGDALLEKLCLQFLAWNFEALTQAEAWPSVPTDLLQLLLPRSDLAVPSELALLKAVDTWSWGERASHEEVEGLVEKIRFPMMLPEELFELQFNLSLYWSHEALFQKKTLQALEFHTVPFQLLARYKGLNLTEDTYKPRIYTSPTWSAFVTDSSWSARKSQLVYQSRRGPLVKYSSDYFQAPSDYRYYPYQSFQTPQHPSFLFQDKRVSWSLVYLPTIQSCWNYGFSCSSDELPVLGLTKSGGSDRTIAYENKALMLCEGLFVADVTDFEGWKAAIPSALDTNSSKSTSSFPCPAGHFNGFRTVIRPFYLTNSSGVD

SEQ ID NO: 157487 - protein, 573 aa, Artificial Sequence
  derived and/or modified sequence
MTPPRLFWVWLLVAGTQGVNDGDMRLADGGATNQGRVEIFYRGQWGTVCDNLWDLTDASVVCRALGFENATQALGRAAFGQGSGPIMLADCKSLGWLKSNCRHERDAGVVCTNETRSTHTLDLSRELSEALGQIFDSQRGCDLSISVNVQGEDALGFCGHTVILTANLEAQALWKEPGSNVTMSVDAECVPMVRDLLRYFYSRRIDITLSSVKCFHKLASAYGARQLQGYCASLFAILLPQDPSFQMPLDLYAYAVATGDALLEKLCLQFLAWNFEALTQAEAWPSVPTDLLQLLLPRSDLAVPSELALLKAVDTWSWGERASHEEVEGLVEKIRFPMMLPEELFELQFNLSLYWSHEALFQKKTLQALEFHTVPFQLLARYKGLNLTEDTYKPRIYTSPTWSAFVTDSSWSARKSQLVYQSRRGPLVKYSSDYFQAPSDYRYYPYQSFQTPQHPSFLFQDKRVSWSLVYLPTIQSCWNYGFSCSSDELPVLGLTKSGGSDRTIAYENKALMLCEGLFVADVTDFEGWKAAIPSALDTNSSKSTSSFPCPAGHFNGFRTVIRPFYLTNSSGVD

SEQ ID NO: 157488 - DNA, 1758 bp, Artificial Sequence
  derived and/or modified sequence
atgacacctccccgcctgttttgggtgtggctgctcgtagccggaacccaaggggtgaatgacggtgacatgcggcttgccgacggaggcgcaacaaaccaggggcgcgtcgaaatcttctaccgcggccaatggggtacagtatgcgacaacttgtgggatctcaccgacgcctccgtcgtttgtcgcgcgcttggcttcgagaacgctacgcaagcactcgggcgcgcggcatttgggcagggcagcggcccgattatgttggatgaggtccagtgcacaggtactgaggcatctctggctgattgtaagtccctaggctggctgaaaagtaattgtcggcatgaacgggacgcaggtgtagtgtgcacaaatgaaactagaagcactcatacgttagacttatccagagaattatctgaagcccttggccagatcttcgatagtcagcgcgggtgtgatctctctataagcgtgaacgttcagggggaagatgccctgggattttgcggacacaccgttatcctaaccgcaaacctggaggctcaagcgctgtggaaggaacccggatctaacgttaccatgagcgtcgatgccgagtgcgtgcctatggtgcgcgatctactgcgctacttctattctcggcggatcgacatcacgctttctagcgttaagtgcttccacaaactcgcctcagcgtatggggcaagacagctgcagggctattgtgcatccctgtttgccattctgctgccgcaggacccttcctttcagatgccgctcgacctgtacgcatatgccgtggcaaccggagatgccctgctggagaagctttgccttcagtttctggcttggaatttcgaggcactgacacaagccgaagcctggcccagcgtgcctacagatctgctccagcttctgcttccacggtctgatttagccgtgccttcggaattagccctgctgaaggctgttgacacatggtcctggggcgagagagctagtcacgaggaggtggaaggtttggtggagaagattcgcttccccatgatgttgcccgaagaactgttcgagttgcagtttaatctcagcctatactggagccatgaggctttgttccaaaagaagactctacaggccctggagttccacactgtgccgttccagctgctggccaggtataagggcctcaacctcactgaggatacctataagcctagaatatacacaagccctacctggtctgcttttgtgacagacagcagctggagcgcacggaagtcccagctggtatatcagagccgacggggtccactggtgaagtattcttcagactacttccaggcacctagcgactatagatactacccgtatcaaagctttcagacgccgcagcaccccagctttctgttccaggataaaagggtgtcatggtcactggtgtatctgcccactattcaatcgtgctggaactacgggttcagctgtagctcagacgaactcccggtgctggggctcactaagtccggaggctccgacagaactatcgcctatgagaacaaagccctgatgctatgcgagggcctgttcgtggcagatgtgaccgactttgaggggtggaaggctgcaatcccaagcgctcttgacaccaatagcagtaaaagtacatcgtcctttccttgcccagccggtcacttcaacggttttagaactgtgataaggccattttatttaacgaacagttcaggagtggactag

SEQ ID NO: 157489 - DNA, 1722 bp, Artificial Sequence
  derived and/or modified sequence
atgacgccacccaggcttttctgggtttggctgctggtggcagggacacagggcgtgaacgacggggacatgcgactggctgatggaggggccacaaatcagggcagggtagagatattctacagagggcagtggggaacggtatgtgataacctgtgggacctcaccgacgccagtgtggtgtgtcgagcactgggcttcgaaaacgccactcaggccctggggcgggcggccttcggtcaaggcagtggtcccattatgctagccgactgcaaatcactgggttggctgaagagcaattgtaggcatgagagggatgcaggcgtggtgtgtaccaacgaaacccgctctacccacactctggacctctctcgagagctcagcgaggctctaggacagatatttgactcacagagaggctgcgatctgtctatctccgtgaatgtccaaggcgaagacgcattaggcttctgtggccacacagtgatcttaacagcgaacctggaggcccaagctctgtggaaggagcctggcagcaacgtcactatgtctgtggacgccgagtgtgtgcctatggttcgcgatctgctgcgttatttctacagccgcagaatcgatattaccctctctagcgtcaagtgttttcataaacttgcatcggcttacggcgcgagacagctgcagggctactgcgcatccctgtttgctattctgctgccacaggaccccagctttcagatgcctctggacctgtacgcttatgcggtagcaaccggcgacgcccttctggaaaaactgtgcctgcagtttctggcatggaattttgaagctctgacgcaggccgaggcttggcccagcgtgcccacagacctcttgcaactgttgttaccccgcagtgatttagccgttccctctgaattagcgttgctgaaagcagtggatacttggtcctggggcgagcgggcgtctcacgaagaggtggagggcctcgttgaaaagatacgatttcctatgatgctgcctgaggagctgtttgagttacagttcaatctgtcactgtactggtctcacgaggctttatttcagaaaaagacactccaagccctggagtttcatacggtgcctttccaattactggcaagatataaaggactaaacttgactgaagatacgtacaagccccggatttacacaagccctacctggagcgcttttgtcactgattcctcatggagcgctcggaaatcccagctagtttaccagtcacgtcgtggaccactcgtgaagtactcttccgattactttcaggcaccctctgattatcgctattacccatatcaaagcttccaaactccccagcacccttcttttttattccaagacaagcgagtgtcatggagcctggtttacctccctacgatccagagctgctggaattacgggttctcttgttcctctgacgagctgccggtgctgggtttgactaagtcaggtggatctgacagaaccatcgcctacgagaataaggctctcatgctttgtgaaggcttgtttgtcgcagacgtcactgattttgaagggtggaaggcagccatccccagcgctctcgatactaattcatctaaatccactagctcgttcccctgccctgcaggacacttcaatggcttccgcaccgtgatcaggcccttttatcttacaaatagctccggagtggattag

SEQ ID NO: 157490 - DNA, 1758 bp, Artificial Sequence
  derived and/or modified sequence
atgaccccacccaggctcttctgggtgtggctgctggtggccggcacccagggcgtgaatgatggagacatgaggctggctgatggaggagccaccaaccagggccgggtggagatcttctaccggggccagtggggcaccgtgtgtgacaacctgtgggacctgacagatgcctctgtggtgtgccgggccctgggctttgaaaatgccacccaggccctgggccgggccgccttcggccagggcagcggccccatcatgctggatgaggtgcagtgcaccggcacagaggccagcctggccgactgcaagagcctgggctggctgaagagcaactgcagacatgaaagagatgctggggtggtgtgcaccaatgagaccaggagcacccacaccctggacctgagccgggagctgtctgaggccctgggccagatctttgacagccagaggggctgtgacctgagcatctctgtgaatgtgcagggagaagatgccctgggcttctgtggccacacagtcatcctgacagccaacctggaggcccaggccctgtggaaggagcccggcagcaatgtgaccatgtctgtggatgctgaatgtgtgcccatggtgcgggacctgctgcgctacttctacagcagaagaattgacatcaccctgagctctgtgaagtgcttccacaagctggccagcgcctacggggcccggcagctgcagggctactgtgccagcctgtttgccatcctgctgccccaggaccccagcttccagatgcccctggacctgtatgcctatgctgtggccactggagatgccctgctggagaagctgtgcctgcagttcctggcctggaactttgaggccctgacccaggccgaggcctggcccagcgtgcccacagacctgctgcagctgctgctgcccaggagtgacctggccgtgcccagcgagctggccctgctgaaggctgtggacacctggagctggggcgagcgggccagccatgaggaggtggagggcctggtggagaagatccgcttccccatgatgctgcctgaggagctgtttgagctgcagttcaacctgagcctgtactggagccatgaggccctcttccagaagaagaccctgcaggccctggagttccacacagtgcccttccagctgctggcccgctacaagggcctgaacctgacagaggacacctacaagccccgcatctacaccagccccacctggagcgcctttgtgacagacagctcctggagcgccaggaagagccagctggtgtaccagagcagaagaggccccctggtgaagtacagcagtgactacttccaggcccccagcgactaccgctactacccctaccagagcttccagaccccccagcaccccagcttcctgttccaggacaagagggtgtcctggagcctggtgtacctgcccaccatccagagctgctggaactacggcttcagctgcagcagtgatgagctgcctgtgctgggcctgaccaagagcggcggcagtgacaggaccatcgcctatgagaacaaggccctgatgctgtgtgagggcctgtttgtggctgatgtgacagactttgagggctggaaggccgccatccccagcgccctggacaccaacagcagcaagagcaccagcagcttcccctgcccagctggccacttcaacggcttcagaactgtcatccggcccttctacctgaccaacagcagcggcgtggactag

SEQ ID NO: 157491 - DNA, 1722 bp, Artificial Sequence
  derived and/or modified sequence
atgaccccacccaggctcttctgggtgtggctgctggtggccggcacccagggcgtgaatgatggagacatgaggctggctgatggaggagccaccaaccagggccgggtggagatcttctaccggggccagtggggcaccgtgtgtgacaacctgtgggacctgacagatgcctctgtggtgtgccgggccctgggctttgaaaatgccacccaggccctgggccgggccgccttcggccagggcagcggccccatcatgctggccgactgcaagagcctgggctggctgaagagcaactgcagacatgaaagagatgctggggtggtgtgcaccaatgagaccaggagcacccacaccctggacctgagccgggagctgtctgaggccctgggccagatctttgacagccagaggggctgtgacctgagcatctctgtgaatgtgcagggagaagatgccctgggcttctgtggccacacagtcatcctgacagccaacctggaggcccaggccctgtggaaggagcccggcagcaatgtgaccatgtctgtggatgctgaatgtgtgcccatggtgcgggacctgctgcgctacttctacagcagaagaattgacatcaccctgagctctgtgaagtgcttccacaagctggccagcgcctacggggcccggcagctgcagggctactgtgccagcctgtttgccatcctgctgccccaggaccccagcttccagatgcccctggacctgtatgcctatgctgtggccactggagatgccctgctggagaagctgtgcctgcagttcctggcctggaactttgaggccctgacccaggccgaggcctggcccagcgtgcccacagacctgctgcagctgctgctgcccaggagtgacctggccgtgcccagcgagctggccctgctgaaggctgtggacacctggagctggggcgagcgggccagccatgaggaggtggagggcctggtggagaagatccgcttccccatgatgctgcctgaggagctgtttgagctgcagttcaacctgagcctgtactggagccatgaggccctcttccagaagaagaccctgcaggccctggagttccacacagtgcccttccagctgctggcccgctacaagggcctgaacctgacagaggacacctacaagccccgcatctacaccagccccacctggagcgcctttgtgacagacagctcctggagcgccaggaagagccagctggtgtaccagagcagaagaggccccctggtgaagtacagcagtgactacttccaggcccccagcgactaccgctactacccctaccagagcttccagaccccccagcaccccagcttcctgttccaggacaagagggtgtcctggagcctggtgtacctgcccaccatccagagctgctggaactacggcttcagctgcagcagtgatgagctgcctgtgctgggcctgaccaagagcggcggcagtgacaggaccatcgcctatgagaacaaggccctgatgctgtgtgagggcctgtttgtggctgatgtgacagactttgagggctggaaggccgccatccccagcgccctggacaccaacagcagcaagagcaccagcagcttcccctgcccagctggccacttcaacggcttcagaactgtcatccggcccttctacctgaccaacagcagcggcgtggactag

SEQ ID NO: 157492 - DNA, 2257 bp, Artificial Sequence
  derived and/or modified sequence
aatcgaaagtagactcttttctgaagcatttcctgggatcagcctgaccacgctccatactgggagaggcttctgggtcaaaggaccagtctgcagagggatcctgtggctggaagcgaggaggctccacacggccgttgcagctaccgcagccaggatctgggcatccaggcacggccatgacccctccgaggctcttctgggtgtggctgctggttgcaggaacccaaggcgtgaacgatggtgacatgcggctggccgatgggggcgccaccaaccagggccgcgtggagatcttctacagaggccagtggggcactgtgtgtgacaacctgtgggacctgactgatgccagcgtcgtctgccgggccctgggcttcgagaacgccacccaggctctgggcagagctgccttcgggcaaggatcaggccccatcatgctggatgaggtccagtgcacgggaaccgaggcctcactggccgactgcaagtccctgggctggctgaagagcaactgcaggcacgagagagacgctggtgtggtctgcaccaatgaaaccaggagcacccacaccctggacctctccagggagctctcggaggcccttggccagatctttgacagccagcggggctgcgacctgtccatcagcgtgaatgtgcagggcgaggacgccctgggcttctgtggccacacggtcatcctgactgccaacctggaggcccaggccctgtggaaggagccgggcagcaatgtcaccatgagtgtggatgctgagtgtgtgcccatggtcagggaccttctcaggtacttctactcccgaaggattgacatcaccctgtcgtcagtcaagtgcttccacaagctggcctctgcctatggggccaggcagctgcagggctactgcgcaagcctctttgccatcctcctcccccaggacccctcgttccagatgcccctggacctgtatgcctatgcagtggccacaggggacgccctgctggagaagctctgcctacagttcctggcctggaacttcgaggccttgacgcaggccgaggcctggcccagtgtccccacagacctgctccaactgctgctgcccaggagcgacctggcggtgcccagcgagctggccctactgaaggccgtggacacctggagctggggggagcgtgcctcccatgaggaggtggagggcttggtggagaagatccgcttccccatgatgctccctgaggagctctttgagctgcagttcaacctgtccctgtactggagccacgaggccctgttccagaagaagactctgcaggccctggaattccacactgtgcccttccagttgctggcccggtacaaaggcctgaacctcaccgaggatacctacaagccccggatttacacctcgcccacctggagtgcctttgtgacagacagttcctggagtgcacggaagtcacaactggtctatcagtccagacgggggcctttggtcaaatattcttctgattacttccaagccccctctgactacagatactacccctaccagtccttccagactccacaacaccccagcttcctcttccaggacaagagggtgtcctggtccctggtctacctccccaccatccagagctgctggaactacggcttctcctgctcctcggacgagctccctgtcctgggcctcaccaagtctggcggctcagatcgcaccattgcctacgaaaacaaagccctgatgctctgcgaagggctcttcgtggcagacgtcaccgatttcgagggctggaaggctgcgattcccagtgccctggacaccaacagctcgaagagcacctcctccttcccctgcccggcagggcacttcaacggcttccgcacggtcatccgccccttctacctgaccaactcctcaggtgtggactagacggcgtggcccaagggtggtgagaaccggagaaccccaggacgccctcactgcaggctcccctcctcggcttccttcctctctgcaatgaccttcaacaaccggccaccagatgtcgccctactcacctgagcgctcagcttcaagaaattactggaaggcttccactagggtccaccaggagttctcccaccacctcaccagtttccaggtggtaagcaccaggacgccctcgaggttgctctgggatccccccacagcccctggtcagtctgcccttgtcactggtctgaggtcattaaaattacattgaggttcct

SEQ ID NO: 157493 - DNA, 2090 bp, Artificial Sequence
  derived and/or modified sequence
atactgggagaggcttctgggtcaaaggaccagtctgcagagggatcctgtggctggaagcgaggaggctccacacggccgttgcagctaccgcagccaggatctgggcatccaggcacggccatgacccctccgaggctcttctgggtgtggctgctggttgcaggaacccaaggcgtgaacgatggtgacatgcggctggccgatgggggcgccaccaaccagggccgcgtggagatcttctacagaggccagtggggcactgtgtgtgacaacctgtgggacctgactgatgccagcgtcgtctgccgggccctgggcttcgagaacgccacccaggctctgggcagagctgccttcgggcaaggatcaggccccatcatgctggccgactgcaagtccctgggctggctgaagagcaactgcaggcacgagagagacgctggtgtggtctgcaccaatgaaaccaggagcacccacaccctggacctctccagggagctctcggaggcccttggccagatctttgacagccagcggggctgcgacctgtccatcagcgtgaatgtgcagggcgaggacgccctgggcttctgtggccacacggtcatcctgactgccaacctggaggcccaggccctgtggaaggagccgggcagcaatgtcaccatgagtgtggatgctgagtgtgtgcccatggtcagggaccttctcaggtacttctactcccgaaggattgacatcaccctgtcgtcagtcaagtgcttccacaagctggcctctgcctatggggccaggcagctgcagggctactgcgcaagcctctttgccatcctcctcccccaggacccctcgttccagatgcccctggacctgtatgcctatgcagtggccacaggggacgccctgctggagaagctctgcctacagttcctggcctggaacttcgaggccttgacgcaggccgaggcctggcccagtgtccccacagacctgctccaactgctgctgcccaggagcgacctggcggtgcccagcgagctggccctactgaaggccgtggacacctggagctggggggagcgtgcctcccatgaggaggtggagggcttggtggagaagatccgcttccccatgatgctccctgaggagctctttgagctgcagttcaacctgtccctgtactggagccacgaggccctgttccagaagaagactctgcaggccctggaattccacactgtgcccttccagttgctggcccggtacaaaggcctgaacctcaccgaggatacctacaagccccggatttacacctcgcccacctggagtgcctttgtgacagacagttcctggagtgcacggaagtcacaactggtctatcagtccagacgggggcctttggtcaaatattcttctgattacttccaagccccctctgactacagatactacccctaccagtccttccagactccacaacaccccagcttcctcttccaggacaagagggtgtcctggtccctggtctacctccccaccatccagagctgctggaactacggcttctcctgctcctcggacgagctccctgtcctgggcctcaccaagtctggcggctcagatcgcaccattgcctacgaaaacaaagccctgatgctctgcgaagggctcttcgtggcagacgtcaccgatttcgagggctggaaggctgcgattcccagtgccctggacaccaacagctcgaagagcacctcctccttcccctgcccggcagggcacttcaacggcttccgcacggtcatccgccccttctacctgaccaactcctcaggtgtggactagacggcgtggcccaagggtggtgagaaccggagaaccccaggacgccctcactgcaggctcccctcctcggcttccttcctctctgcaatgaccttcaacaaccggccaccagatgtcgccctactcacctgagcgctcagcttcaagaaattactggaaggcttccactagggtccaccaggagttctcccaccacctcaccagtttccaggtggtaagcaccaggacgccctcgaggttgctct

SEQ ID NO: 157494 - DNA, 1758 bp, Artificial Sequence
  derived and/or modified sequence
atgacccccccccggctgttctgggtgtggctgctggtggccggcacacagggagtgaatgatggggacatgcggctggccgacggaggcgccaccaaccagggccgtgtggagatattctatcgaggccagtggggtacggtgtgcgataacttgtgggatctgactgacgctagtgtcgtgtgcagagccctcggttttgagaatgccacccaggctctgggtcgcgccgcattcgggcaaggcagtggccccatcatgcttgatgaggtgcaatgcacggggacagaggcttccctggccgattgtaagagcctgggctggctgaagtcaaactgtcgccatgaaagagatgcaggggtcgtgtgcacaaacgaaactcgcagcacccacacactggatctctcacgggagctatctgaagcactaggccaaatcttcgactcccagcgagggtgtgatctcagcatatccgtaaacgtgcaaggggaggacgcgttagggttctgcggtcacacagtaatcttaacagctaacctggaagcccaagctctatggaaggaaccaggctcgaatgtcaccatgtctgttgacgccgagtgcgtcccaatggtgcgcgacttgctgcgatatttttatagtcgccgaattgatattaccctctcctcagtcaagtgcttccacaagctggcatctgcatatggtgctagacagttgcagggttattgtgcatccttgtttgctatcctgctgccccaggaccctagtttccagatgcctttggatctctatgcttatgccgtggcgacaggtgacgccctgctcgaaaagctctgtctgcagttcctggcatggaattttgaggccttaactcaggctgaggcttggccctctgtccccactgatctgctgcagcttctgctgcccagatcagacctcgctgtgccctccgagctcgcattgctgaaggcagtggacacctggagctggggagagagggctagtcatgaagaagttgagggtctcgtcgaaaagatcaggttcccaatgatgctccctgaagaactgttcgaactgcaatttaatcttagcctgtattggagtcatgaagctttatttcagaagaagacactgcaggcacttgagtttcatactgtgcctttccagcttcttgctaggtacaaaggccttaacttaacagaggatacatataagccacggatatacacatctccaacttggtctgcctttgtcaccgatagttcttggagcgcacggaaatctcaactcgtgtaccagtcaagacgaggccccctcgtcaagtacagctccgactactttcaggcaccaagcgactacagatattacccctatcagtcatttcagacgccccagcacccgtccttcctgtttcaggacaagagggtctcctggtcactggtttacctacccaccattcagtcctgctggaactacggcttctcctgttcttcggatgaactgcccgtcttgggactgaccaaaagtgggggttccgatcggaccatcgcctacgaaaacaaagcattaatgctctgcgaagggctttttgtggctgatgtgaccgatttcgaaggatggaaagccgccataccaagcgctctcgacacaaacagctctaagagtacctcctcatttccctgccctgctggccatttcaatggctttcgtacggtaattaggcccttctatctaactaattcatccggcgttgactag

SEQ ID NO: 157495 - DNA, 1722 bp, Artificial Sequence
  derived and/or modified sequence
atgacccccccccggctgttctgggtgtggctgctggtggccggcactcagggcgtgaacgacggagatatgaggcttgcagacggcggagccacgaatcaaggacgcgtagagatcttttaccgcggccaatggggcacagtctgcgataatctctgggatctgaccgacgcaagtgtggtatgtagagccctcggatttgagaacgccacccaggctctgggacgggccgccttcggacagggatcagggcccatcatgttagctgattgcaaatctttgggatggctcaagtcaaattgccgccacgagcgggatgcgggtgtggtgtgtacaaatgagactcgctctactcataccctcgacctgtcccgagaactatcagaggccctgggccagatcttcgatagccagcgcggttgcgacctgagcatctctgtgaacgtgcagggtgaggacgctctagggttctgtggacacactgtcatactgactgcaaacctggaagctcaggccctgtggaaagagcctggttccaatgttactatgtcagtcgatgcagaatgcgtgccgatggtccgcgatctgctgaggtacttctactcgcggcgcattgatatcaccctctcctccgtcaaatgttttcataagttggccagcgcctatggtgcacggcaactccagggatattgcgcatcactcttcgccatccttttaccccaggaccccagctttcagatgcctctggacctttacgcatatgccgtggccactggggatgcactactggaaaagttgtgcctgcagttcctagcctggaattttgaagccctgacacaggccgaggcatggccatcagtgcctaccgatctgctccagctgctcctgccacgcagtgacctcgccgtgccctcagaactggccttgctcaaagcagtcgatacctggtcatggggtgagcgggcgtcccacgaggaagttgagggccttgtggagaagatcagatttccaatgatgctccccgaagaacttttcgaactgcagttcaatttgtcactgtattggtcccacgaagctcttttccagaaaaaaacgcttcaagcactcgaatttcatacagtgcctttccagctcctggcaaggtataaggggctcaacctcacagaagacacctataagccccgcatctataccagccccacctggtccgctttcgtcacagactccagctggagcgcgcggaagtctcaattagtttaccagtcacggcgcggtccgctggttaaatattcatctgattattttcaggccccaagcgactacagatattatccctatcaatcatttcagacccctcagcacccatcttttttgttccaagacaagagggtgtcgtggtctctcgtttatctgccaacaatccagagctgctggaattacggctttagttgtagttctgacgagttaccggtgctgggtttaaccaagagtggaggcagtgacaggaccatagcctatgagaacaaggcacttatgttatgtgaggggctcttcgtggccgacgtcactgacttcgagggttggaaagccgctatacctagcgcgcttgacaccaatagctccaagagcaccagtagttttccctgtccggcaggacacttcaacggcttccggacagtgatccggccattctatctgaccaacagctccggggtcgactag

SEQ ID NO: 157496 - DNA, 1758 bp, Artificial Sequence
  derived and/or modified sequence
atgaccccaccgcgtctgttctgggtgtggctcctggtcgcagggactcagggcgtgaacgatggcgacatgcggctcgccgacggaggagcaactaaccaggggagagtcgaaatcttttacaggggtcagtggggtactgtgtgtgacaatttgtgggatctgacagatgcctcagtcgtctgccgcgcacttggttttgagaatgccacccaagcactgggcagggccgcattcgggcagggctcaggcccaatcatgctggatgaagtgcagtgtaccgggaccgaggcatccttggctgactgcaagtcacttggctggctcaagagtaattgtagacacgagagggatgccggagtcgtgtgtactaatgaaactaggtccacgcataccctggatctgagccgcgaattatctgaagccctgggacagattttcgacagccaaagaggatgcgacttgtccatcagcgttaatgttcagggtgaagatgcgcttgggttctgcggacacaccgtgatattaacggccaatctagaggcccaagctctatggaaggagcctggctccaatgtgacaatgagtgttgacgccgagtgcgtgcctatggttcgggatctattgagatatttttactcacgccgaattgatattacgttgagttcagttaagtgttttcacaaacttgcctcggcttacggcgctaggcagttgcagggttattgtgcaagtttgtttgccattctgctgccacaggatcccagctttcaaatgcctctggacctatacgcctacgcagtagcaacaggagacgccttgctggagaaactctgtctgcaattcttagcctggaactttgaggctctgacacaagcagaggcatggccctctgtgccgacagacctgttgcaactgctgctgccacggagcgacctggctgtgccaagcgagcttgccctgctcaaggccgtggacacatggagctggggagaacgagcaagccacgaggaagtcgagggcctggtcgaaaaaatccgatttcccatgatgctgccagaggagctgtttgaactccagtttaacttgtccctctattggtcccatgaagcattgtttcagaagaaaactctgcaggctctagagtttcacactgttccctttcaactgttagctaggtacaagggtctgaaccttactgaagacacatataagcctaggatctacacaagccctacttggtcggcattcgtcacagatagttcctggagcgcacgtaaaagccagctggtgtaccagtcacgcagagggcctctggtgaagtattcctccgactacttccaagctccctcggattaccgctactacccgtatcaatcttttcagaccccacaacacccgtcatttctatttcaggacaagagagtgtcctggagcctggtctatctacccactatacagtcttgttggaactatgggttcagctgttcctcggatgagcttccagttctggggctgacaaagtctggtggctcagaccgcacaattgcatacgaaaacaaagccttgatgctgtgcgaaggtctcttcgtcgctgacgtcacagacttcgaggggtggaaggcagcaataccaagcgctcttgataccaactctagcaagagtacatcctcatttccatgtccagccggtcattttaatggttttaggacagtgatccgccctttttatctcaccaattcctcaggagtggactag

SEQ ID NO: 157497 - DNA, 1722 bp, Artificial Sequence
  derived and/or modified sequence
atgactccaccacgcctattctgggtatggcttctggttgctgggacccagggggttaatgatggggacatgcgactagccgatgggggtgctaccaaccaagggagagtagaaattttttatagggggcagtggggcaccgtatgtgacaatctttgggatctgacagacgcttccgtggtctgccgagctctcgggtttgaaaacgccacacaggccctggggagggcggcattcggacagggtagtggccctattatgctcgctgattgcaaatcgttaggttggctcaagagtaactgtcggcacgaacgtgatgctggggtggtctgcactaatgagaccagaagcacccacactctcgatctctctcgagagctcagcgaggctctcggccagatcttcgattctcaacggggttgtgacctgtccatcagtgtcaacgtccagggtgaagatgcccttggattctgcggacatacagtgatattgactgctaaccttgaagcccaggccctgtggaaagaacccggatccaacgtgacaatgagcgtggacgcagaatgcgtgccaatggtgcgtgacttgcttaggtatttctactccaggcgaattgacatcactttaagctcagtaaaatgtttccataaactcgcaagtgcatacggcgcaaggcagctgcaaggttactgcgcttccctgttcgcaatccttctcccccaggatccgtcatttcaaatgccactggacctgtacgcctacgctgtggcaactggcgatgccctgctggagaagttgtgtttgcaattcctagcgtggaactttgaggctctcacccaagcagaggcatggccaagcgtccctactgatctgctgcaactgctgctgcccagatcggatcttgcagtcccatcggaactggcattactcaaggccgttgatacctggtcatggggcgaaagggcctcccatgaggaagtggaaggacttgtcgagaagattagatttcctatgatgctgccagaggagttattcgagctccagttcaacttgtcattgtactggtcgcacgaggctctgttccaaaaaaagacactgcaagcattagagttccacacagtaccatttcagctgctcgcacgatataaaggcctgaaccttacagaagacacctacaaaccgaggatttacacaagccctacttggtccgcctttgtcaccgattcctcttggtcggcgagaaagagccagttggtgtaccagagcaggcgaggtccactcgtgaagtattctagcgattatttccaggctccgagcgattatcgttactatccataccagtccttccaaacaccgcagcatccctcatttctgttccaggataagagggtgagctggagcctcgtttacttaccaactattcagtcctgttggaactacggattctcctgctcaagcgatgagcttccggtactgggcttaacaaaaagcggcggatcagacagaactatcgcatacgaaaacaaggcgctgatgctctgtgagggtctgttcgtggcagacgtaacagatttcgagggttggaaagccgcaatcccatcagcgttagatactaactccagcaagtccacttcatcattcccttgccccgctggacacttcaatggctttcggactgtgatcagacccttttacctgactaactcaagcggggttgattag

SEQ ID NO: 157498 - DNA, 1758 bp, Artificial Sequence
  derived and/or modified sequence
atgaccccccccagactgttctgggtgtggctgctggtggccggcacccagggcgtgaacgacggcgacatgagactggccgacggcggcgccaccaaccagggcagagtggagatcttctacagaggccagtggggcaccgtgtgcgacaacctgtgggacctgaccgacgccagcgtggtgtgcagagccctgggcttcgagaacgccacccaggccctgggcagagccgccttcggccagggcagcggccccatcatgctggacgaggtgcagtgcaccggcaccgaggccagcctggccgactgcaagagcctgggctggctgaagagcaactgcagacacgagagagacgccggcgtggtgtgcaccaacgagaccagaagcacccacaccctggacctgagcagagagctgagcgaggccctgggccagatcttcgacagccagagaggctgcgacctgagcatcagcgtgaacgtgcagggcgaggacgccctgggcttctgcggccacaccgtgatcctgaccgccaacctggaggcccaggccctgtggaaggagcccggcagcaacgtgaccatgagcgtggacgccgagtgcgtgcccatggtgagagacctgctgagatacttctacagcagaagaatcgacatcaccctgagcagcgtgaagtgcttccacaagctggccagcgcctacggcgccagacagctgcagggctactgcgccagcctgttcgccatcctgctgccccaggaccccagcttccagatgcccctggacctgtacgcctacgccgtggccaccggcgacgccctgctggagaagctgtgcctgcagttcctggcctggaacttcgaggccctgacccaggccgaggcctggcccagcgtgcccaccgacctgctgcagctgctgctgcccagaagcgacctggccgtgcccagcgagctggccctgctgaaggccgtggacacctggagctggggcgagagagccagccacgaggaggtggagggcctggtggagaagatcagattccccatgatgctgcccgaggagctgttcgagctgcagttcaacctgagcctgtactggagccacgaggccctgttccagaagaagaccctgcaggccctggagttccacaccgtgcccttccagctgctggccagatacaagggcctgaacctgaccgaggacacctacaagcccagaatctacaccagccccacctggagcgccttcgtgaccgacagcagctggagcgccagaaagagccagctggtgtaccagagcagaagaggccccctggtgaagtacagcagcgactacttccaggcccccagcgactacagatactacccctaccagagcttccagaccccccagcaccccagcttcctgttccaggacaagagagtgagctggagcctggtgtacctgcccaccatccagagctgctggaactacggcttcagctgcagcagcgacgagctgcccgtgctgggcctgaccaagagcggcggcagcgacagaaccatcgcctacgagaacaaggccctgatgctgtgcgagggcctgttcgtggccgacgtgaccgacttcgagggctggaaggccgccatccccagcgccctggacaccaacagcagcaagagcaccagcagcttcccctgccccgccggccacttcaacggcttcagaaccgtgatcagacccttctacctgaccaacagcagcggcgtggactag

SEQ ID NO: 157499 - DNA, 1722 bp, Artificial Sequence
  derived and/or modified sequence
atgaccccccccagactgttctgggtgtggctgctggtggccggcacccagggcgtgaacgacggcgacatgagactggccgacggcggcgccaccaaccagggcagagtggagatcttctacagaggccagtggggcaccgtgtgcgacaacctgtgggacctgaccgacgccagcgtggtgtgcagagccctgggcttcgagaacgccacccaggccctgggcagagccgccttcggccagggcagcggccccatcatgctggccgactgcaagagcctgggctggctgaagagcaactgcagacacgagagagacgccggcgtggtgtgcaccaacgagaccagaagcacccacaccctggacctgagcagagagctgagcgaggccctgggccagatcttcgacagccagagaggctgcgacctgagcatcagcgtgaacgtgcagggcgaggacgccctgggcttctgcggccacaccgtgatcctgaccgccaacctggaggcccaggccctgtggaaggagcccggcagcaacgtgaccatgagcgtggacgccgagtgcgtgcccatggtgagagacctgctgagatacttctacagcagaagaatcgacatcaccctgagcagcgtgaagtgcttccacaagctggccagcgcctacggcgccagacagctgcagggctactgcgccagcctgttcgccatcctgctgccccaggaccccagcttccagatgcccctggacctgtacgcctacgccgtggccaccggcgacgccctgctggagaagctgtgcctgcagttcctggcctggaacttcgaggccctgacccaggccgaggcctggcccagcgtgcccaccgacctgctgcagctgctgctgcccagaagcgacctggccgtgcccagcgagctggccctgctgaaggccgtggacacctggagctggggcgagagagccagccacgaggaggtggagggcctggtggagaagatcagattccccatgatgctgcccgaggagctgttcgagctgcagttcaacctgagcctgtactggagccacgaggccctgttccagaagaagaccctgcaggccctggagttccacaccgtgcccttccagctgctggccagatacaagggcctgaacctgaccgaggacacctacaagcccagaatctacaccagccccacctggagcgccttcgtgaccgacagcagctggagcgccagaaagagccagctggtgtaccagagcagaagaggccccctggtgaagtacagcagcgactacttccaggcccccagcgactacagatactacccctaccagagcttccagaccccccagcaccccagcttcctgttccaggacaagagagtgagctggagcctggtgtacctgcccaccatccagagctgctggaactacggcttcagctgcagcagcgacgagctgcccgtgctgggcctgaccaagagcggcggcagcgacagaaccatcgcctacgagaacaaggccctgatgctgtgcgagggcctgttcgtggccgacgtgaccgacttcgagggctggaaggccgccatccccagcgccctggacaccaacagcagcaagagcaccagcagcttcccctgccccgccggccacttcaacggcttcagaaccgtgatcagacccttctacctgaccaacagcagcggcgtggactag

SEQ ID NO: 157500 - protein, 638 aa, Artificial Sequence
  derived and/or modified sequence
MSALAGEDVWRCPGCGDHIAPSQIWYRTVNETWHGSCFRCSECQDSLTNWYYEKDGKLYCPKDYWGKFGEFCHGCSLLMTGPFMVAGEFKYHPECFACMSCKVIIEDGDAYALVQHATLYCGKCHNEVVLAPMFERLSTESVQEQLPYSVTLISMPATTEGRRGFSVSVESACSNYATTVQVKEVNRMHISPNNRNAIHPGDRILEINGTPVRTLRVEEVEDAISQTSQTLQLLIEHDPVSQRLDQLRLEARLAPHMQNAGHPHALSTLDTKENLEGTLRRRSLRRSNSISKSPGPSSPKEPLLFSRDISRSESLRCSSSYSQQIFRPCDLIHGEVLGKGFFGQAIKVTHKATGKVMVMKELIRCDEETQKTFLTEVKVMRSLDHPNVLKFIGVLYKDKKLNLLTEYIEGGTLKDFLRSMDPFPWQQKVRFAKGIASGMAYLHSMCIIHRDLNSHNCLIKLDKTVVVADFGLSRLIVEERKRAPMEKATTKKRTLRKNDRKKRYTVVGNPYWMAPEMLNGKSYDETVDIFSFGIVLCEIIGQVYADPDCLPRTLDFGLNVKLFWEKFVPTDCPPAFFPLAAICCRLEPESRPAFSKLEDSFEALSLYLGELGIPLPAELEELDHTVSMQYGLTRDSPP

SEQ ID NO: 157501 - DNA, 1917 bp, Artificial Sequence
  derived and/or modified sequence
atgagcgccctggccggcgaggacgtgtggagatgccccggctgcggcgaccacatcgcccccagccagatctggtacagaaccgtgaacgagacctggcacggcagctgcttcagatgcagcgagtgccaggacagcctgaccaactggtactacgagaaggacggcaagctgtactgccccaaggactactggggcaagttcggcgagttctgccacggctgcagcctgctgatgaccggccccttcatggtggccggcgagttcaagtaccaccccgagtgcttcgcctgcatgagctgcaaggtgatcatcgaggacggcgacgcctacgccctggtgcagcacgccaccctgtactgcggcaagtgccacaacgaggtggtgctggcccccatgttcgagagactgagcaccgagagcgtgcaggagcagctgccctacagcgtgaccctgatcagcatgcccgccaccaccgagggcagaagaggcttcagcgtgagcgtggagagcgcctgcagcaactacgccaccaccgtgcaggtgaaggaggtgaacagaatgcacatcagccccaacaacagaaacgccatccaccccggcgacagaatcctggagatcaacggcacccccgtgagaaccctgagagtggaggaggtggaggacgccatcagccagaccagccagaccctgcagctgctgatcgagcacgaccccgtgagccagagactggaccagctgagactggaggccagactggccccccacatgcagaacgccggccacccccacgccctgagcaccctggacaccaaggagaacctggagggcaccctgagaagaagaagcctgagaagaagcaacagcatcagcaagagccccggccccagcagccccaaggagcccctgctgttcagcagagacatcagcagaagcgagagcctgagatgcagcagcagctacagccagcagatcttcagaccctgcgacctgatccacggcgaggtgctgggcaagggcttcttcggccaggccatcaaggtgacccacaaggccaccggcaaggtgatggtgatgaaggagctgatcagatgcgacgaggagacccagaagaccttcctgaccgaggtgaaggtgatgagaagcctggaccaccccaacgtgctgaagttcatcggcgtgctgtacaaggacaagaagctgaacctgctgaccgagtacatcgagggcggcaccctgaaggacttcctgagaagcatggaccccttcccctggcagcagaaggtgagattcgccaagggcatcgccagcggcatggcctacctgcacagcatgtgcatcatccacagagacctgaacagccacaactgcctgatcaagctggacaagaccgtggtggtggccgacttcggcctgagcagactgatcgtggaggagagaaagagagcccccatggagaaggccaccaccaagaagagaaccctgagaaagaacgacagaaagaagagatacaccgtggtgggcaacccctactggatggcccccgagatgctgaacggcaagagctacgacgagaccgtggacatcttcagcttcggcatcgtgctgtgcgagatcatcggccaggtgtacgccgaccccgactgcctgcccagaaccctggacttcggcctgaacgtgaagctgttctgggagaagttcgtgcccaccgactgcccccccgccttcttccccctggccgccatctgctgcagactggagcccgagagcagacccgccttcagcaagctggaggacagcttcgaggccctgagcctgtacctgggcgagctgggcatccccctgcccgccgagctggaggagctggaccacaccgtgagcatgcagtacggcctgaccagagacagccccccctag

SEQ ID NO: 157502 - DNA, 3670 bp, Artificial Sequence
  derived and/or modified sequence
gtggtcttcccgcgcctgaggcggcggcggcaggagctgaggggagttgtagggaactgaggggagctgctgtgtcccccgcctcctcctccccatttccgcgctcccgggaccatgtccgcgctggcgggtgaagatgtctggaggtgtccaggctgtggggaccacattgctccaagccagatatggtacaggactgtcaacgaaacctggcacggctcttgcttccggtgttcagaatgccaggattccctcaccaactggtactatgagaaggatgggaagctctactgccccaaggactactgggggaagtttggggagttctgtcatgggtgctccctgctgatgacagggccttttatggtggctggggagttcaagtaccacccagagtgctttgcctgtatgagctgcaaggtgatcattgaggatggggatgcatatgcactggtgcagcatgccaccctctactgtgggaagtgccacaatgaggtggtgctggcacccatgtttgagagactctccacagagtctgttcaggagcagctgccctactctgtcacgctcatctccatgccggccaccactgaaggcaggcggggcttctccgtgtccgtggagagtgcctgctccaactacgccaccactgtgcaagtgaaagaggtcaaccggatgcacatcagtcccaacaatcgaaacgccatccaccctggggaccgcatcctggagatcaatgggacccccgtccgcacacttcgagtggaggaggtggaggatgcaattagccagacgagccagacacttcagctgttgattgaacatgaccccgtctcccaacgcctggaccagctgcggctggaggcccggctcgctcctcacatgcagaatgccggacacccccacgccctcagcaccctggacaccaaggagaatctggaggggacactgaggagacgttccctaaggcgcagtaacagtatctccaagtcccctggccccagctccccaaaggagcccctgctgttcagccgtgacatcagccgctcagaatcccttcgttgttccagcagctattcacagcagatcttccggccctgtgacctaatccatggggaggtcctggggaagggcttctttgggcaggctatcaaggtgacacacaaagccacgggcaaagtgatggtcatgaaagagttaattcgatgtgatgaggagacccagaaaacttttctgactgaggtgaaagtgatgcgcagcctggaccaccccaatgtgctcaagttcattggtgtgctgtacaaggataagaagctgaacctcctgacagagtacattgaggggggcacactgaaggactttctgcgcagtatggatccgttcccctggcagcagaaggtcaggtttgccaaaggaatcgcctccggaatggcctatttgcactctatgtgcatcatccaccgggatctgaactcgcacaactgcctcatcaagttggacaagactgtggtggtggcagactttgggctgtcacggctcatagtggaagagaggaaaagggcccccatggagaaggccaccaccaagaaacgcaccttgcgcaagaacgaccgcaagaagcgctacacggtggtgggaaacccctactggatggcccctgagatgctgaacggaaagagctatgatgagacggtggatatcttctcctttgggatcgttctctgtgagatcattgggcaggtgtatgcagatcctgactgccttccccgaacactggactttggcctcaacgtgaagcttttctgggagaagtttgttcccacagattgtcccccggccttcttcccgctggccgccatctgctgcagactggagcctgagagcagaccagcattctcgaaattggaggactcctttgaggccctctccctgtacctgggggagctgggcatcccgctgcctgcagagctggaggagttggaccacactgtgagcatgcagtacggcctgacccgggactcacctccctagccctggcccagccccctgcaggggggtgttctacagccagcattgcccctctgtgccccattcctgctgtgagcagggccgtccgggcttcctgtggattggcggaatgtttagaagcagaacaagccattcctattacctccccaggaggcaagtgggcgcagcaccagggaaatgtatctccacaggttctggggcctagttactgtctgtaaatccaatacttgcctgaaagctgtgaagaagaaaaaaacccctggcctttgggccaggaggaatctgttactcgaatccacccaggaactccctggcagtggattgtgggaggctcttgcttacactaatcagcgtgacctggacctgctgggcaggatcccagggtgaacctgcctgtgaactctgaagtcactagtccagctgggtgcaggaggacttcaagtgtgtggacgaaagaaagactgatggctcaaagggtgtgaaaaagtcagtgatgctccccctttctactccagatcctgtccttcctggagcaaggttgagggagtaggttttgaagagtcccttaatatgtggtggaacaggccaggagttagagaaagggctggcttctgtttacctgctcactggctctagccagcccagggaccacatcaatgtgagaggaagcctccacctcatgttttcaaacttaatactggagactggctgagaacttacggacaacatcctttctgtctgaaacaaacagtcacaagcaaaggaagaggctgggggactagaaagaggccctgccctctagaaagctcagatcttggcttctgttactcatactcgggtgggctccttagtcagatgcctaaaacattttgcctaaagctcgatgggttctggaggacagtgtggcttgtcacaggcctagagtctgagggaggggagtgggagtctcagcaatctcttggtcttggcttcatggcaaccactgctcacccttcaacatgcctggtttaggcagcagcttgggctgggaagaggtggtggcagagtctcaaagctgagatgctgagagagatagctccctgagctgggccatctgacttctacctcccatgtttgctctcccaactcattagctcctgggcagcatcctcctgagccacatgtgcaggtactggaaaacctccatcttggctcccagagctctaggaactcttcatcacaactagatttgcctcttctaagtgtctatgagcttgcaccatatttaataaattgggaatgggtttggggtattaatgcaatgtgtggtggttgtattggagcagggggaattgataaaggagagtggttgctgttaatattatcttatctattgggtggtatgtgaaatattgtacatagacctgatgagttgtgggaccagatgtcatctctggtcagagtttacttgctatatagactgtacttatgtgtgaagtttgcaagcttgctttagggctgagccctggactcccagcagcagcacagttcagcattgtgtggctggttgtttcctggctgtccccagcaagtgtaggagtggtgggcctgaactgggccattgatcagactaaataaattaagcagttaacataactggcaa

SEQ ID NO: 157503 - DNA, 1917 bp, Artificial Sequence
  derived and/or modified sequence
atgagtgcattggcaggggaggacgtatggagatgtcccggttgtggagatcacatcgcaccaagccagatctggtacaggacggtcaacgagacttggcacggatcctgcttcagatgctccgaatgccaggatagcctgaccaattggtactatgagaaagatgggaaactctactgccccaaggactactggggaaaatttggcgaattttgccacgggtgctcccttctaatgaccgggcccttcatggtagctggagaatttaagtatcaccccgagtgtttcgcctgtatgtcgtgcaaggttattatagaagatggagatgcttacgccttggtgcaacacgcaactctctactgtgggaaatgccataacgaggtggtactagctccaatgttcgagcgcctgagcaccgagtccgtccaagagcagttaccctactccgtgaccctgatctctatgccagcaacaacagaagggcgtcgaggtttctccgtctctgtagagtcagcttgcagtaactacgccaccacggtccaggtcaaagaggttaaccggatgcatatctcccccaataacagaaatgccattcacccaggagatcgtattcttgaaattaatggcacgcctgtacggaccttacgtgtggaagaagtagaggatgccataagccagacttcacagaccctgcagctgctcattgagcatgacccggtcagccaacgcctcgaccaacttagactggaggcacgacttgcccctcacatgcagaatgccggccaccctcacgcactttccaccctcgatactaaggagaacctggagggaaccttgcgtcggcggagtctgagacggagtaactccatttccaagagtcctggccccagcagtcccaaagagccgctcctgttctcccgggatatttccagatcggaaagtctgagatgcagttcatcttatagtcagcagatcttcagaccatgcgatttaatccatggtgaagtactcggaaagggctttttcgggcaggccattaaggtcacccataaagcgaccgggaaggtgatggtaatgaaggaactgattcggtgcgacgaggagactcagaagacgtttctcactgaagtcaaagtgatgaggtccctcgatcatccaaacgttctgaaattcatcggcgtcctttacaaggataaaaagctgaacttgttgactgagtatattgaaggagggactctgaaggactttcttcgtagcatggaccccttcccatggcagcagaaggttagatttgcaaaagggattgcctctggaatggcatacctccattcaatgtgtattattcatcgggatctgaatagccacaactgtttgatcaagctggacaaaactgtagttgtggccgactttggcctatcacgtctgatagtggaggaacgaaaaagggcacctatggaaaaggccaccacaaaaaaacgcacactgcgcaagaatgacaggaagaagagatacactgtcgtggggaatccatattggatggctcctgagatgttgaacggtaaaagttatgatgaaactgtcgacatctttagcttcgggatcgtcttatgcgaaataatcgggcaagtgtatgcagatcccgactgtctgcctaggacactcgatttcggacttaatgttaagcttttctgggagaaatttgtgccaacagactgtccacctgccttctttcccttggccgccatctgctgcaggctggagccagagtcccgccccgctttttccaaactcgaggattcattcgaagcacttagcctgtaccttggcgaactgggaatccctctgcctgccgagctggaggaacttgaccacactgtgtctatgcaatatggtctgactcgggactccccaccctag

SEQ ID NO: 157504 - DNA, 1917 bp, Artificial Sequence
  derived and/or modified sequence
atgtctgccctggccggagaagatgtgtggcgctgccccggctgtggggaccacatcgcccccagccagatctggtacagaacagtgaatgagacctggcacggcagctgcttccgctgcagcgagtgccaggacagcctgaccaactggtactatgagaaggatggcaagctgtactgccccaaggactactggggcaagtttggagagttctgccacggctgcagcctgctgatgacaggccccttcatggtggccggggagttcaagtaccaccctgagtgctttgcctgcatgagctgcaaggtgatcattgaagatggagatgcctatgccctggtgcagcacgccaccctgtactgtgggaagtgccacaatgaggtggtgctggcccccatgtttgagcggctgagcacagaatctgtgcaggagcagctgccctacagcgtgaccctcatctccatgcctgccaccacagagggccggcggggcttctctgtgtctgtggagagcgcctgcagcaactatgccaccaccgtgcaggtgaaggaggtgaacaggatgcacatcagccccaacaacagaaatgccatccaccctggggaccgcatcctggagatcaatggcacccctgtgaggaccctgcgggtggaggaggtggaggatgccatcagccagaccagccagaccctgcagctgctgattgaacatgaccctgtgtcccagaggctggaccagctgcggctggaggcccggctggccccccacatgcagaatgccggccacccccacgccctgagcaccctggacaccaaggagaacctggagggcaccctgcggcggcgcagcctgcggcgcagcaacagcatcagcaagagccctggccccagcagccccaaggagcccctgctcttcagccgggacatcagccgctctgagagcctgcgctgcagcagcagctacagccagcagatcttccggccctgtgacctgattcatggagaggtgctgggcaagggcttcttcggccaggccatcaaggtgacccacaaggccaccgggaaggtgatggtgatgaaggagctgatccgctgtgatgaggagacccagaagaccttcctgacagaggtgaaggtgatgaggagcctggaccaccccaacgtgctgaagttcatcggcgtgctgtacaaggacaagaagctgaacctgctgacagagtacatcgagggcggcaccctgaaggacttcctgcgctccatggaccccttcccctggcagcagaaggtgcgctttgccaagggcatcgccagcggcatggcctacctgcacagcatgtgcatcatccaccgggacctgaacagccacaactgcctgatcaagctggacaagacagtggtggtggccgactttggcctgagccgcctcatcgtggaggagaggaagagggcccccatggagaaggccaccaccaagaagaggaccctgaggaagaatgacaggaagaagcgctacacagtggtgggcaacccctactggatggcccctgagatgctgaatggcaagagctatgatgagaccgtggacatcttctcctttggcatcgtgctgtgtgagatcatcggccaggtgtatgctgaccctgactgcctgcccaggaccctggactttggcctgaatgtgaagctgttctgggagaagtttgtgcccacagactgccccccagccttcttccccctggccgccatctgctgccgcctggagcctgagagcaggcctgccttcagcaagctggaggacagctttgaggccctgagcctgtacctgggggagctgggcatccccctgcctgctgagctggaggagctggaccacacagtgtccatgcagtatggcctgacccgggacagccccccatag

SEQ ID NO: 157505 - DNA, 1917 bp, Artificial Sequence
  derived and/or modified sequence
atgagcgccctggccggcgaggacgtgtggcggtgccccggctgcggagaccacatcgcaccctcacaaatctggtatagaacggtaaacgagacttggcatgggtcctgtttcagatgcagtgaatgccaggacagtctcaccaattggtattatgagaaggacggtaaactgtattgtccaaaggactactggggaaagttcggcgagttttgtcacggctgttctctgcttatgaccggcccattcatggtcgcgggcgaattcaagtatcatcctgaatgttttgcatgtatgagttgtaaggttatcatcgaggacggagacgcctacgcgcttgtgcagcacgccaccctctactgcgggaaatgccacaacgaagtggtactagcccctatgttcgagcggttgagcacggaatccgtgcaggaacagctgccgtactctgtcactctgatttcgatgccagctacaaccgaaggaaggagagggttctcagtgtctgtggagagcgcatgctcaaattatgctacgactgtccaggtcaaggaggtgaacaggatgcatatttcacccaacaaccggaacgctatccaccccggggaccggattctggagataaatggaacccccgtgaggaccctgcgcgttgaagaggttgaggacgccatcagccagacaagccagaccctccagctgctgatcgagcacgaccctgtatcccaaagactggaccagcttcgcctcgaggcccgcctcgcacctcacatgcagaatgccggccacccacacgccctaagtacgctcgacacaaaagaaaatcttgaggggactctccgccgtaggagcctcagaagatccaactccatttctaaaagtccaggtcctagttcaccaaaggagccgctgctgttttccagagatatctccaggtcagaaagtctcagatgttcatccagctacagccagcaaatctttcgcccgtgtgacctgatccacggagaagtgctgggcaaagggttctttggccaggcaatcaaggttacccacaaggccacagggaaagtgatggtgatgaaagagctgattagatgcgacgaggaaacccaaaagacattcctaaccgaggtgaaagtgatgcggtcattggaccatccaaacgtgctcaaattcataggtgtactgtacaaagataagaagttgaacttgctcactgaatacatcgagggtggtaccttaaaggattttctgagaagcatggatccttttccctggcaacagaaggtgagatttgctaagggtattgcaagtggtatggcctaccttcactccatgtgcatcattcaccgggacctgaacagtcataattgtcttatcaagctcgataaaactgtggtagtcgcagatttcggactctcccggctgatagtcgaagaaagaaaacgtgccccaatggagaaggcaactacaaagaagcgaacacttcgcaagaacgaccggaagaagcggtatacggtggtggggaacccttactggatggccccggagatgctgaatggcaagagctatgacgaaaccgtggatatattctcattcggcattgtgctgtgtgagataatcgggcaagtttatgctgatccagattgtctccctcgaactctggacttcggactaaatgtgaaactcttctgggagaagtttgttccaaccgattgcccaccagcattttttcctctcgctgccatctgctgcaggcttgaacctgaatctaggcctgccttttcaaagctcgaggacagcttcgaggccctctctttgtatcttggtgagttgggaatcccactccctgccgaactcgaagaactcgaccatacagtttccatgcagtacggcttgacaagggacagccctccctag

SEQ ID NO: 157506 - DNA, 1917 bp, Artificial Sequence
  derived and/or modified sequence
atgtcagccctggccggtgaagacgtgtggcgttgcccaggatgcggcgatcacatcgcccctagccaaatatggtaccgaacagttaatgagacctggcacggaagctgttttcggtgtagcgaatgccaggactccttaacgaactggtattatgagaaggacgggaagctgtattgtccaaaggattattggggcaaattcggcgaattctgtcatggttgcagcctgctgatgactggtccatttatggtggctggtgagtttaagtatcatcctgaatgttttgcctgcatgtcctgtaaggtgatcatcgaggacggggatgcttatgcattggtgcaacatgccactctctattgtggcaagtgccataatgaggtcgtgctggccccaatgtttgagcggctgtctacagagtctgtgcaggagcaactgccctatagtgtcacactaatttcaatgcccgcaaccacggaagggaggagagggttttcggtcagtgtggagagcgcgtgcagcaactacgccacaaccgtccaagtgaaagaggtcaataggatgcacatcagccccaacaacaggaacgcaatccaccccggagaccgcattctcgagatcaacggcaccccagtcagaactctcagagtggaggaagtggaggacgcgatctcacaaacctcccaaaccttacagttgttaatagagcatgacccagtcagtcagcggcttgaccagcttaggctggaagctcggcttgcccctcacatgcaaaacgccggacacccacacgctctctcaactcttgatactaaagagaatctggaagggactttacgtagacgcagtctgcgacggtctaacagtatttcaaagagccccggtccaagttctcctaaggagcctctgctgttttctcgcgatatcagccggtccgaatccctgcggtgctccagtagctattcacagcagatcttcagaccatgtgacctgatccacggcgaggtgttgggaaaggggttcttcggacaagccatcaaagtcacccacaaggccaccggcaaagtgatggttatgaaagagttgattcgctgtgatgaggaaacgcagaagacctttctcactgaagtcaaggttatgcgctccctcgaccatcccaatgttttgaaatttatcggcgttctctataaggacaaaaagctaaatctcctcaccgaatacattgaggggggaaccctgaaggacttcctgcgctctatggatccatttccctggcaacagaaagtgaggttcgcgaagggcatagcttccggcatggcataccttcactccatgtgcatcatccaccgggatttaaactcccataactgcttgataaagcttgacaaaacggtggtggtggccgatttcggattgtcgaggctgattgtggaggagagaaagcgcgctccgatggagaaagcaactactaaaaagcgaacccttagaaagaatgaccggaaaaagcggtataccgttgtgggtaacccatactggatggcccctgagatgcttaacggcaagagctacgacgagacagtagacatcttcagcttcggcatcgtcctttgtgagattataggccaggtgtatgcggacccggactgccttcccaggacgcttgattttggcctcaatgtcaagctattttgggagaagtttgtccccacagattgcccacctgctttctttccgttggctgcgatatgttgtaggctggaaccggaaagtagacctgcttttagcaaactcgaggacagtttcgaggccctgtctctttatcttggcgaactcggcatcccccttccggcagagctagaagagctcgatcacacagtgtcaatgcagtatggcctaacccgggatagccctccttag

SEQ ID NO: 157507 - DNA, 231 bp, Artificial Sequence
  derived and/or modified sequence
atggcccggggcgccgccctggccctgctgctgttcggcctgctgggcgtgctcgtggctgccccagggtttggtgacctgcgtttgcaggcagcacggggcggacgtcctggcgttgcctgtcatagccacgccctgcggcctggccccaagtttggtatcgcgcggtccctgagacctggatggtggggggaagggaaggagaagttagaaaaaaatttcgaaccctag

SEQ ID NO: 157508 - protein, 510 aa, Artificial Sequence
  derived and/or modified sequence
MAGSRQRGLRARVRPLFCALLLSLGRFVRGDGVGGDPAVALPHRRFEYKYSFKGPHLVQSDGTVPFWAHAGNAIPSSDQIRVAPSLKSQRGSVWTKTKAAFENWEVEVTFRVTGRGRIGADGLAIWYAENQGLEGPVFGSADLWNGVGIFFDSFDNDGKKNNPAIVIIGNNGQIHYDHQNDGASQALASCQRDFRNKPYPVRAKITYYQNTLTVMINNGFTPDKNDYEFCAKVENMIIPAQGHFGISAATGGLADDHDVLSFLTFQLTEPGKEPPTPDKEISEKEKEKYQEEFEHFQQELDKKKEEFQKGHPDLQGQPAEEIFESVGDRELRQVFEGQNRIHLEIKQLNRQLDMILDEQRRYVSSLTEEISKRGAGMPGQHGQITQQELDTVVKTQHEILRQVNEMKNSMSETVRLVSGMQHPGSAGGVYETTQHFIDIKEHLHIVKRDIDNLVQRNMPSNEKPKCPELPPFPSCLSTVHFIIFVVVQTVLFIGYIMYRSQQEAAAKKFF

SEQ ID NO: 157509 - DNA, 1533 bp, Artificial Sequence
  derived and/or modified sequence
atggcaggcagccgccaacgtggtcttcgcgctagggtgagaccattattttgtgcccttctcctgagcttgggtcggttcgtgcggggggatggagtcggaggcgatccagctgtggctttacctcatcgtcggttcgagtataaatactctttcaaaggcccacacctcgtccaatccgacggtacagtcccattttgggctcacgccggcaacgccattccctcctccgaccagattcgggtcgctccttcactgaagtcccagcggggctccgtgtggaccaagacaaaggccgcttttgagaattgggaggttgaggtgacgttccgcgtcacagggcgcggcaggatcggggctgacgggctggcgatctggtacgcagaaaaccagggcttggaaggtccggtgttcggaagcgcagatctgtggaacggtgtgggtatattttttgacagtttcgacaacgatgggaaaaagaacaatccagccattgttatcatcggcaataacggccagatacactacgatcatcaaaacgatggggcatcccaggccctggctagctgccagcgtgactttcgtaacaaaccctatccggtgagagcaaagattacttattatcagaacacgctcaccgtgatgatcaataacggctttacgcctgataagaacgattatgaattctgtgcaaaagtagagaacatgattatccccgcccaggggcacttcggtatctccgccgccacaggcggcctggccgatgatcacgacgtcctgtcattcttaacgttccagcttactgaaccaggtaaagagccacctactcccgacaaggaaatcagtgagaaagaaaaagagaagtaccaggaggaattcgagcacttccaacaagagttggacaagaagaaggaggagttccaaaagggccaccccgacttgcaggggcagccagcagaggaaattttcgaatctgtaggcgatagggagttgagacaggtgtttgaaggacaaaatcggatacacctggagatcaaacagttaaataggcaactggacatgatccttgatgagcagcgtaggtatgtctcttctctgactgaagaaatcagtaagcggggagcggggatgccggggcagcatggacagattacacaacaggaactggatacggtcgtgaagactcagcacgagattctgagacaggtaaatgagatgaagaactcaatgagcgaaacagtgagacttgtgtcagggatgcagcacccaggttcagccggaggagtttatgagaccactcagcacttcatagatattaaggaacatctacatattgtgaaacgcgatattgacaatctggtacagcggaatatgcctagcaacgaaaaaccaaagtgtcctgagcttcctccgttcccctcatgtctctcaactgttcactttattattttcgttgtggtgcagactgtgctcttcattggatacatcatgtaccggagccagcaagaggcagctgccaaaaaattcttttag

SEQ ID NO: 157510 - DNA, 1533 bp, Artificial Sequence
  derived and/or modified sequence
atggccggcagccggcagaggggcctgcgggcccgggtgcggcccctcttctgtgccctgctgctgagcctgggccgctttgtgagaggagatggagtgggcggggaccctgctgtggccctgccccacagaagatttgagtacaagtacagcttcaagggcccccacctggtgcagagtgatggcaccgtgcccttctgggcccacgccggaaatgccatccccagcagtgaccagatccgggtggcccccagcctgaagagccagaggggctctgtgtggaccaagaccaaggccgcctttgagaactgggaggtggaggtgaccttccgggtgacaggccggggccgcatcggggctgatggcctggccatctggtatgcagagaaccagggcctggagggccctgtgtttggcagcgctgacctgtggaatggagtgggcatcttctttgacagctttgacaatgatggcaagaagaacaacccagccatcgtcatcatcggcaacaacggccagatccactatgaccaccagaatgatggagccagccaggccctggccagctgccagagggacttcaggaacaagccctaccctgtgcgggccaagatcacctactaccagaacaccctgactgtgatgatcaacaacggcttcaccccagacaagaatgactatgagttctgtgccaaggtggagaacatgatcatcccagcccagggccacttcggcatctctgctgccaccggcggcctggctgatgaccatgatgtgctgtccttcctgaccttccagctgacagagcccgggaaggagccccccaccccagacaaggagatcagcgagaaggagaaggagaagtaccaggaggagtttgagcacttccagcaggagctggacaagaagaaggaggagttccagaagggccacccagacctgcagggccagcctgctgaggagatctttgaatctgtgggggaccgggagctgcggcaggtgtttgagggccagaaccgcatccacctggagatcaagcagctgaaccggcagctggacatgatcctggatgagcagaggcgctacgtgagcagcctgacagaggagatcagcaagagaggagctggcatgcctggccagcacggccagatcacccagcaggagctggacacagtggtgaagacccagcacgagatcctgcggcaggtgaatgagatgaagaacagcatgtctgaaacagtgcggctggtgtctggcatgcagcaccctggcagcgctgggggcgtgtatgagaccacccagcacttcatcgacatcaaggagcacctgcacatcgtgaagagggacatcgacaacctggtgcagaggaacatgcccagcaatgagaagcccaagtgcccagagctgccccccttccccagctgcctgagcacagtgcacttcatcatctttgtggtggtgcagacagtgctcttcatcggctacatcatgtaccgcagccagcaggaggccgccgccaagaagttcttctag

SEQ ID NO: 157511 - DNA, 4830 bp, Artificial Sequence
  derived and/or modified sequence
gccctcctccgcgttccagaatccaagatggcgggatccaggcaaaggggtctccgggccagagttcggccgctgttctgcgccttgctgctgtcactcggtcgcttcgtccggggcgacggcgtgggaggagaccccgcggtcgcgttgccacatcgccgtttcgagtacaaatacagcttcaaggggccgcacctggtgcagagcgacgggaccgtgcccttctgggcccacgcggggaatgctattccaagttcagatcaaattcgagtagcaccatctttaaaaagccaaagaggctcagtgtggacaaagacaaaagcggcctttgagaactgggaagttgaggtgacatttcgagtgactggaagaggtcgaattggagctgatggcctagcaatttggtatgcagaaaatcaaggcttggagggccctgtgtttggatcagctgatctgtggaatggtgttggaatattttttgattcttttgacaatgatggaaagaaaaataatcctgctatagtaattataggcaacaatggacaaatccattatgaccatcaaaatgacggggctagtcaagctttggcaagttgccagagggacttccgcaacaaaccctatcctgtccgagcaaagattacctattaccagaacacactgacagtaatgatcaataatggctttacaccagataaaaatgattatgaattttgtgccaaagtggaaaatatgattatccctgcacaagggcattttggaatatctgctgcaactggaggtcttgcagatgaccatgatgtcctttcttttctgactttccagttgactgaacctggaaaagagccgcccacaccagataaagaaatttcggaaaaggaaaaagaaaagtatcaggaggaatttgagcactttcaacaagaattggataaaaaaaaagaggaattccagaagggccaccccgacctccaagggcagcctgcggaggaaatatttgagagtgtaggagatcgagagctaagacaagtctttgaaggacagaatcgtattcatcttgaaatcaagcagctgaaccggcagttagatatgattcttgatgaacagagaagatatgtctcttccttaacagaggaaatctctaaaagaggagcaggaatgcctgggcagcatgggcagattactcaacaagaactggatactgttgtgaaaactcagcatgagattctgagacaagtaaatgaaatgaaaaattccatgagtgaaaccgtcagactggtcagtggaatgcagcaccctggctctgctggaggcgtctatgagacaacacagcacttcattgacatcaaagagcacctgcacatagtaaagagggacatagataacttagtgcagcgaaatatgccatcaaatgaaaagccgaaatgcccagaactaccaccatttccatcatgtttgtctacggtccacttcattatatttgttgtggtgcaaactgtattattcattggttatatcatgtataggtctcagcaagaagcagctgccaaaaaattcttttgactaccattttcctgtgtacttcatctatttgtgtacaaaatgatgtcgttttgagggaatttaagtatttaaattgcttcatagtctaaattattaattttcttaataaaataactgtttaaacattgatttgcagttaagaataaaccttaaagcaaagacaaccacattttaatttgttcacagtatgtaaatctgtctaaatttcagtgaatttctggtcagtatgatgcagcctctgagcagaatattgaccagtaagagggtaaataaagtgggggcaacccctggatatgaatgttaccccctaagtctccaatattgcaggtttccctgtataacgtaaacacacttgccctcatgcctcccagaatatgaggtctaattaagaagtcccatcaggtttattttgtaaccaaagtcttttttagaggtcagacttcctaatcaaaggcctgggcctgcagtcctttcatcttaatgcaacttcctttgaaatcaaagaatattttgtctgagagctttaaggatctggtaatagacttcaaaatgttaagtgaaatttttttttcctctatttatcaatgatatatttcacttttaaaggaaattttagaggaaaattaatagctgctttttgcctaaaaaaccttgtgggtggaaacattcctctgagaatggcttttataggtattttgcctggtaatgtattcattcatgattgcccatattcttgaatgtcttcattccaatggggtcaggtcaatattatgaaaataatttttatatttatatttgtaacttaaggaatttatttctccctttactacagcatgtaaattcagctcaaattgcatgatctgaggatttaaattcacaaaacctgccactacattctggtttacattagttacttcatgctggctggggttagtgaccatttgcatactcttttaaatcaaggaggctgtagtagaagcagttttaagattcttgaaggcaaaatttgaaaaacagtgaatacttctaattgtttccttttagtgccagaactaaggacattgtgaagcacttgttagtaaacttaaccttgaaatgtcagactggaaggagtttttatagtctttgtgcatacttctaggtattacagaaacagtctgtaaatgacattttaagatgcaaatttaattctgttcacagctgatttatactgatttttgctgccttcaaaatactcttttacttcttttagctaaaatggttgtctttcatttgccatagaattccaaacaatactatcttataaaatagtactgttgaattattccaagcctccctaggtttgctctcaaatgtcatttacagattgggctaacgacctaaaatctatatataaagactttctgaagaactctgtattatagcaataccaaacgagtgctgtgtgtgcaaacagtctggcgttgctttttatgttgatatttatcctagaacactgaaagagaatatgccagtgataactcactttacttcagtcatttcaacacagaaaatgcttctctagcatttttcttttgtagtgttaacattttgaaattcatgtttcagaggcttcatcatcacagaatttactcttgctccatgaaaaaaaattaaataccttcagaggaatatttaagttgtaaactatgaaacttgagaaatcctcttgagataaaaggctgccaaatccagtattataaagtccatggtcatatgtgcctgtgcattaaaggaataccagatctatgcagtatacatttttcaggctgaaattcaaggggaatcattctgattattcttactacaaatggagatggctattatgaaacagcatgagcatgagccttttatcttttatacttagtgatatactttgcttgaaaatcactcagcaaagtagttcacatgatgtgtatcatatttgaagtgtggtttttctcaaaatcattgactttaaggagctcatttctgaacaaaaaggtttgctctgtggaaaaatcaatcactgccaggattctttcatttctgtactattttgtataattgaatttgttcacttctctcacaccagcaagtgttttacaggtgccttggattaaaacaaaattgattttaaaatttttatgtaagtcattgtgtctatgatgccacttttaaaaggaaaatgcaattgcgtaatggcttatatccttatttaatgtacctatttgtgttctaataattgtttgaatgttttattcagcttaaaactttaccatgaagtcataaacagtaaacaatgttttgttatgtattaaggggatatcagtgtttctcaaagtatgatccatggaccatctgggtcatggcgcctggtttcagacaacctgaatcaaatcttaggggtggggctttgggatgtcattgttcaataggcacctcaggagattctgagcacaccaatgtttgagaaccactaaaatgaggagtgggaaaaaaaaaataggtgttttgttaatttagagctgagctgagaagataatatatttttattgtcaatgacattaacagatatgcactgattcttttatacctacaatttacttaatgttccttttattaaaacgcgtggttcatgagcaactacagactgaatccagattattacctgttgctttcagtattttcgtgatggcttttaatcttatgaaatcatcttgagatcattcatggtcaagccatgaaaactcccatcttcaagcctgcctgctaaagcttctttgccttcctgattgtgattatggtaacaatttatatcagacagttgtactttttgataacttagggaaaacagaaatgacttgaacaagggattgcctgcctcactgcattgcagagatacaatttttgtaaagaacacaaatagcagttgtgaatattaaggtgtgattatctttccctgtccatgtgcttattgaaagaagatagtgaacaaatgattatattgaggatttttttaatttataagatctaatgtgaaatccacacttggaactttttagatctgtctgttgcttgtttaatatatttcttttatgacattacttaaagtttaaaagggttttctatccactgtcaatttcaattggataacattttgtcaagttttttttttcctgattatttgatgctagctggaattcaagaaatggcattgaccttattcaaataaagaaatattttagtaaa

SEQ ID NO: 157512 - DNA, 1533 bp, Artificial Sequence
  derived and/or modified sequence
atggccggcagccggcagcggggcctgcgggcccgggtgcggcccctattttgcgctctactgctgagcttgggaagattcgtcagaggcgacggagtcggaggggaccccgctgtagccctcccacacaggcggtttgaatacaagtactccttcaagggcccccacttagttcagagtgacggaactgttccgttctgggcgcatgcaggaaatgcaatcccaagcagcgatcagattcgggtggcaccctccctcaagtcacaacgtggcagcgtctggacgaagactaaggcagctttcgaaaattgggaagtggaggtgacctttagggtaactggacgtggcaggattggggctgatgggctggccatctggtatgccgagaatcaaggcctggaggggccggtattcggatctgcagacctgtggaatggcgtaggtatcttttttgactcttttgacaatgacggcaagaaaaataatccagccattgtgattataggcaataatgggcagattcactacgatcatcaaaacgacggggcctctcaggcactggctagttgtcaaagggatttccgtaacaagccgtaccctgtgagagcaaagattacgtattaccagaatacactgaccgtcatgattaataacggatttacacctgacaaaaatgactatgagttctgcgccaaagttgaaaatatgatcattcccgcccaaggacattttggcatcagtgctgccactgggggtctcgccgacgatcacgacgtgcttagcttcctgaccttccagttgacggagccggggaaggaaccccctacccctgataaagaaatcagtgagaaggaaaaggagaagtatcaggaagaatttgagcatttccaacaggagctggacaaaaaaaaggaagagttccagaagggccatcccgacttacagggccagcccgccgaggagatattcgagtcagttggcgatcgggaattacgccaggtatttgaggggcagaatcgtatccatcttgaaattaaacaactcaaccgtcagttagatatgattctggacgagcaaaggagatacgtatccagtctgaccgaagagatcagcaaacgcggtgcgggtatgccggggcagcatggccagatcacacagcaggagctggacaccgttgtgaaaacccaacacgagattctgcgccaggtcaacgaaatgaaaaatagcatgtctgaaactgtccggctggtgagcggtatgcaacacccaggatctgccggaggtgtgtatgaaaccactcaacattttatcgatatcaaagagcatttacacatagttaaacgggacattgataacctcgtccagaggaatatgccatcaaatgagaagcccaaatgtccagagctcccaccattcccctcttgcctcagtacggtgcactttataatctttgttgttgttcaaaccgtgctatttattggttacataatgtacaggtcccagcaggaagcggccgccaaaaaatttttttag

SEQ ID NO: 157513 - DNA, 1533 bp, Artificial Sequence
  derived and/or modified sequence
atggctggatcgaggcagagaggcctgagggccagagtgcggccactgttctgtgctctgttgctttccttgggccgtttcgtgagaggagacggtgttgggggagacccagcagtggcactcccacatcgcagatttgagtataagtactccttcaaaggaccacatctcgttcaatctgacggcaccgtacccttctgggcccacgcaggcaacgcgatcccgtcttctgaccagatacgtgtggccccttccctgaaatcacagcggggtagcgtttggaccaagaccaaagccgcattcgagaactgggaagtggaggtgacttttagggtgactgggagggggaggatcggcgcagatgggcttgccatttggtacgccgagaaccagggacttgagggaccagtctttggatcggctgacctgtggaatggcgtgggaattttctttgattccttcgacaacgacgggaaaaagaataatccagcaatcgtaatcatcgggaataacggccagattcactacgatcaccagaacgatggtgctagccaggccctagcatcctgtcagcgggattttcgtaacaaaccgtatcctgtgcgggcaaagataacttattatcaaaacaccctgactgttatgataaacaacggcttcacgcctgataagaacgactacgagttctgtgccaaagtggagaacatgattattccagcccagggacactttgggatctcagcagcaaccggtggactggctgacgatcacgacgtcttatccttcctcacattccagctgactgaacctggtaaggagcctccaactcccgacaaagaaatatccgagaaagaaaaggagaagtaccaggaggaatttgagcactttcaacaggaactggataaaaagaaggaagagtttcagaaggggcatcccgaccttcagggccagcctgcggaagaaattttcgaaagcgtgggagaccgagagctgaggcaggtattcgaggggcaaaacaggatacaccttgaaatcaagcagctgaacaggcaactggatatgatactggacgagcagcgacgctatgtgagttccctgacggaagaaatatctaaaagaggggctgggatgccgggacagcacgggcagatcacacagcaggagcttgataccgtcgtgaaaacccagcacgaaatcctgcgacaggtgaatgagatgaaaaacagcatgtctgaaactgtgcgactggtatccggtatgcagcaccccggttctgcagggggagtgtatgagaccactcagcacttcattgacatcaaggagcacttacatatcgtaaagcgggacattgacaatttagtccagagaaacatgcccagcaatgagaagcctaaatgccccgaactgcctccatttccaagctgcctttcaaccgtccatttcattatcttcgtagtagtccagactgtactatttatcggctatataatgtaccgctcacaacaagaagccgctgccaagaagtttttctag

SEQ ID NO: 157514 - DNA, 1533 bp, Artificial Sequence
  derived and/or modified sequence
atggccggcagcagacagagaggcctgagagccagagtgagacccctgttctgcgccctgctgctgagcctgggcagattcgtgagaggcgacggcgtgggcggcgaccccgccgtggccctgccccacagaagattcgagtacaagtacagcttcaagggcccccacctggtgcagagcgacggcaccgtgcccttctgggcccacgccggcaacgccatccccagcagcgaccagatcagagtggcccccagcctgaagagccagagaggcagcgtgtggaccaagaccaaggccgccttcgagaactgggaggtggaggtgaccttcagagtgaccggcagaggcagaatcggcgccgacggcctggccatctggtacgccgagaaccagggcctggagggccccgtgttcggcagcgccgacctgtggaacggcgtgggcatcttcttcgacagcttcgacaacgacggcaagaagaacaaccccgccatcgtgatcatcggcaacaacggccagatccactacgaccaccagaacgacggcgccagccaggccctggccagctgccagagagacttcagaaacaagccctaccccgtgagagccaagatcacctactaccagaacaccctgaccgtgatgatcaacaacggcttcacccccgacaagaacgactacgagttctgcgccaaggtggagaacatgatcatccccgcccagggccacttcggcatcagcgccgccaccggcggcctggccgacgaccacgacgtgctgagcttcctgaccttccagctgaccgagcccggcaaggagccccccacccccgacaaggagatcagcgagaaggagaaggagaagtaccaggaggagttcgagcacttccagcaggagctggacaagaagaaggaggagttccagaagggccaccccgacctgcagggccagcccgccgaggagatcttcgagagcgtgggcgacagagagctgagacaggtgttcgagggccagaacagaatccacctggagatcaagcagctgaacagacagctggacatgatcctggacgagcagagaagatacgtgagcagcctgaccgaggagatcagcaagagaggcgccggcatgcccggccagcacggccagatcacccagcaggagctggacaccgtggtgaagacccagcacgagatcctgagacaggtgaacgagatgaagaacagcatgagcgagaccgtgagactggtgagcggcatgcagcaccccggcagcgccggcggcgtgtacgagaccacccagcacttcatcgacatcaaggagcacctgcacatcgtgaagagagacatcgacaacctggtgcagagaaacatgcccagcaacgagaagcccaagtgccccgagctgccccccttccccagctgcctgagcaccgtgcacttcatcatcttcgtggtggtgcagaccgtgctgttcatcggctacatcatgtacagaagccagcaggaggccgccgccaagaagttcttctag

SEQ ID NO: 157515 - protein, 586 aa, Artificial Sequence
  derived and/or modified sequence
MATATPVPPRMGSRAGGPTTPLSPTRLSRLQEKEELRELNDRLAVYIDKVRSLETENSALQLQVTEREEVRGRELTGLKALYETELADARRALDDTARERAKLQIELGKCKAEHDQLLLNYAKKESDLNGAQIKLREYEAALNSKDAALATALGDKKSLEGDLEDLKDQIAQLEASLAAAKKQLADETLLKVDLENRCQSLTEDLEFRKSMYEEEINETRRKHETRLVEVDSGRQIEYEYKLAQALHEMREQHDAQVRLYKEELEQTYHAKLENARLSSEMNTSTVNSAREELMESRMRIESLSSQLSNLQKESRACLERIQELEDLLAKEKDNSRRMLTDKEREMAEIRDQMQQQLNDYEQLLDVKLALDMEISAYRKLLEGEEERLKLSPSPSSRVTVSRASSSRSVRTTRGKRKRVDVEESEASSSVSISHSASATGNVCIEEIDVDGKFIRLKNTSEQDQPMGGWEMIRKIGDTSVSYKYTSRYVLKAGQTVTIWAANAGVTASPPTDLIWKNQNSWGTGEDVKVILKNSQGEEVAQRSTVFKTTIPEEEEEEEEAAGVVVEEELFHQQGTPRASNRSCAIM

SEQ ID NO: 157516 - DNA, 1761 bp, Artificial Sequence
  derived and/or modified sequence
atggccactgcgacacctgtgcctcccaggatggggtcaagggccggggggcccactacccccctgtcacccacacggctttcaaggttgcaggaaaaggaggagttgcgagagctgaatgaccggctggctgtgtacattgataaggtccggtctttggaaacagaaaactccgctctgcagttgcaggtgaccgagagagaggaagtccgaggcagagagcttacaggacttaaggccctgtatgagacagagttggcagatgcccggagggctcttgacgataccgctcgcgaaagggctaaactacagatcgagcttggtaagtgtaaagcagagcacgaccagctactgctgaattatgcaaagaaggagtcagatctaaacggggcgcagattaagttgcgtgaatacgaggcagcacttaacagtaaggacgcagccttggctaccgcgctaggcgataagaaaagcctggagggagacctggaggacctgaaagaccagatcgctcaactggaggctagcctcgctgccgctaagaagcagttagccgatgagacactcctcaaggtcgatctcgagaataggtgtcagtctttgacagaagatctagaatttcggaaatctatgtacgaagaggagatcaatgagaccaggaggaagcatgaaacccgactggtcgaagttgattctggtcggcaaatcgaatacgaatataagctggcccaggcgctgcacgagatgagggagcagcacgacgctcaggtgcggttatataaggaagagctcgagcaaacttaccacgccaaacttgagaacgccaggttgagctccgaaatgaatacctcaacggtcaattccgcccgggaggaactgatggagtcacggatgcggatcgaaagcttgtcgtctcagttaagcaacttacagaaagagtcacgcgcatgtcttgaaagaattcaagagttagaggatttattagccaaggaaaaggacaattccagacgaatgctaaccgacaaggaacgggagatggctgagattagagaccagatgcagcagcaactgaacgactatgagcagctcttagatgtgaaacttgctctcgacatggaaatttccgcctatcgtaaactgctagagggcgaagaggaacggctgaagctgtctcccagtccttcaagcagagtgactgtatcacgagcgtcatcttcaaggtcagtgaggaccactcgcggtaaaaggaagagggtggatgtggaagagagcgaggcctcgtccagtgtaagcatcagccacagtgccagcgccacaggcaacgtgtgtatcgaggaaattgacgtggatggcaaatttatccgcctcaagaatacttctgagcaagatcagcccatgggcggctgggagatgataagaaaaattggggacacctccgtgtcatataagtacaccagccgctacgtgcttaaagcagggcagacagtgactatctgggcagccaacgccggggtgaccgctagcccccctaccgatcttatttggaagaaccagaactcctggggcacgggggaagatgtgaaggtcatcctcaagaatagtcagggagaggaagtcgcccaaagatctacagtgtttaagacaacaattcccgaggaagaggaggaagaagaggaggcagctggggtagtggttgaagaggagctttttcatcaacagggcacgccacgcgcctccaatcgttcatgcgccatcatgtag

SEQ ID NO: 157517 - DNA, 2878 bp, Artificial Sequence
  derived and/or modified sequence
ctgagaggaaacaaagtgctgcgagcaggagacggcggcggcgcgaaccctgctgggcctccagtcaccctcgtcttgcattttcccgcgtgcgtgtgtgagtgggtgtgtgtgttttcttacaaagggtatttcgcgatcgatcgattgattcgtagttcccccccgcgcgcctttgccctttgtgctgtaatcgagctcccgccatcccaggtgcttctccgttcctctaaacgccagcgtctggacgtgagcgcaggtcgccggtttgtgccttcggtccccgcttcgccccctgccgtcccctccttatcacggtcccgctcgcggcctcgccgccccgctgtctccgccgcccgccatggcgactgcgacccccgtgccgccgcggatgggcagccgcgctggcggccccaccacgccgctgagccccacgcgcctgtcgcggctccaggagaaggaggagctgcgcgagctcaatgaccggctggcggtgtacatcgacaaggtgcgcagcctggagacggagaacagcgcgctgcagctgcaggtgacggagcgcgaggaggtgcgcggccgtgagctcaccggcctcaaggcgctctacgagaccgagctggccgacgcgcgacgcgcgctcgacgacacggcccgcgagcgcgccaagctgcagatcgagctgggcaagtgcaaggcggaacacgaccagctgctcctcaactatgctaagaaggaatctgatcttaatggcgcccagatcaagcttcgagaatatgaagcagcactgaattcgaaagatgcagctcttgctactgcacttggtgacaaaaaaagtttagagggagatttggaggatctgaaggatcagattgcccagttggaagcctccttagctgcagccaaaaaacagttagcagatgaaactttacttaaagtagatttggagaatcgttgtcagagccttactgaggacttggagtttcgcaaaagcatgtatgaagaggagattaacgagaccagaaggaagcatgaaacgcgcttggtagaggtggattctgggcgtcaaattgagtatgagtacaagctggcgcaagcccttcatgagatgagagagcaacatgatgcccaagtgaggctgtataaggaggagctggagcagacttaccatgccaaacttgagaatgccagactgtcatcagagatgaatacttctactgtcaacagtgccagggaagaactgatggaaagccgcatgagaattgagagcctttcatcccagctttctaatctacagaaagagtctagagcatgtttggaaaggattcaagaattagaggacttgcttgctaaagaaaaagacaactctcgtcgcatgctgacagacaaagagagagagatggcggaaataagggatcaaatgcagcaacagctgaatgactatgaacagcttcttgatgtaaagttagccctggacatggaaatcagtgcttacaggaaactcttagaaggcgaagaagagaggttgaagctgtctccaagcccttcttcccgtgtgacagtatcccgagcatcctcaagtcgtagtgtacgtacaactagaggaaagcggaagagggttgatgtggaagaatcagaggcgagtagtagtgttagcatctctcattccgcctcagccactggaaatgtttgcatcgaagaaattgatgttgatgggaaatttatccgcttgaagaacacttctgaacaggatcaaccaatgggaggctgggagatgatcagaaaaattggagacacatcagtcagttataaatatacctcaagatatgtgctgaaggcaggccagactgttacaatttgggctgcaaacgctggtgtcacagccagccccccaactgacctcatctggaagaaccagaactcgtggggcactggcgaagatgtgaaggttatattgaaaaattctcagggagaggaggttgctcaaagaagtacagtctttaaaacaaccatacctgaagaagaggaggaggaggaagaagcagctggagtggttgttgaggaagaacttttccaccagcagggaaccccaagagcatccaatagaagctgtgcaattatgtaaaattttcaactgtcttcctcaaaataaagaagtatggtaatctttacctgtatacagtgcagagccttctcagaagcacagaatatttttatatttcctttatgtgaatttttaagctgcaaatctgatggccttaatttcctttttgacactgaaagttttgtaaaagaaatcatgtccatacactttgttgcaagatgtgaattattgacactgaacttaataactgtgtactgttcggaaggggttcctcaaattttttgactttttttgtatgtgtgttttttctttttttttaagttcttatgaggaggggagggtaaataaaccactgtgcgtcttggtgtaatttgaagattgccccatctagactagcaatctcttcattattctctgctatatataaaacggtgctgtgagggaggggaaaagcatttttcaatatattgaacttttgtactgaatttttttgtaataagcaatcaaggttataattttttttaaaatagaaattttgtaagaaggcaatattaacctaatcaccatgtaagcactctggatgatggattccacaaaacttggttttatggttacttcttctcttagattcttaattcatgaggagggtgggggagggaggtggagggagggaagggtttctctattaaaatgcattcgttgtgttttttaagatagtgtaacttgcttaaatttcttatgtgacattaacaaataaaaaagctcttttaatattga

SEQ ID NO: 157518 - DNA, 1761 bp, Artificial Sequence
  derived and/or modified sequence
atggccacagccacccctgtgccccccaggatgggcagcagagctgggggccccaccacccccctgagccccacccggctgagccggctgcaggagaaggaggagctgcgggagctgaatgaccggctggccgtgtacatcgacaaggtgcgcagcctggagacagagaacagcgccctgcagctgcaggtgacagagcgggaggaggtgcggggccgggagctgaccggcctgaaggccctgtatgaaacagagctggctgatgcccggcgggccctggatgacacagcccgggagcgggccaagctgcagatcgagctgggcaagtgcaaggccgagcatgaccagctgctgctgaactatgccaagaaggagagtgacctgaatggagcccagatcaagctgcgggagtatgaggccgccctgaacagcaaggatgctgccctggccacagccctgggggacaagaagagcctggagggggacctggaggacctgaaggaccagatcgcccagctggaggccagcctggccgccgccaagaagcagctggctgatgagaccctgctgaaggtggacctggagaaccgctgccagagcctgacagaggacctggagttcaggaagtccatgtatgaggaggagatcaatgagaccaggaggaagcatgagacccggctggtggaggtggacagcggccggcagatcgagtatgagtacaagctggcccaggccctgcacgagatgagggagcagcatgatgcccaggtgcggctgtacaaggaggagctggagcagacctaccacgccaagctggagaatgcccggctgagcagcgagatgaacaccagcacagtgaacagcgcccgggaggagctgatggagagcaggatgagaattgagagcctgagcagccagctgagcaacctgcagaaggagagccgggcctgcctggagcgcatccaggagctggaggacctgctggccaaggagaaggacaacagcaggaggatgctgacagacaaggagcgggagatggccgagatccgggaccagatgcagcagcagctgaatgactatgagcagctgctggatgtgaagctggccctggacatggagatcagcgcctacaggaagctgctggagggggaggaggagcggctgaagctgagccccagccccagcagccgggtgacagtgtcccgggccagcagcagccgctctgtgaggaccacccggggcaagaggaagagggtggatgtggaggagagcgaggccagcagctctgtgtccatcagccacagcgccagcgccactggaaatgtgtgcatcgaggagattgatgtggatggcaagttcatccggctgaagaacaccagcgagcaggaccagcccatgggcggctgggagatgatcaggaagattggagacacctctgtgtcctacaagtacaccagccgctacgtgctgaaggccggccagacagtgaccatctgggccgccaatgctggggtgacagccagccccccaacagacctgatctggaagaaccagaacagctggggcactggagaagatgtgaaggtgatcctgaagaacagccagggcgaggaggtggcccagaggagcaccgtcttcaagaccaccatccctgaggaggaggaggaggaggaggaggccgccggcgtggtggtggaggaggagctgttccaccagcagggcaccccccgggccagcaacagaagctgtgccatcatgtag

SEQ ID NO: 157519 - DNA, 1761 bp, Artificial Sequence
  derived and/or modified sequence
atggccaccgccacccccgtgcccccccggatgggcagccgggccggcgggcccacaacgcccctgtccccaacaaggctgtctcgcttacaggagaaggaggagctgcgtgagctcaacgaccggttggcggtttatatcgacaaagttcggagtcttgaaacggaaaactctgccctgcagctgcaagtgacagagcgggaggaagtgaggggacgcgagctgactggtttgaaggcgttgtacgaaaccgaactggctgacgcccgacgggctttggatgacacagcacgcgagagggctaaacttcagatagagctggggaaatgcaaagcagaacatgatcaactgctcctgaattatgcaaagaaggagtcagacctgaacggggcccaaatcaaattaagggagtacgaagcagccctgaattcaaaggacgcagcattggctacagcgttgggggacaaaaagagcttggagggcgacttggaggatctgaaagatcagattgctcagctagaggcgagcctggcagctgcaaaaaagcaactggccgatgagaccctgctcaaggtcgacctggagaatcgctgtcagagtctgaccgaggatctagaatttcggaagtctatgtacgaggaggagatcaatgagacccgtcgaaaacacgagactcgtcttgtggaggtggattccggccggcaaatcgagtatgaatacaaactggctcaggccctacatgagatgagggagcaacacgatgcccaagtgagactttataaggaagagttggagcaaacttatcacgctaaattggaaaacgcacggctttccagcgagatgaacacatctaccgtcaactctgcaagagaagaattaatggagagccgcatgcggatagagagcctgagctcgcagctgtcaaatcttcaaaaagaaagccgggcgtgcttagaacggatccaagaactggaagacctcctggccaaggaaaaggacaattcccgtaggatgttgacggataaagaaagagaaatggctgagatacgggatcagatgcaacagcagcttaatgattatgagcagcttctggatgtgaagttggccctggacatggaaatatcagcttaccgcaaattactggaaggggaggaggagcgactgaaactcagcccttctccatcgtctagggtgacggtgagcagagcctccagttctcgctccgttcgtacaacaagggggaagcgcaagcgcgtggatgttgaagagagcgaagctagctcttctgtgtctatttcccattctgcaagcgccacgggcaacgtttgtattgaagagatcgatgtggacggcaagttcatccggctgaagaacactagtgagcaggaccagccgatggggggatgggagatgattagaaagattggtgacacttctgtgtcatataagtatacctcaagatatgtgctgaaggcaggccaaaccgtgaccatttgggccgctaacgcaggagtcactgcctcgccgccaacggacctcatttggaagaaccagaacagttgggggactggtgaggatgtgaaggttattttaaaaaattctcaaggcgaggaggtcgcacagaggagtactgtcttcaaaacaactatcccagaagaggaagaggaggaagaggaggccgcaggcgtggtggtggaggaggagctcttccatcaacagggaacaccacgggcaagtaatagaagctgcgctatcatgtag

SEQ ID NO: 157520 - DNA, 1761 bp, Artificial Sequence
  derived and/or modified sequence
atggccactgcaacacccgtgccgccacgcatgggctcacgggctggcggtcccacgactccactatccccaacaaggctcagcaggctccaagagaaggaggagcttcgggaactgaacgataggttggcggtctacatcgacaaagtgagaagtttggagacagagaactccgcattgcagctccaggtgaccgaacgggaagaagtgcgtggtcgtgaactgaccggcctgaaggctttgtatgagacagaacttgctgacgcacggagagctttggatgatacagcgcgagagcgcgctaagctgcagattgagctaggtaaatgtaaagcagagcatgaccaattattacttaactatgcaaagaaggagagtgatctgaacggagcacaaatcaagctgcgagaatatgaggccgctctcaattcaaaggatgcggctcttgcgaccgccctgggcgataaaaagtcgctcgagggagatctcgaggacctgaaagatcagattgcgcaattggaggccagtctcgcggctgccaaaaagcagctcgccgacgaaaccctccttaaagtggacctagagaaccggtgccagagcctgacagaggatctggagttccgtaagtccatgtatgaggaagagataaatgaaactaggcgcaaacacgagaccagactcgtggaggttgactctggacgccagattgagtatgaatataaactggcccaggctctgcacgaaatgcgggaacagcacgatgcacaggttcgactgtacaaagaagagttagagcagacctatcacgccaagctggaaaacgcacgcctgtccagcgagatgaatacaagtacagtgaactcagcacgcgaggaattaatggagtcccggatgcgaattgagtccctctcatcgcagctgtccaaccttcagaaagagtctcgcgcatgcctggagcgaatccaggaacttgaagacctgctcgcgaaggagaaagataatagcagacggatgcttaccgataaagaaagggagatggcagagattcgtgatcagatgcagcagcaacttaacgactacgagcaactgctagatgttaagttggcgctggatatggagatcagtgcgtaccgcaagctgctggaaggggaggaagagaggctgaaattatccccgtccccctccagccgggtaaccgtcagccgggcttcttcctcccgaagtgttagaactacgaggggcaaaagaaagcgcgtcgatgtggaagaaagtgaggcatcctctagcgtctccatctcacactccgctagcgcaaccggaaacgtctgtatcgaggagattgacgttgacggaaagtttatccggcttaaaaatactagcgagcaggaccagcctatgggcggatgggagatgattcgcaaaattggtgatacctcggtttcatacaagtacacatctcgttacgtgcttaaggcaggccaaaccgttactatctgggccgctaacgccggagtgacagcctccccccctaccgatctcatatggaaaaatcagaatagctggggtacaggagaggatgtgaaggtcatcctcaagaattcacaaggagaggaggtcgctcagagatctactgtgttcaaaacgactatcccggaagaagaggaggaggaggaggaggccgctggagtcgttgtcgaggaagagcttttccatcagcagggaacacccagggcctctaatcgtagctgtgcaataatgtag

SEQ ID NO: 157521 - DNA, 1761 bp, Artificial Sequence
  derived and/or modified sequence
atggccaccgccacccccgtgccccccagaatgggcagcagagccggcggccccaccacccccctgagccccaccagactgagcagactgcaggagaaggaggagctgagagagctgaacgacagactggccgtgtacatcgacaaggtgagaagcctggagaccgagaacagcgccctgcagctgcaggtgaccgagagagaggaggtgagaggcagagagctgaccggcctgaaggccctgtacgagaccgagctggccgacgccagaagagccctggacgacaccgccagagagagagccaagctgcagatcgagctgggcaagtgcaaggccgagcacgaccagctgctgctgaactacgccaagaaggagagcgacctgaacggcgcccagatcaagctgagagagtacgaggccgccctgaacagcaaggacgccgccctggccaccgccctgggcgacaagaagagcctggagggcgacctggaggacctgaaggaccagatcgcccagctggaggccagcctggccgccgccaagaagcagctggccgacgagaccctgctgaaggtggacctggagaacagatgccagagcctgaccgaggacctggagttcagaaagagcatgtacgaggaggagatcaacgagaccagaagaaagcacgagaccagactggtggaggtggacagcggcagacagatcgagtacgagtacaagctggcccaggccctgcacgagatgagagagcagcacgacgcccaggtgagactgtacaaggaggagctggagcagacctaccacgccaagctggagaacgccagactgagcagcgagatgaacaccagcaccgtgaacagcgccagagaggagctgatggagagcagaatgagaatcgagagcctgagcagccagctgagcaacctgcagaaggagagcagagcctgcctggagagaatccaggagctggaggacctgctggccaaggagaaggacaacagcagaagaatgctgaccgacaaggagagagagatggccgagatcagagaccagatgcagcagcagctgaacgactacgagcagctgctggacgtgaagctggccctggacatggagatcagcgcctacagaaagctgctggagggcgaggaggagagactgaagctgagccccagccccagcagcagagtgaccgtgagcagagccagcagcagcagaagcgtgagaaccaccagaggcaagagaaagagagtggacgtggaggagagcgaggccagcagcagcgtgagcatcagccacagcgccagcgccaccggcaacgtgtgcatcgaggagatcgacgtggacggcaagttcatcagactgaagaacaccagcgagcaggaccagcccatgggcggctgggagatgatcagaaagatcggcgacaccagcgtgagctacaagtacaccagcagatacgtgctgaaggccggccagaccgtgaccatctgggccgccaacgccggcgtgaccgccagcccccccaccgacctgatctggaagaaccagaacagctggggcaccggcgaggacgtgaaggtgatcctgaagaacagccagggcgaggaggtggcccagagaagcaccgtgttcaagaccaccatccccgaggaggaggaggaggaggaggaggccgccggcgtggtggtggaggaggagctgttccaccagcagggcacccccagagccagcaacagaagctgcgccatcatgtag

SEQ ID NO: 157522 - protein, 227 aa, Artificial Sequence
  derived and/or modified sequence
MEGSAVTVLERGGASSPAERRSKRRRRSGGDGGGGGGARAPEGVRAPAAGQPRATKGAPPPPGTPPPSPMSSAIERKSLDPSEEPVDEVLQIPPSLLTCGGCQQNIGDRYFLKAIDQYWHEDCLSCDLCGCRLGEVGRRLYYKLGRKLCRRDYLRLFGQDGLCASCDKRIRAYEMTMRVKDKVYHLECFKCAACQKHFCVGDRYLLINSDIVCEQDIYEWTKINGMI

SEQ ID NO: 157523 - protein, 158 aa, Artificial Sequence
  derived and/or modified sequence
MSSAIERKSLDPSEEPVDEVLQIPPSLLTCGGCQQNIGDRYFLKAIDQYWHEDCLSCDLCGCRLGEVGRRLYYKLGRKLCRRDYLRLFGQDGLCASCDKRIRAYEMTMRVKDKVYHLECFKCAACQKHFCVGDRYLLINSDIVCEQDIYEWTKINGMI

SEQ ID NO: 157524 - DNA, 2303 bp, Artificial Sequence
  derived and/or modified sequence
gaattcgtccaaactgaggatcacaagtctccacattctgagtaggaggatgagggtctgagttaggatttgggtcctgcagggcttgctaaggaatcccctgatggcctaggattccacgcagagcacatctggtgtgagagagctcgctgcaagggtgaaggctccgccctatcagatagacaaccaggccaccaagaggcccagccctccaaaccctggatttgcaacatcctcaaagaacagcaacgggccttgagcagaattgagaaggaaatacccccacctgccctcagccgttaagtgggctttgctattcacaagggcctctgggtgtcctggcagagaggggagatggcacaggcaccaggtgctagggtgccagggcctcccgagaaggaacaggtgcaaagcaggcaattagcccagaaggtatccgtggggcaggcagcctagatctgatgggggaagccaccaggattacatcatctgctgtaacaactgctctgaaaagaagatatttttcaacctgaacttgcagtagctagtggagaggcaggaaaaaggaaatgaaaccagagacagagggaagctgagcgaaaatagaccttcccgagagaggaggaagcccggagagagacgcacggtcccctccccgcccctaggccgccgccccctctctgccctcggcggcgagcagcgcgccgcgacccgggccgaaggtgcgaggggctccgggcggccgggcgggcgcacaccatccccgcgggcggcgcggagccggcgacagcgcgcgagagggaccgggcggtggcggcggcgggaccgggatggaagggagcgcggtgactgtccttgagcgcggaggggcgagctcgccggcggagcgccggagcaagcggaggcgcaggagcggcggcgacggcggcggcggcggcggcgcccgagcacccgagggggtccgagccccggcagccggccagccccgcgccacaaagggagcgcccccgccgcccggcaccccgcctccctccccaatgtcctcggccatcgaaaggaagagcctggacccttcagaggaaccagtggatgaggtgctgcagatccccccatccctgctgacatgcggcggctgccagcagaacattggggaccgctacttcctgaaggccatcgaccagtactggcacgaggactgcctgagctgcgacctctgtggctgccggctgggtgaggtggggcggcgcctctactacaaactgggccggaagctctgccggagagactatctcaggctttttgggcaagacggtctctgcgcatcctgtgacaagcggattcgtgcctatgagatgacaatgcgggtgaaagacaaagtgtatcacctggaatgtttcaaatgcgccgcctgtcagaagcatttctgtgtaggtgacagatacctcctcatcaactctgacatagtgtgcgaacaggacatctacgagtggactaagatcaatgggatgatataggcccgagtccccgggcatctttggggaggtgttcactgaagacgccgtctccatggcatcttcgtcttcactcttaggcactttgggggtttgagggtggggtaagggatttcttaggggatggtagacctttattgggtatcaagacatagcatccaagtggcataattcaggggctgacacttcaaggtgacagaaggaccagcccttgagggagaacttatggccacagcccatccatagtaactgacatgattagcagaagaaaggaacatttaggggcaagcaggcgctgtgctatcatgatggaatttcatatctacagatagagagttgttgtgtacagacttgttgtgactttgacgcttgcgaactagagatgtgcaattgatttcttttcttcctggctttttaactcccctgtttcaatcactgtcctccacacaagggaaggacagaaaggagagtggccattctttttttcttggcccccttcccaaggccttaagctttggacccaaggaaaactgcatggagacgcatttcggttgagaatggaaaccacaacttttaaccaaacaattatttaaagcaatgctgatgaatcactgtttttagacaccttcattttgaggggaggagttccacagattgtttctatacaaatataaatcttaaaaagttgttcaactattttattatcctagattatatcaaagtatttgtcgtgtgtagaaaaaaaaacagctctgcaggcttaataaaaatgacagactgaaaaaaaaaaaa

SEQ ID NO: 157525 - DNA, 684 bp, Artificial Sequence
  derived and/or modified sequence
atggagggcagcgccgtgaccgtgctggagagaggcggcgccagcagccccgccgagagaagaagcaagagaagaagaagaagcggcggcgacggcggcggcggcggcggcgccagagcccccgagggcgtgagagcccccgccgccggccagcccagagccaccaagggcgccccccccccccccggcacccccccccccagccccatgagcagcgccatcgagagaaagagcctggaccccagcgaggagcccgtggacgaggtgctgcagatcccccccagcctgctgacctgcggcggctgccagcagaacatcggcgacagatacttcctgaaggccatcgaccagtactggcacgaggactgcctgagctgcgacctgtgcggctgcagactgggcgaggtgggcagaagactgtactacaagctgggcagaaagctgtgcagaagagactacctgagactgttcggccaggacggcctgtgcgccagctgcgacaagagaatcagagcctacgagatgaccatgagagtgaaggacaaggtgtaccacctggagtgcttcaagtgcgccgcctgccagaagcacttctgcgtgggcgacagatacctgctgatcaacagcgacatcgtgtgcgagcaggacatctacgagtggaccaagatcaacggcatgatctag

SEQ ID NO: 157526 - DNA, 684 bp, Artificial Sequence
  derived and/or modified sequence
atggagggatccgccgtcaccgtgcttgagcggggtggggcgtcatcccctgccgaaagacgctccaaacggcggcgcaggtctgggggggatggtgggggaggcggaggggctcgagcccctgagggcgtgagagcgccagcagccggacagccaagagccaccaagggtgcccccccgcctccaggcactcccccaccgtcaccaatgtcctcagccattgagcgcaaatccttagacccttccgaggagcctgtcgatgaagtgctgcagataccgccttctctgctcacatgtggaggctgtcaacaaaatattggggatcggtattttttgaaagccattgatcagtactggcacgaagattgcctctcttgcgatctgtgtggctgcaggctgggtgaagttggaaggcgcctttactataaacttggacgcaagttgtgccgccgcgactacctgcgactgtttgggcaggatgggctgtgtgctagttgcgataagcggattcgagcctatgagatgacgatgcgcgtgaaagacaaggtgtatcacctggaatgctttaaatgcgctgcatgccagaaacatttttgtgtgggcgacagatacttattaattaactctgacatcgtttgcgaacaggatatctacgaatggaccaagataaacgggatgatttag

SEQ ID NO: 157527 - DNA, 684 bp, Artificial Sequence
  derived and/or modified sequence
atggagggcagcgctgtgacagtgctggagcggggcggggccagcagccctgctgagcggcgcagcaagagaagaagaagaagtggaggagatggcggcggcggcggcggggcccgggcccctgagggcgtgcgggccccagctgctggccagccccgggccaccaagggggcccctcctcctcctggcaccccaccacccagccccatgagcagcgccatcgagaggaagagcctggaccccagcgaggagcctgtggatgaggtgctgcagatcccccccagcctgctgacctgtggcggctgccagcagaacatcggggaccgctacttcctgaaggccatcgaccagtactggcatgaggactgcctgagctgtgacctgtgtggctgccgcctgggggaggtgggccggcggctgtactacaagctgggcaggaagctgtgccggcgggactacctgcggctgtttggccaggacggcctgtgtgccagctgtgacaagaggatccgggcctatgagatgaccatgagggtgaaggacaaggtgtaccacctggagtgcttcaagtgtgccgcctgccagaagcacttctgtgtgggggaccgctacctgctgatcaacagcgacatcgtgtgtgagcaggacatctatgagtggaccaagatcaatggcatgatctag

SEQ ID NO: 157528 - DNA, 2294 bp, Artificial Sequence
  derived and/or modified sequence
gaattcgtccaaactgaggatcacaagtctccacattctgagtaggaggatgagggtctgagttaggatttgggtcctgcagggcttgctaaggaatcccctgatggcctaggattccacgcagagcacatctggtgtgagagagctcgctgcaagggtgaaggctccgccctatcagatagacaaccaggccaccaagaggcccagccctccaaaccctggatttgcaacatcctcaaagaacagcaacgggccttgagcagaattgagaaggaaatacccccacctgccctcagccgttaagtgggctttgctattcacaagggcctctgggtgtcctggcagagaggggagatggcacaggcaccaggtgctagggtgccagggcctcccgagaaggaacaggtgcaaagcaggcaattagcccagaaggtatccgtggggcaggcagcctagatctgatgggggaagccaccaggattacatcatctgctgtaacaactgctctgaaaagaagatatttttcaacctgaacttgcagtagctagtggagaggcaggaaaaaggaaatgaaaccagagacagagggaagctgagcgaaaatagaccttcccgagagaggaggaagcccggagagagacgcacggtcccctccccgcccctaggccgccgccccctctctgccctcggcggcgagcagcgcgccgcgacccgggccgaaggtgcgaggggctccgggcggccgggcgggcgcacaccatccccgcgggcggcgcggagccggcgacagcgcgcgagagggaccgggcggtggcggcggcgggaccgggatggaagggagcgcggtgactgtccttgagcgcggaggggcgagctcgccggcggagcgccggagcaagcggaggcgcaggagcggcggcgacggcggcggcggcggcggcgcccgagcacccgagggggtccgagccccggcagccggccagccccgcgccacaaagggagcgcccccgccgcccggcaccccgcctccctccccaatgtcctcggccatcgaaaggaagagcctggacccttcagaggaaccagtggatgaggtgctgcagatccccccatccctgctgacatgcggcggctgccagcagaacattggggaccgctacttcctgaaggccatcgaccagtactggcacgaggactgcctgagctgcgacctctgtggctgccggctgggtgaggtggggcggcgcctctactacaaactgggccggaagctctgccggagagactatctcaggctttttgggcaagacggtctctgcgcatcctgtgacaagcggattcgtgcctatgagatgacaatgcgggtgaaagacaaagtgtatcacctggaatgtttcaaatgcgccgcctgtcagaagcatttctgtgtaggtgacagatacctcctcatcaactctgacatagtgtgcgaacaggacatctacgagtggactaagatcaatgggatgatataggcccgagtccccgggcatctttggggaggtgttcactgaagacgccgtctccatggcatcttcgtcttcactcttaggcactttgggggtttgagggtggggtaagggatttcttaggggatggtagacctttattgggtatcaagacatagcatccaagtggcataattcaggggctgacacttcaaggtgacagaaggaccagcccttgagggagaacttatggccacagcccatccatagtaactgacatgattagcagaagaaaggaacatttaggggcaagcaggcgctgtgctatcatgatggaatttcatatctacagatagagagttgttgtgtacagacttgttgtgactttgacgcttgcgaactagagatgtgcaattgatttcttttcttcctggctttttaactcccctgtttcaatcactgtcctccacacaagggaaggacagaaaggagagtggccattctttttttcttggcccccttcccaaggccttaagctttggacccaaggaaaactgcatggagacgcatttcggttgagaatggaaaccacaacttttaaccaaacaattatttaaagcaatgctgatgaatcactgtttttagacaccttcattttgaggggaggagttccacagattgtttctatacaaatataaatcttaaaaagttgttcaactattttattatcctagattatatcaaagtatttgtcgtgtgtagaaaaaaaaacagctctgcaggcttaataaaaatgacagactgaaa

SEQ ID NO: 157529 - DNA, 1687 bp, Artificial Sequence
  derived and/or modified sequence
ggctccgggcggccgggcgggcgcacaccatccccgcgggcggcgcggagccggcgacagcgcgcgagagggaccgggcggtggcggcggcgggaccgggatggaaggttaagtcctgagcagcagcagcagctgcagccgcctggagccaggctgcgcgccccggcccccgcctcggccgcggcgcgcccgcagcccggtgattcgctctctctctttggcgtttgaagggagcgcggtgactgtccttgagcgcggaggggcgagctcgccggcggagcgccggagcaagcggaggcgcaggagcggcggcgacggcggcggcggcggcggcgcccgagcacccgagggggtccgagccccggcagccggccagccccgcgccacaaagggagcgcccccgccgcccggcaccccgcctccctccccaatgtcctcggccatcgaaaggaagagcctggacccttcagaggaaccagtggatgaggtgctgcagatccccccatccctgctgacatgcggcggctgccagcagaacattggggaccgctacttcctgaaggccatcgaccagtactggcacgaggactgcctgagctgcgacctctgtggctgccggctgggtgaggtggggcggcgcctctactacaaactgggccggaagctctgccggagagactatctcaggctttttgggcaagacggtctctgcgcatcctgtgacaagcggattcgtgcctatgagatgacaatgcgggtgaaagacaaagtgtatcacctggaatgtttcaaatgcgccgcctgtcagaagcatttctgtgtaggtgacagatacctcctcatcaactctgacatagtgtgcgaacaggacatctacgagtggactaagatcaatgggatgatataggcccgagtccccgggcatctttggggaggtgttcactgaagacgccgtctccatggcatcttcgtcttcactcttaggcactttgggggtttgagggtggggtaagggatttcttaggggatggtagacctttattgggtatcaagacatagcatccaagtggcataattcaggggctgacacttcaaggtgacagaaggaccagcccttgagggagaacttatggccacagcccatccatagtaactgacatgattagcagaagaaaggaacatttaggggcaagcaggcgctgtgctatcatgatggaatttcatatctacagatagagagttgttgtgtacagacttgttgtgactttgacgcttgcgaactagagatgtgcaattgatttcttttcttcctggctttttaactcccctgtttcaatcactgtcctccacacaagggaaggacagaaaggagagtggccattctttttttcttggcccccttcccaaggccttaagctttggacccaaggaaaactgcatggagacgcatttcggttgagaatggaaaccacaacttttaaccaaacaattatttaaagcaatgctgatgaatcactgtttttagacaccttcattttgaggggaggagttccacagattgtttctatacaaatataaatcttaaaaagttgttcaactattttattatcctagattatatcaaagtatttgtcgtgtgtagaaaaaaaaacagctctgcaggcttaataaaaatgacagactgaaa

SEQ ID NO: 157530 - DNA, 684 bp, Artificial Sequence
  derived and/or modified sequence
atggagggcagcgccgtgaccgtgctggagcggggcggcgccagcagtcccgcggagaggaggtcaaagcggcggagaagatctggcggcgacggtgggggaggcggtggcgctcgtgcccccgaaggagtgagggctcccgcggccgggcagcccagagcaacaaaaggggcacccccccccccagggacacctcccccaagcccaatgtcaagcgcaatagaaaggaagtccctcgaccctagcgaagagcccgtggatgaagtgctccagatccctcccagcctgctgacctgtggcggatgccaacagaatattggggataggtatttcctgaaggcgattgaccagtactggcacgaggattgtctgagttgtgacctctgtggctgtaggctgggggaggtgggtcggagactgtactacaaattgggccgcaaactgtgccggagggactaccttagactctttggccaggacggtctgtgtgcctcttgcgacaaacgcattagggcgtatgagatgaccatgagagtgaaggataaggtgtatcatctggagtgtttcaagtgtgctgcctgccagaaacacttttgcgtgggggaccgctacctcttgatcaacagcgatattgtctgcgaacaagacatatacgagtggactaagatcaacgggatgatctag

SEQ ID NO: 157531 - DNA, 684 bp, Artificial Sequence
  derived and/or modified sequence
atggagggcagtgcagttacagtattagaacggggtggggcatcctcccccgctgaacgaagatccaagcgtcgtcgtagatccggaggcgatggcggaggaggcggaggtgctagagccccagagggtgttcgagcaccggctgcagggcaaccaagggccactaagggtgcacctccgcctccaggaacgcctcccccttcaccaatgtcaagtgccattgaaagaaagagcttggaccctagcgaggagccagtggatgaggtgctgcaaattccaccaagccttttaacctgtggcggatgtcagcagaacattggcgataggtactttttaaaagccattgatcagtattggcatgaggattgtctatcttgtgacttgtgcggatgtagactgggtgaggtcggaagacgactgtactacaaactcggacgtaagctgtgtcgcagagactatctacgcctatttgggcaggacggcctctgtgctagctgcgataagcggattcgagcctatgagatgactatgcgcgtcaaggataaagtgtaccacctcgagtgcttcaagtgtgctgcgtgccagaaacacttctgtgttggagaccgatacctgcttattaactccgatattgtgtgtgagcaggatatctacgaatggactaaaatcaatggcatgatctag

SEQ ID NO: 157532 - DNA, 321 bp, Artificial Sequence
  derived and/or modified sequence
atgaggccgaaaacactcagaaattccgctgccaggtctcggaaggaaccgggattcttgaatcatcacatggaaggatcttgcctgcagctcggggaattatcctccgtagggtactggtggcccttcggtcatcctgggcctgcccagggacaccttccggtggctgtgtgggcttcttgggtggttgccggtatctccatcgccctgtacctcccgccccatccagaaggaagatacgaaggcccctttaagcggcataccaagacatttcggtcagctcagtgtgcggattgcctgacctgcgccctagaaccatag

SEQ ID NO: 157533 - protein, 1025 aa, Artificial Sequence
  derived and/or modified sequence
MEPFTNDRLQLPRNMIENSMFEEEPDVVDLAKEPCLHPLEPDEVEYEPRGSRLLVRGLGEHEMEEDEEDYESSAKLLGMSFMNRSSGLRNSATGYRQSPDGACSVPSARTMVVCAFVIVVAVSVIMVIYLLPRCTFTKEGCHKKNQSIGLIQPFATNGKLFPWAQIRLPTAVVPLRYELSLHPNLTSMTFRGSVTISVQALQVTWNIILHSTGHNISRVTFMSAVSSQEKQAEILEYAYHGQIAIVAPEALLAGHNYTLKIEYSANISSSYYGFYGFSYTDESNEKKYFAATQFEPLAARSAFPCFDEPAFKATFIIKIIRDEQYTALSNMPKKSSVVLDDGLVQDEFSESVKMSTYLVAFIVGEMKNLSQDVNGTLVSIYAVPEKIGQVHYALETTVKLLEFFQNYFEIQYPLKKLDLVAIPDFEAGAMENWGLLTFREETLLYDSNTSSMADRKLVTKIIAHELAHQWFGNLVTMKWWNDLWLNEGFATFMEYFSLEKIFKELSSYEDFLDARFKTMKKDSLNSSHPISSSVQSSEQIEEMFDSLSYFKGSSLLLMLKTYLSEDVFQHAVVLYLHNHSYASIQSDDLWDSFNEVTNQTLDVKRMMKTWTLQKGFPLVTVQKKGKELFIQQERFFLNMKPEIQPSDTSYLWHIPLSYVTEGRNYSKYQSVSLLDKKSGVINLTEEVLWVKVNINMNGYYIVHYADDDWEALIHQLKINPYVLSDKDRANLINNIFELAGLGKVPLKRAFDLINYLGNENHTAPITEALFQTDLIYNLLEKLGYMDLASRLVTRVFKLLQNQIQQQTWTDEGTPSMRELRSALLEFACTHNLGNCSTTAMKLFDDWMASNGTQSLPTDVMTTVFKVGAKTDKGWSFLLGKYISIGSEAEKNKILEALASSEDVRKLYWLMKSSLNGDNFRTQKLSFIIRTVGRHFPGHLLAWDFVKENWNKLVQKFPLGSYTIQNIVAGSTYLFSTKTHLSEVQAFFENQSEATFRLRCVQEALEVIQLNIQWMEKNLKSLTWWL

SEQ ID NO: 157534 - DNA, 3078 bp, Artificial Sequence
  derived and/or modified sequence
atggagccttttacgaatgatagattgcagttgcctaggaatatgatcgagaacagcatgtttgaagaagaacctgatgttgtagatcttgccaaggaaccctgcctgcatcctcttgagccagatgaggtcgagtatgaaccccggggctcacgcttgctcgtcagagggttgggagaacatgaaatggaagaggacgaggaggattacgagtcctccgccaagttgctagggatgagctttatgaaccggagcagtggcctacgaaactctgcaaccggttatcgacagtcccctgatggagcatgttccgtaccgtccgctcgcaccatggtcgtgtgcgcctttgtaatcgtcgtcgccgtgagcgtgatcatggtgatctatcttctgccccgatgcacatttacaaaggaaggatgtcacaagaaaaatcagagcattggcctgatccagcccttcgctactaacggaaagctattcccctgggcgcagattagattacccaccgcagtggtacccctgaggtatgaacttagcctccacccaaatctgactagcatgacttttcgcggcagtgttactattagcgtccaggccttgcaggttacatggaacattatcttgcactctactgggcacaatatttctcgggtgacctttatgtcagctgtgtcttctcaggagaagcaggctgaaatcttggaatacgcatatcatggccagatcgcgattgtggcccctgaggccctgcttgctggacacaactacactctcaagattgaatactccgcgaatatttcttccagttattacggcttctatggattttcctataccgatgagagcaatgagaagaagtactttgctgcaacccagttcgagcctttagctgcgaggagtgcctttccttgcttcgatgaaccagcatttaaggccacctttattatcaagattatccgcgatgaacagtatacagctttgtctaacatgcccaaaaagagctccgtggtgttggacgatggactcgttcaggacgaattcagcgaatctgtgaaaatgtcaacctacctggttgctttcattgtcggcgagatgaaaaatctgagtcaggacgtgaatggaactctggtatcaatttatgcggttcccgaaaagattggacaggtgcattatgccctggagaccaccgttaagctgctcgagttcttccaaaattatttcgaaatccagtaccccctcaagaagttggatctagtggctattccagactttgaagctggagccatggagaactggggtctgctcacattcagggaggaaactctgctctatgatagcaacacatcttctatggccgataggaagcttgtgacgaaaatcatagcccatgagctggctcatcagtggttcggaaatctggtgacgatgaagtggtggaacgatctgtggctgaatgaaggcttcgctacatttatggagtattttagcttagagaaaatcttcaaggagttatcttcctacgaagacttcctcgacgcccggtttaaaaccatgaaaaaggacagtcttaattctagccacccgatctctagtagcgtgcaatcttctgagcagattgaggaaatgttcgactccctctcttactttaaaggaagtagcctgctgctcatgctaaagacctatttgtccgaggacgtgttccagcatgcagtggtgctttatctccacaatcacagttatgcgtccattcagtctgacgacttatgggacagctttaatgaggttacgaatcagaccttagatgttaagagaatgatgaagacatggaccctccaaaagggcttccctctggtaactgttcagaagaagggcaaagaactatttattcagcaggagagattcttcctcaacatgaaacccgagattcagccttccgatacctcttatctgtggcacatacccctatcttatgtgactgagggcaggaactactcaaaataccagtccgttagcctgcttgataagaagtccggggtgatcaacctcactgaagaggtcctttgggtgaaagtaaacattaatatgaacgggtattacatcgtacattacgccgacgatgactgggaagcactgatccatcaactgaagatcaacccatacgtgttaagcgacaaggaccgtgctaacctgatcaataacatctttgaacttgccggcctgggtaaagtgcctcttaagcgcgcattcgacttgatcaattatctcggtaatgaaaatcataccgccccaatcactgaagctttgtttcaaaccgatctgatctacaatctcctcgaaaagttagggtacatggaccttgccagtcggcttgtaacgcgcgtcttcaaactcctccaaaatcagatccagcaacaaacatggaccgacgaaggcacgccctctatgcgggagctgaggtctgccctcctggagtttgcttgcactcataacctcggaaactgctccacgaccgcaatgaagctgttcgacgattggatggcctctaacggcactcagtccttaccgactgacgttatgacaaccgtcttcaaggtgggcgccaagactgacaagggatggagttttcttctcggcaaatatatctccatcgggagcgaggccgagaagaacaagatcctggaggcactggcttccagcgaagatgtgcgtaagctttactggctcatgaaatcatcattaaatggcgataattttaggactcagaaattatcctttattatcaggacagtgggtcgtcactttcctggccatcttctcgcctgggacttcgtgaaggagaactggaataagctcgttcagaagtttccactaggctcttacacgatccaaaatattgtggcagggtctacttatctgttttctaccaagactcatctgagtgaggtgcaggccttctttgaaaatcagtcagaggctacctttaggcttaggtgtgtccaggaggccttagaggtgatccagctgaatatccaatggatggagaaaaatctcaagtctctgacctggtggctctag

SEQ ID NO: 157535 - DNA, 3036 bp, Artificial Sequence
  derived and/or modified sequence
atgatcgagaacagcatgtttgaagaggagcctgatgtggtggaccttgccaaagagccatgcctgcatcccctggagccagacgaggttgaatacgaaccaagggggagcagattgctggtcagaggtctcggagaacacgaaatggaggaagacgaggaggactacgagtcctccgctaaattactcgggatgagcttcatgaaccgctccagcggccttagaaatagtgcaactggctaccgccaatctcctgacggggcatgtagcgttccaagcgcaagaacgatggttgtctgcgcgtttgtgatcgtggtcgctgtctcagtgataatggtaatttacctgctgccaagatgcaccttcaccaaggagggttgccacaaaaaaaatcagagcataggactgatccagccgttcgcgactaacggcaagctgttcccttgggcacagatccgcctgccaaccgctgtcgtccctctccgctatgagctttctcttcatcccaatcttacaagcatgacttttagagggagcgtgaccatctcggttcaggcactgcaagtcacttggaatataatattacactcaaccggccacaatatctctcgggttacgtttatgagcgctgtgtcctcacaagaaaagcaggccgagattctcgagtatgcttaccacgggcaaatcgctattgttgcgcccgaggctctgctggctggacataactacactctgaagatcgaatacagcgccaatataagttcatcgtattacggcttttacgggttttcgtacacggatgagtctaatgaaaaaaaatactttgcagccactcagtttgaacctctggctgcaaggtcagcttttccctgcttcgacgagcccgcttttaaggccaccttcataatcaagataataagagatgagcagtatacggcacttagcaacatgccgaagaagtctagcgtagtgcttgacgatgggcttgtgcaagatgagttttctgaatcagtaaagatgagcacatatctggttgcattcattgtcggggagatgaagaacttaagccaggatgtgaacggcacgttggtttcaatctatgcagtacctgagaagatcgggcaggtacactacgctctagagaccaccgtgaaacttttggaattctttcagaactattttgagatccaatatccgctcaagaagttagacctggtcgcaattcctgatttcgaggctggggctatggagaactggggactgcttactttccgggaggagaccctcctgtacgacagtaatacatcctccatggcggaccgtaaactggtaacgaagatcattgctcacgagcttgctcatcagtggttcggaaacctagtcacaatgaaatggtggaacgatctctggctgaacgaggggttcgccaccttcatggagtacttttccttagagaagattttcaaggagctgagttcttacgaagatttcctcgacgccagattcaaaactatgaaaaaggactccctgaattcttctcatcccatttcctcttctgtgcagtcgtccgagcagatcgaggaaatgtttgacagtttgagctacttcaaaggctcttctctgcttcttatgttgaagacgtatctctcagaggacgtttttcagcacgcggttgttctttatctgcacaatcacagctacgcttcaatccaaagcgatgacctgtgggattcatttaatgaggtgaccaaccagaccctagatgtcaaaaggatgatgaagacgtggaccctccagaagggattcccactggtgacagtacagaagaagggcaaggaactgttcatacaacaagaacgattcttcctgaacatgaagcccgagatacaaccctcggatacgagctatctatggcacatacctctcagttatgttactgaaggtaggaactactccaagtatcagagcgtatccctgcttgataaaaagtctggcgtgattaaccttactgaggaagtcctgtgggttaaagtaaacatcaacatgaacgggtactacattgtgcactacgctgatgacgactgggaggctctgattcaccagttaaagatcaatccttacgtgctctccgacaaggacagagcgaacttaattaataatatctttgaactcgccggcctgggaaaggtcccactgaaacgggcattcgacctgattaactacctcggcaacgaaaatcatactgcccccattacagaggccctttttcagacggacctgatttataaccttctggagaagctcggatatatggatctggcaagccggctggtgacccgggtcttcaaactgcttcagaatcagatacaacagcagacgtggacagacgaagggacccctagcatgcgagagctccgcagcgctttgctggaattcgcctgtacgcacaatctggggaattgctccacgacagccatgaagctctttgacgattggatggcctctaacggaacgcagtctttaccaactgatgtcatgaccacggtcttcaaagtgggcgccaagaccgataaaggatggtcattcctgctgggcaagtacatctccatcggatcagaggccgagaaaaataagatcctggaagcgctggcctcttctgaagacgtccgtaaactttattggctaatgaagtctagtcttaatggcgataactttcggacccagaagctgtcctttattattagaaccgtgggacggcatttccctggacatctcctcgcctgggatttcgttaaggagaattggaataaactggtgcagaaattcccactgggatcctatacaatacaaaatatcgtcgccggcagcacatacctgttttctacgaagacacatctttctgaggtgcaggccttcttcgagaatcagagtgaggctacattcaggttgagatgcgtccaggaggcactggaggttatccaactgaacatccaatggatggaaaagaacctcaagtcactgacatggtggctgtag

SEQ ID NO: 157536 - DNA, 3078 bp, Artificial Sequence
  derived and/or modified sequence
atggagcccttcaccaatgaccggctgcagctgcccaggaacatgattgaaaattccatgtttgaggaggagccagatgtggtggacctggccaaggagccctgcctgcaccccctggagccagatgaggtggagtatgagccccggggcagccggctgctggtgcggggcctgggggagcacgagatggaggaggatgaggaggactatgagagcagcgccaagctgctgggcatgtccttcatgaacagaagcagcggcctgagaaattctgccaccggctaccggcagagcccagatggagcctgcagcgtgcccagcgcccggaccatggtggtgtgtgccttcgtcatcgtggtggccgtgtctgtcatcatggtgatctacctgctgccccgctgcaccttcaccaaggagggctgccacaagaagaaccagagcatcggcctcatccagccctttgccaccaacgggaagctgttcccctgggcccagatccggctgcccacagctgtggtgcccctgcgctatgagctgagcctgcaccccaacctgacctccatgaccttccggggctctgtgaccatctctgtgcaggccctgcaggtgacctggaacatcatcctgcacagcacaggccacaacatcagccgggtgaccttcatgtctgctgtgagcagccaggagaagcaggccgagatcctggagtatgcctaccacggccagatcgccatcgtggcccctgaggccctgctggccggccacaactacaccctgaagattgagtacagcgccaacatcagcagcagctactacggcttctacggcttctcctacacagatgagagcaatgagaagaagtactttgctgccacccagtttgagcccctggccgcccggagcgccttcccctgctttgatgagcccgccttcaaggccaccttcatcatcaagatcatcagagatgagcagtacacagccctgagcaacatgcccaagaagagctctgtggtgctggatgatggcctggtgcaggatgagttcagcgagagcgtgaagatgagcacctacctggtggccttcatcgtgggggagatgaagaacctgagccaggatgtgaatggcaccctggtgtccatctatgctgtgcctgagaagattggccaggtgcactacgccctggagaccaccgtgaagctgctggagttcttccagaactactttgagatccagtaccccctgaagaagctggacctggtggccatcccagactttgaagctggggccatggagaactggggcctgctgaccttccgggaggagaccctgctgtatgacagcaacaccagctccatggctgacaggaagctggtgaccaagatcatcgcccacgagctggcccaccagtggtttggaaacctggtgaccatgaagtggtggaatgacctgtggctgaatgaaggatttgccaccttcatggagtacttcagcctggagaagatcttcaaggagctgagcagctatgaggacttcctggatgcccgcttcaagaccatgaagaaggacagcctgaacagcagccaccccatcagcagctctgtgcagagcagcgagcagatcgaggagatgtttgacagcctgagctacttcaagggcagcagcctgctgctgatgctgaagacctacctgtctgaagatgtgttccagcacgctgtggtgctgtacctgcacaaccacagctatgccagcatccagagtgatgacctgtgggacagcttcaatgaggtgaccaaccagaccctggatgtgaagaggatgatgaagacctggaccctgcagaagggcttccccctggtgacagtgcagaagaagggcaaggagctgttcatccagcaggagcgcttcttcctgaacatgaagccagagatccagcccagcgacaccagctacctgtggcacatccccctgtcctatgtgacagagggcaggaactacagcaagtaccagagcgtgtccctgctggacaagaagagcggggtcatcaacctgacagaggaggtgctgtgggtgaaggtgaacatcaacatgaatggctactacatcgtgcactatgcagatgatgactgggaggccctgatccaccagctgaagatcaacccctacgtgctgagtgacaaggaccgggccaacctgatcaacaacatctttgagctggccggcctgggcaaggtgcccctgaagagggcctttgacctgatcaactacctgggcaatgaaaaccacacagcccccatcacagaggccctcttccagacagacctgatctacaacctgctggagaagctgggctacatggacctggccagccggctggtgaccagggtcttcaagctgctgcagaaccagatccagcagcagacctggacagatgagggcacccccagcatgagggagctgcggagcgccctgctggagtttgcctgcacccacaacctgggcaactgcagcaccacagccatgaagctgtttgatgactggatggccagcaatggcacccagagcctgcccacagatgtgatgaccaccgtcttcaaggtgggcgccaagacagacaagggctggagcttcctgctgggcaagtacatcagcatcggcagcgaggccgagaagaacaagatcctggaggccctggccagcagtgaagatgtgaggaagctgtactggctgatgaagagcagcctgaatggagacaacttccgcacccagaagctgtccttcatcatcagaacagtgggccgccacttccctggccacctgctggcctgggactttgtgaaggagaactggaacaagctggtgcagaagttccccctgggcagctacaccatccagaacatcgtggccggcagcacctacctgttcagcaccaagacccacctgtctgaggtgcaggccttctttgagaaccagagcgaggccaccttccggctgcgctgtgtgcaggaggccctggaggtgatccagctgaacatccagtggatggagaagaacctgaagagcctgacctggtggctgtag

SEQ ID NO: 157537 - DNA, 3036 bp, Artificial Sequence
  derived and/or modified sequence
atgattgaaaattccatgtttgaggaggagccagatgtggtggacctggccaaggagccctgcctgcaccccctggagccagatgaggtggagtatgagccccggggcagccggctgctggtgcggggcctgggggagcacgagatggaggaggatgaggaggactatgagagcagcgccaagctgctgggcatgtccttcatgaacagaagcagcggcctgagaaattctgccaccggctaccggcagagcccagatggagcctgcagcgtgcccagcgcccggaccatggtggtgtgtgccttcgtcatcgtggtggccgtgtctgtcatcatggtgatctacctgctgccccgctgcaccttcaccaaggagggctgccacaagaagaaccagagcatcggcctcatccagccctttgccaccaacgggaagctgttcccctgggcccagatccggctgcccacagctgtggtgcccctgcgctatgagctgagcctgcaccccaacctgacctccatgaccttccggggctctgtgaccatctctgtgcaggccctgcaggtgacctggaacatcatcctgcacagcacaggccacaacatcagccgggtgaccttcatgtctgctgtgagcagccaggagaagcaggccgagatcctggagtatgcctaccacggccagatcgccatcgtggcccctgaggccctgctggccggccacaactacaccctgaagattgagtacagcgccaacatcagcagcagctactacggcttctacggcttctcctacacagatgagagcaatgagaagaagtactttgctgccacccagtttgagcccctggccgcccggagcgccttcccctgctttgatgagcccgccttcaaggccaccttcatcatcaagatcatcagagatgagcagtacacagccctgagcaacatgcccaagaagagctctgtggtgctggatgatggcctggtgcaggatgagttcagcgagagcgtgaagatgagcacctacctggtggccttcatcgtgggggagatgaagaacctgagccaggatgtgaatggcaccctggtgtccatctatgctgtgcctgagaagattggccaggtgcactacgccctggagaccaccgtgaagctgctggagttcttccagaactactttgagatccagtaccccctgaagaagctggacctggtggccatcccagactttgaagctggggccatggagaactggggcctgctgaccttccgggaggagaccctgctgtatgacagcaacaccagctccatggctgacaggaagctggtgaccaagatcatcgcccacgagctggcccaccagtggtttggaaacctggtgaccatgaagtggtggaatgacctgtggctgaatgaaggatttgccaccttcatggagtacttcagcctggagaagatcttcaaggagctgagcagctatgaggacttcctggatgcccgcttcaagaccatgaagaaggacagcctgaacagcagccaccccatcagcagctctgtgcagagcagcgagcagatcgaggagatgtttgacagcctgagctacttcaagggcagcagcctgctgctgatgctgaagacctacctgtctgaagatgtgttccagcacgctgtggtgctgtacctgcacaaccacagctatgccagcatccagagtgatgacctgtgggacagcttcaatgaggtgaccaaccagaccctggatgtgaagaggatgatgaagacctggaccctgcagaagggcttccccctggtgacagtgcagaagaagggcaaggagctgttcatccagcaggagcgcttcttcctgaacatgaagccagagatccagcccagcgacaccagctacctgtggcacatccccctgtcctatgtgacagagggcaggaactacagcaagtaccagagcgtgtccctgctggacaagaagagcggggtcatcaacctgacagaggaggtgctgtgggtgaaggtgaacatcaacatgaatggctactacatcgtgcactatgcagatgatgactgggaggccctgatccaccagctgaagatcaacccctacgtgctgagtgacaaggaccgggccaacctgatcaacaacatctttgagctggccggcctgggcaaggtgcccctgaagagggcctttgacctgatcaactacctgggcaatgaaaaccacacagcccccatcacagaggccctcttccagacagacctgatctacaacctgctggagaagctgggctacatggacctggccagccggctggtgaccagggtcttcaagctgctgcagaaccagatccagcagcagacctggacagatgagggcacccccagcatgagggagctgcggagcgccctgctggagtttgcctgcacccacaacctgggcaactgcagcaccacagccatgaagctgtttgatgactggatggccagcaatggcacccagagcctgcccacagatgtgatgaccaccgtcttcaaggtgggcgccaagacagacaagggctggagcttcctgctgggcaagtacatcagcatcggcagcgaggccgagaagaacaagatcctggaggccctggccagcagtgaagatgtgaggaagctgtactggctgatgaagagcagcctgaatggagacaacttccgcacccagaagctgtccttcatcatcagaacagtgggccgccacttccctggccacctgctggcctgggactttgtgaaggagaactggaacaagctggtgcagaagttccccctgggcagctacaccatccagaacatcgtggccggcagcacctacctgttcagcaccaagacccacctgtctgaggtgcaggccttctttgagaaccagagcgaggccaccttccggctgcgctgtgtgcaggaggccctggaggtgatccagctgaacatccagtggatggagaagaacctgaagagcctgacctggtggctgtag

SEQ ID NO: 157538 - DNA, 12752 bp, Artificial Sequence
  derived and/or modified sequence
tccgcggccaacctccccagggaaaccagcgattcgcggttcagatagcgaccttcgcccgcaggttcctgctctgccttcagacttcggcttcagtggcacctgctcagcgaggcctcgtctaaccaagccatccgaattaactacccactcactcgccatcacatcaccccgatttaattcgcagcggggcactgactttacactcgtgtgtcttctgtgtttatttatggtctgtttctggaatgtccgctcctgggactgggaccatgattttctggcgcagtgcgggtgtctcggcgtccgggatcgggcgggtcgcagtagggctccacatttgttgagtgactgaacaccgttcccggccggggagagcgccgcagccgggtccacttcaggtaggggctgggctttcccggccccgcctaggccccgcccccagcgcgaacccgctcccacctcgcctgtccacggagcagcagggggtttgactgtgcttttccctcttgcttccctcgctctttctgcagctgccacgaaaacccggaacggcggagcggcgccgcccctcgcggcacctccctggcagcccttggaggccgcgctgggcatgctcagtcagctgggccgcctcagctctcggagtaggaagctcgggcgctccggctgtaaggagccgcggcggggggaaaatggagcccttcaccaatgatcggcttcagctccccaggaatatgattgaaaacagcatgtttgaggaagaaccagatgtggtggatttagccaaagagccttgtttacatcctctagagcctgatgaggtggaatatgagccccggggttcccgactgctggtgcggggtcttggtgagcatgagatggaggaggatgaagaggattatgagtcatcagcaaagctgctgggcatgtccttcatgaatagaagctcaggccttcggaacagtgcaactggttacaggcagagcccagatggggcttgttcagtaccctctgcaaggaccatggtggtctgtgcttttgtcatcgtggttgctgtttctgtaatcatggtgatttacttactgcccagatgtacctttaccaaagaaggctgccataaaaaaaaccagtcaattggactaattcagccatttgcaacaaatgggaaattgtttccatgggcacagatcaggcttcccactgccgttgtgccactacgctatgaactcagcctacacccgaacctaacctcgatgacattcaggggttctgtgacaatttcagttcaggctcttcaggtcacatggaatatcattcttcatagcacaggtcataatatttcaagagtgacctttatgtcagcagtttcaagccaagaaaaacaagctgagatcctggaatatgcatatcatggacagatcgccattgttgcccccgaagcccttctagcagggcacaattatacgttgaagatagagtactcggcaaatatatctagttcttattatgggttttatggcttctcctacacagatgaaagtaatgagaaaaagtactttgcagcaactcagtttgaacccctggcagcaagatctgcttttccttgttttgatgaaccagcatttaaagccacttttatcatcaagatcataagggatgagcaatacaccgctttatcaaatatgcctaagaagtcatcagtcgttctagatgatggacttgttcaggatgagttttctgagagtgtgaagatgagcacttacttggttgctttcattgtgggagagatgaagaacctgagtcaggacgtaaatggaaccctggtttctatatatgctgtaccagaaaagattggtcaagttcattatgccttggaaacaactgtgaagcttcttgagttttttcaaaactactttgaaattcagtacccacttaagaaattggatttggtggctattcctgactttgaagcaggagcaatggaaaattggggtttgctcaccttccgagaggagacacttctgtatgacagtaacacttcttcaatggcggatagaaagctggtgactaaaatcattgctcatgagctggcccaccagtggtttggcaatctggtaacaatgaagtggtggaatgacctatggctaaatgaaggttttgccactttcatggagtatttctctttggaaaaaatattcaaagagctttctagttatgaagatttcttagatgctcgatttaaaaccatgaagaaagattccttaaattcatctcatccaatatcatcatctgttcagtcttcagaacaaattgaagaaatgtttgattctctttcctattttaagggatcttctctcttgttgatgttgaaaacttaccttagtgaagatgtgtttcaacatgctgttgtcctttacctgcataatcacagctatgcatctattcaaagtgatgatctgtgggatagttttaatgaggtcacaaaccaaacactagatgtaaagagaatgatgaaaacctggaccctgcagaaaggatttcctttagtgactgttcaaaagaaaggaaaggaactttttatacaacaagagagattctttttaaatatgaagcctgaaattcagccttcagatacaagctacctgtggcatattccactatcctatgtcactgaaggaagaaattattcaaaatatcaatcggtatcattactggataagaaatcaggtgtcatcaatcttacagaagaagtgctgtgggtcaaagtgaatataaacatgaatggttattatattgtacactatgcagatgatgattgggaagcactaatccatcagttgaaaataaatccttatgttctgagtgacaaagaccgagccaaccttatcaacaacatctttgaacttgcaggcctaggcaaggtacctctcaagagggcctttgatttgattaattatcttggaaatgagaaccatactgcacccatcaccgaagccctgtttcagacagacctcatctataacctccttgaaaaactgggatacatggatctggcctcaagactggtgactagggtatttaaattacttcaaaaccaaattcaacaacaaacttggactgatgagggcactccatctatgcgagagcttcggtcagccctgctagagtttgcttgcacccacaacctggggaactgctctactactgccatgaaactgtttgatgactggatggcatccaatggaactcaaagcctacctactgatgtcatgacaactgtgttcaaagttggagcaaaaactgacaaaggctggtcattccttttgggcaaatacatttctataggctctgaagcagagaagaacaaaatactagaagcacttgccagctcagaggatgtgcggaagctttactggttaatgaaaagtagcctgaatggagataacttccgaacacagaagctgtcttttatcattagaacagtgggtcgacattttcctggacacttactggcatgggattttgtcaaagagaactggaataagcttgtacagaagttccctctggggtcctataccatacaaaatattgttgctggatcaacttacctgttttcaacaaagacacatttatctgaggttcaggcattctttgaaaatcagtcagaggcaaccttccggcttcgttgtgtccaggaggctttggaagtcattcagttgaatatccagtggatggagaagaacctcaaaagtctcacatggtggctgtagcatgcacaaccgcacctcattttgttgcccattcagagagcttgtaagcttgggctctgccgcttttgcaaaagccaaggtaaagccaggatcgctgccaagttgtttgcactctttggagttctagttagctcagggcctgactgtatttttcatccatcttttctgaagtgtctttgggcagtatgtagttatttattacaaaattatattcacctaaatgccaaccatctacaaaaacaatgagtaatttttctactttgaagatacacagatggggacaaaaaccctgttttggaattctgttctattcctcagtatccagaaagttactgacacagtaaaacaaggaaagttctaccctaagagccgccatcacttcaggccgctggtttgtcagccatctgttgcttcttattgatagatggcattggaatgtggtacaaagttagctctgaagaatatggtaacgaagacaataaagcatgcactgtaagaactgacctcaggtgtgcagatctactttgatttggggttttgattaattctttatttttctgaaaaaaagtttaaataatgtctgtaactattgtgtttttttcctgccgaatagccaggtgctacagatttttaaaatttttgttgtattgaaaagctaaacaaggccaaaaggttaaattttttgaatatttaagactttctttttcatcttttatagcgttaccataggaaactgttccaaactgagttagctttaattataattattttattcataaatggtgatagtccccagatctgtacacctttatcactccctgccgtagatatactttaggttagtatttctacattcgtggcaagcattttggtaacaccagtggttttcattgtgacttttatcactatcactaagaatgcaatttaagttgccttttggcatcatagatcatagaaactttctctctgaatcatacccatgtgtgaattttcattttatatgatagtgtagcatattagaagcatattttaaaacagagcctttgagaaattgaaaaacaattatttgaagttcaccatagtaccttaaaggaacaaagagaatgtgggataggagtaacttgaattcgtgtttagtatggtgggctttgaatttttttcactatcaaaaatagtgcttttgtttagttaaaaattgtagtttttctttttttgtgtgtccaaactaacataaaaggagtggtcaaagaaggaaagaagaaaaatgagggaggatgtccgaaactgtatggcattttactccttctgaaagagaaatactgtacttgaatttttgagctatgcagacttatacctagattgttgtgtttctttgattcttaggagaaaagctttcttcctaataattcttgagaactttatattttgtttgaaaacagtttctatgtacataaaaagggtatttacccatttgtgagcacttaaaacactccacagagtcagacagtgggaaaggtcaccctttttttattcggcaggtatcaagttagaatgtatggaattgtgaataaaattatattttattttatgaaaatatttttatataataaaatttaaaaggctggtaagctaaaaaaatagtcttctttaatcctagtgtgttttccccaatttagtcttttctaaaatttatctgttttagagtagaaaatattatatcctgagaatcacagaatcatctaaatatgtcttattcaactgaagtgattgtaagtctttattcttgtgctttggttaaatgaatgataatttagttgatagtgaaagttaatgtgtttttatatttttagagtgagggaaaaatactaaacttttgagagttttgttgtcgttgctggttttttaccatgtggtactaaattccactttgatacaaaatttaaattttgtaacttctcaaaatcacttaagattcttcagttttacctgtgcttcttgacatcgctcctataatgtatgttagttaactctgcatatggcaaatcttgtcttgaattatatcatttctctccctctctctctctctctgtgtgtgtgtgtgtgtgtgtgtgtgtgtgtgtgtgtgtgtgtgtgtgtagtgtggggggtattgttatgagtaaaactttatcaaaacttggcctgaaaaagagataactcatgatccattgctatctttattactcaaaggctgttcattcccataataccagatccataatagttgtagtttttttgatgttgttgcccttaccttaattatttgtagttttagtaggccttgcctcagtttttcccacagaattccataattttaatgttgaactaacccatctatataggacttctaaaaactacgtcaggaatgtaaggttaaatgagaggtagaacttgtagtgtaataggtataatggtagctttcaaagttttatcttctcaaaacattgtcttagccagtgtatttctgagaactcagactgaagcacagaagtcacagtatgcttcttttatttaagcacacagattcatgacacaagtacttgttgaacaagtgttctcattgcagagagatctacttgaatataaaagggtcatcatactagattattaaaaaagaattggaaatcttgagttgtggaagaaatgtttatgctttggagatctaaaaaagttatgaatgtaggaattagataagtccagtttgttctgttaatataaaatggttagatatattaaactgcaagtagtatcagcttcaccataagcttgggccttcctccatcttgttttatttaagtctctttaaatgaaattttgttgtcattgtttcagcattcatgaactttcttactatcacaggttctactttaattttccttgccatatgtgtttccattttgtgggacattagccaccacaggaacacaagagttgtcagaagactcctgggtgtacagagcaaatcaagctgcatcagtattataggataccaaacagaatcctttctattaggaaataagaaatcagttaagtgttggctgggcgcggtggcttatgcctgtaatcccagcattttgggatgccaaggtgggcagaccatttgaggccaggagttctaaaccagtttggccgacatggcaaaaccccatctctactaaaaatataaaaattagctgggcatggtggtgcacacctgtaatcccagctacctgggaggcacgagaatcacttgaacccaggaggcggaggttgcagtgagccaaggttgtgccactgcactccagcctgggtgacaaagcgagactgtctcaaaaaacaaaaaacaaaaaaaaaagagttaagtgttgattttgttggattactgacagtttgttgagatggattttaaaaagagtctatttaaaccaaagtacctggaaccataatctgccatcagattgctaaacattcacataatccccatgtttcatggggcttcagggaaggcaaatacatctgagatgagccacctccaaggacagcatttcctgggctgcaaaactagatgtggattttgttacttaggcctctctaaaaactgaggccatggatatgacatagcttttcttctcacctatgcctttgttacttttgtatttattggaattaaatctctttttaaagagcttccttcccccttcatcccatttgtatttttaaaaactaagttatatatatatttgcttgtttttgcattcttttattttgtgctccattccctgctttgccagttaagtactacctgaaaagtagcggttcaaaagtatggtaaatctcctcccttaaccttattgcctgtgtgggtgacagctaatggaaaagttgatcgatttttttcagtggtttttttgggagtatatactttaaaaatgtacatacatgtttttgatagtttttatattatttcattttgtatatttttttcctgatgaagagtgatatatcatcctatgaaaatttcatctacccttcccattttacctgtatgggcagtagctacagactagttatttggtttccttctttggaagaaggtggtgatgttgagaggagagcaagctatattcttttaaaagtgtgtacagatgtttttgctattttgtgttatttcattttgtatttcattcatccattttgtggacgtgtagataaaacgcggtggtccaaaagcatgacagatgtcccctttgcgtttctccttattgttcgcatggacaataactgacagagtagtcctagttgctgttgttttgatctagtcttggggctggggttgtatattattctttcaagtgtgtataaatattgtgccacctttttatacttcattttatacttgtttccttgtatggatgcatatatacttaatgaaaattgaggttcagagtatgacaaatctcttttcccttttccttactgcctatttaggcaatagctaatagagtagtttgttttgttttggggtgtgggggagagtggagtatgtacttaatgtatataaataaacttgctactacattgtattactaatttggttcacactgtgtccttctcatggatgtgaaagtaccaatgaaatgtggagatctcgatgtataacagtctcccattctcctcatcccttattgactgctgggcagtagctaacagagtagttgtcaagtggcgtatttgaggtgagggggagggacggggaaggtaggaaaatgcacttaatgtatatacatgtttttactactacattgtattaattcatcgggtgcccagactgaaaggtacctaatgaaccatggagttccggatgtataacagtctcctcttttccctttcccttattgcccatgtgggcaatacttaagagtagtttgggtttattgaagattttttgctaggagagagaaaattttttgctaggagaggtttcaaggtaagagtatatactttaaacatgtatataaatgtttttgctacttttctgtcactacctttcttaccttgtcctttacatggatatatgaagaaaattgaggttcagcctgtagcagctctcctcttctgcccttcccttagattgtctgtgtgggcaggtgtctaagagagtagttgattagcttcagggattctttggtgggtgttggggtatatacttttgtatatgtatgtacatatttttatttctttattatagtgtttcattgggtacccggtccttcacttggatgtgtaggttcctaatgagccatggagttatggatgtataacaatctgttctccctttacccttttaatgtatatgggcaataattttaaagtagtttggatttttttaagttttgaggggtgggaggggtctaaggcagaatatatcctttttaaaaatgtatatatacttttcattaactatattgtattatttcatgctgtacccagtccattgcttggacttacgggtacctaatgaaacgtggaggtccggatgtatgaaaatctcctcttttcccctttccttattgcctctgtaggcaataattatagagtagtatagatggtttttcttttttatccatctgcctatctccaggaggatggggtgtgcacttttagaaatgtatataaatgttcttgctcctttttcctgttacttcattgtgtgccaaggcctttccatggatacttaggtacgtaatgaaaattgaggttcattctatgaaaaaatctccccttctccccttcccttattgcctgtcttggcaatggccagtagagtagttatttaagggattttgtttttttgtttttttgttttttttttggtaggggaggtggggaatttctgggtttgtcttttttttaatgtatataaaagtttgctagttgttgttattgttgttctttcactctcaacacagttttttgtttggagttgtaggaatcaaatgtaatgagggacccagacccgagagtgtggtaaatattctttgccttcctcagagcctgtatacacaagcaagtagtatgtgagcactacagggcttgggttttggttttttgcttttgagggttttaatgaggagtgggattgttgagaggaaaaggcaagatatataatttttttaatgtatataaatgttttgctcctttttgatgttaacttcattttgaatctggtcctttgtatgaccacttaggtacttaatagtaataaagttgagattgactctatgaaaaatatcccatactccccatccctcattgcctagggggcaatggtagaatagatgtttggtttcttttgggggtgtctgagtgtatatgtgtgtgtatatacacacaagaacacacatatttatatactatacacacacattttaatgtatataaatatttgctacattctgtgtgttatataatgtggtacccagtcctctgctgggacatggatgtacataatgaaacatggaggtccagacgtatgataactctcctgtttcccttccctcattgcctacaggggcaatagtttcatatcttgggttttttattgtttaatttttttttatggggaggggttctttgggtgggtaatagtcagggggaaaggacagtgtctatactttttaaagatgtatataaatgtttcatgttattggttttgtacctagtcctttgcatggatatataggtacctaatgaaaatcgaggatcagtgtatgacaaatctcccatcctcccctttccttattgcctgtgtcggcaataggaagtagaatagttgtgtgttgtttacttacttgtctgttttagagagatttctatttttggtaggggaatattcttaatatgttttcatatctttatttcattttgtagtcttttgcatggctatgtagggacctaatgaaagtcgagtttcataatatgacagctcacttcttttcctacatatttcctcacttagcagtagctagtgtagttattttgtggttattttatttcattctctaggatctattccattaaggatgcaagtgtgtagatgcatatatatcatttgcttctttcttccgccattattttcctttaacacttagtcccttgcaaggggtctgactatacctaacaaaaataaagacctactaaatccctgccatctggctggaaggtgtagcagtgtattaatgtaactaatagcaacaggtgtgcagcagataagacaggagaagacactcagctatggttgagttgtgaaagctaattagatccagcatttcttatgttgattcagattgaatgaggtagtgaaaagggacctgtgcttttgtaaattctagaaaggcaagaggacaatattgaataaagctgtgtttaaacttcattgctcatatatcttttagtaactggtaaaccggcgaagctgataagccaataagagtgctgtctagaacgcatttgcaaaccgttaagagtagcttctttttgaggcctggacttctgattcatctatagaagtctattatgattccatcaattgcatagcttgtgtacctggtagaaattgtgtcttggaatgaccctttcgagttattgacatggctctgatgaatagaacatgagccccaaaactaaatccaaaaggaattttctatctttcatcccccacatgtggcaagacaagttggccctttcttacccagaggtcttttgtgtgactgcatctttctcctccgttctccattgtgtgctttccattttgtctttagtgcctatactgttaggtgttttcttcactggcattcacaaatttaagccattgctgcctcattagccttgtattttgtgtgcatatcatgtatccagacctgtatgttcgctttaagcattcttatatcacactgtctcctcatctaccatatggtaaatgttaaaactccacatttgtctgcatcagggaaaatgcatgggcacacatcctccctccctccctctctgctctcctcccttccttcaggcctcttagcattgtttgttttcccatttctgatactactactccatgctgaagatttgccatattactattttggaaacattgagtgatagaactcctagaaaatttgcaaagaaatgttacatactgtatatcaaactctcagattctagtgttgaaaaagtagcctatactttgctattacttatacctgctgccatagaaaaaaataagtttattcatgacacatttacatttgatcataaataaaagaaaaaagggcacctttttggagttagtcatggtagtcattagtgatatttctgaacagttcttaatttaaaatacttcaaaggaagtaaaggtcatggcttagctgaaggaaatgctccagaaattggactgtgtaaaccatcagtacaataatacgctgtgtatgtatgtgtatataaaatgagaattatggcataattggagcatttgcattaatcaacaaactcacattgagacaaaacttagttttacagctgtcttgattaaagccaagtgttccatgttgctgtgaagaatagcctctttcaaatactttggaaagtagttacttggaaacttgtaaaggtattacatttttatatttaaacacctatagagatcttcaattccttgagtctgagcttgtgggtggaattctaaatttgtatcataatctgtcttttgtgaaacattttgaaaatatgtatatataatattgtatatgcaaattgtgttgtttcacttgtaaagggaaaaggcttatttttctttatatttctgataacttgttttgcatatgaccagcactgactgaaaggcatgtgtagctgcaaacactgttgctttttttgtgaaatgaaaataaaagtatttaaatacaaaca

SEQ ID NO: 157539 - DNA, 3888 bp, Artificial Sequence
  derived and/or modified sequence
gctcctaactccactaagtacagaagtggagccgtacagccatgaatgtcaggcatgttgtggggactagttgtattagttttctattgccaccataacaaattaccacaaacttaagcaatatagtacaaatttatcttaaagttattggcaggtcagaagcctgatacggatctcattgggctaaaacgaaggagttggcagggctgtgtgttcctttctgtaggctctgggcaggatccatttcctgcacttttttggcttttggaggtcgtccacattccttggctcctggccctgctccttcatcttcaaagctaccaaagatcggcttcagctccccaggaatatgattgaaaacagcatgtttgaggaagaaccagatgtggtggatttagccaaagagccttgtttacatcctctagagcctgatgaggtggaatatgagccccggggttcccgactgctggtgcggggtcttggtgagcatgagatggaggaggatgaagaggattatgagtcatcagcaaagctgctgggcatgtccttcatgaatagaagctcaggccttcggaacagtgcaactggttacaggcagagcccagatggggcttgttcagtaccctctgcaaggaccatggtggtctgtgcttttgtcatcgtggttgctgtttctgtaatcatggtgatttacttactgcccagatgtacctttaccaaagaaggctgccataaaaaaaaccagtcaattggactaattcagccatttgcaacaaatgggaaattgtttccatgggcacagatcaggcttcccactgccgttgtgccactacgctatgaactcagcctacacccgaacctaacctcgatgacattcaggggttctgtgacaatttcagttcaggctcttcaggtcacatggaatatcattcttcatagcacaggtcataatatttcaagagtgacctttatgtcagcagtttcaagccaagaaaaacaagctgagatcctggaatatgcatatcatggacagatcgccattgttgcccccgaagcccttctagcagggcacaattatacgttgaagatagagtactcggcaaatatatctagttcttattatgggttttatggcttctcctacacagatgaaagtaatgagaaaaagtactttgcagcaactcagtttgaacccctggcagcaagatctgcttttccttgttttgatgaaccagcatttaaagccacttttatcatcaagatcataagggatgagcaatacaccgctttatcaaatatgcctaagaagtcatcagtcgttctagatgatggacttgttcaggatgagttttctgagagtgtgaagatgagcacttacttggttgctttcattgtgggagagatgaagaacctgagtcaggacgtaaatggaaccctggtttctatatatgctgtaccagaaaagattggtcaagttcattatgccttggaaacaactgtgaagcttcttgagttttttcaaaactactttgaaattcagtacccacttaagaaattggatttggtggctattcctgactttgaagcaggagcaatggaaaattggggtttgctcaccttccgagaggagacacttctgtatgacagtaacacttcttcaatggcggatagaaagctggtgactaaaatcattgctcatgagctggcccaccagtggtttggcaatctggtaacaatgaagtggtggaatgacctatggctaaatgaaggttttgccactttcatggagtatttctctttggaaaaaatattcaaagagctttctagttatgaagatttcttagatgctcgatttaaaaccatgaagaaagattccttaaattcatctcatccaatatcatcatctgttcagtcttcagaacaaattgaagaaatgtttgattctctttcctattttaagggatcttctctcttgttgatgttgaaaacttaccttagtgaagatgtgtttcaacatgctgttgtcctttacctgcataatcacagctatgcatctattcaaagtgatgatctgtgggatagttttaatgaggtcacaaaccaaacactagatgtaaagagaatgatgaaaacctggaccctgcagaaaggatttcctttagtgactgttcaaaagaaaggaaaggaactttttatacaacaagagagattctttttaaatatgaagcctgaaattcagccttcagatacaagctacctgtggcatattccactatcctatgtcactgaaggaagaaattattcaaaatatcaatcggtatcattactggataagaaatcaggtgtcatcaatcttacagaagaagtgctgtgggtcaaagtgaatataaacatgaatggttattatattgtacactatgcagatgatgattgggaagcactaatccatcagttgaaaataaatccttatgttctgagtgacaaagaccgagccaaccttatcaacaacatctttgaacttgcaggcctaggcaaggtacctctcaagagggcctttgatttgattaattatcttggaaatgagaaccatactgcacccatcaccgaagccctgtttcagacagacctcatctataacctccttgaaaaactgggatacatggatctggcctcaagactggtgactagggtatttaaattacttcaaaaccaaattcaacaacaaacttggactgatgagggcactccatctatgcgagagcttcggtcagccctgctagagtttgcttgcacccacaacctggggaactgctctactactgccatgaaactgtttgatgactggatggcatccaatggaactcaaagcctacctactgatgtcatgacaactgtgttcaaagttggagcaaaaactgacaaaggctggtcattccttttgggcaaatacatttctataggctctgaagcagagaagaacaaaatactagaagcacttgccagctcagaggatgtgcggaagctttactggttaatgaaaagtagcctgaatggagataacttccgaacacagaagctgtcttttatcattagaacagtgggtcgacattttcctggacacttactggcatgggattttgtcaaagagaactggaataagcttgtacagaagttccctctggggtcctataccatacaaaatattgttgctggatcaacttacctgttttcaacaaagacacatttatctgaggttcaggcattctttgaaaatcagtcagaggcaaccttccggcttcgttgtgtccaggaggctttggaagtcattcagttgaatatccagtggatggagaagaacctcaaaagtctcacatggtggctgtagcatgcacaaccgcacctcattttgttgcccattcagagagcttgtaagcttgggctctgccgcttttgcaaaagccaaggtaaagccaggatcgctgccaagttgtttgcactctttggagttctagttagctcagggcctgactgtatttttcatccatcttttctgaagtgtctttgggcagtatgtagttatttattacaaaattatattcacctaaatgccaaccatctacaaaaacaatgagtaatttttctactttgaagatacacagatggggacaaaaaccctgttttggaattctgttctattcctcagtatccagaaagttactgacacagtaaaacaaggaaagttctaccctaagagccgccatcacttcaggccgctggtttgtcagccatctgttgcttcttattgatagatggcattggaatgtggtacaaagttagctctgaagaatatggtaacgaagacaataaagcatgcactgtaagaactga

SEQ ID NO: 157540 - DNA, 3078 bp, Artificial Sequence
  derived and/or modified sequence
atggagcccttcaccaacgaccggctgcagctgccccggaacatgatcgagaactcgatgttcgaggaggaaccagacgtcgtggatctggccaaagagccatgtttgcatcctctagaaccagacgaagtcgagtacgagccacgaggaagcaggttgttagtgcgtgggctcggtgaacacgagatggaagaagacgaggaggattatgagagttctgctaagctactgggtatgtcattcatgaacaggtcgtccgggctcaggaattccgcaacaggatatcggcagtctcccgacggagcctgttcagtccccagcgcacgcaccatggtcgtgtgcgctttcgtcattgtggtagcagtgtccgtgattatggtcatctacctcctccccaggtgcacattcacaaaagaaggctgtcacaaaaagaatcaatccatcggcctgatccaaccattcgccacaaacggtaagctgtttccgtgggcccagatcaggctcccaactgcagtggtcccgctgcgttacgagttgagccttcatcccaacctgactagtatgactttccgcggctcagttacaatctctgtgcaggccctccaggttacctggaatattattctacacagtacagggcacaacatttctagggtgacttttatgtctgcagtgagcagtcaggagaagcaggccgaaatcttagagtacgcctaccatgggcagatagccattgtcgcccctgaagccctgctggccggccacaactataccctcaagattgaatactcggcaaacatatcaagctcctactatggcttctacggcttctcttacacggacgagtcaaatgagaagaaatacttcgctgctacccaatttgagccactggctgcccgcagcgcatttccctgtttcgatgagcccgcgttcaaggcgactttcattatcaagataattagggacgagcaatatactgcccttagtaatatgccgaaaaagtcttccgtagtgctggatgatgggctcgtgcaagatgaattttcagaatctgtgaagatgtcaacttacctggtggcatttatcgtgggagagatgaagaacttgtcacaagatgtgaacggcacactggtgtcaatctatgcagtgcctgaaaagattgggcaggtgcattacgctctggaaaccaccgttaagctgctggagtttttccagaactattttgaaattcaataccctttgaagaagcttgatctcgttgcaatccccgactttgaagccggggctatggagaattggggactgctcactttccgagaagaaaccctcctctacgactccaacacgagctccatggcggaccgaaagctggtcaccaagataatcgcccacgaactggcccaccaatggtttggcaacctggtgaccatgaagtggtggaatgacctgtggctgaatgaaggattcgcgactttcatggagtattttagtctggagaagatctttaaggaactgagcagctacgaggactttttagacgccaggtttaagaccatgaagaaagactctctgaattctagtcatccaattagttcctccgtgcagtcttccgaacagatagaggagatgtttgattcactgtcctacttcaagggaagcagcctgcttctcatgttaaagacgtatctctcggaggatgttttccagcacgcagtggtactctacttgcataatcattcatacgcaagcatccagtccgatgacctatgggattcttttaatgaggtgaccaaccaaactcttgatgtaaagcgcatgatgaagacttggaccctgcagaaaggctttccactcgtgaccgttcagaagaagggcaaggagcttttcattcagcaggagcggtttttccttaacatgaaacccgaaatccagccctctgatacttcatacctgtggcacatcccgctttcttacgtcacagagggacggaattattcaaaataccaaagcgtgagcctgcttgacaaaaaaagcggagtgataaacctgacagaagaggttttatgggttaaagtgaatatcaatatgaacggttattatattgtgcactacgcagatgatgactgggaagcgctcattcaccaactgaagattaatccctacgtgttgtcagacaaggacagggctaaccttatcaacaatatatttgagctggccgggttaggcaaagtgcccctgaaacgcgcatttgaccttataaactacctgggaaatgagaatcatacagctcccattactgaggccttgttccaaacggatctgatctataacctcctcgaaaaattaggctacatggaccttgccagtcggttggtaacacgggtattcaagctcttacagaaccagatccagcagcaaacatggactgacgagggaactccttccatgagggagctgcgtagcgcactcctggagtttgcctgcactcacaaccttgggaactgtagcaccacagctatgaagctgtttgacgattggatggctagtaacggtacccaatcgttgcctacagacgtaatgaccacagtttttaaagtcggtgccaaaactgataaaggctggagtttccttctgggaaagtacatttcgattggatccgaagccgaaaagaacaagattcttgaggcactcgcttcttcagaagatgtgaggaagttatactggctcatgaagtcatccctgaacggagataattttcggacccagaaactctctttcatcattcggaccgttgggagacactttcctggccatctattggcctgggatttcgtgaaagagaactggaacaaactggtccagaaattccctctggggagttatactatacagaacatcgttgcaggtagtacctatttgttttctactaagacacatctgtctgaagtgcaggcgtttttcgagaaccaaagtgaagctacattcaggcttcgctgcgttcaggaggccctcgaggtgatacaattgaatattcagtggatggagaaaaatctaaaatctctcacctggtggctctag

SEQ ID NO: 157541 - DNA, 3036 bp, Artificial Sequence
  derived and/or modified sequence
atgatcgagaacagcatgttcgaggaggagcccgacgtggtggacctcgctaaggagccctgcttgcaccccctagaacctgacgaggtcgaatacgagccccgggggtcgaggctactggtgagagggttgggggagcacgagatggaggaggatgaggaggattatgagtctagcgccaaattgttgggcatgtcattcatgaaccgatcttcaggtctgagaaacagtgctactgggtacagacagtctcccgatggagcttgcagcgtgccatccgcgagaaccatggtcgtgtgcgccttcgtgatcgtggtcgccgtgagcgtgatcatggtgatttatctactgcctaggtgtacattcacaaaggaaggatgccataaaaaaaatcagagcatcggactgatccagccttttgctaccaacggcaagttattcccctgggcccagattaggctgcctactgccgtggtacctctaaggtatgagctctcactccatcctaatctgacttctatgacctttcggggttcagtgacgatcagcgtgcaggctctccaggttacgtggaatattatcttgcattcaacaggccacaatatttcgcgtgtgacgttcatgagcgccgtttcctcccaggagaaacaagccgagatcttggagtacgcatatcatgggcaaatcgccatcgtcgcccctgaggcactgttagccggccataattacaccctcaaaatcgagtattcagctaacatcagttcaagttattatggcttctatggtttttcgtacaccgacgagtctaatgaaaaaaaatatttcgctgccactcaatttgaacctcttgctgccaggtcggcctttccatgctttgatgaacctgctttcaaagctactttcattatcaaaataatccgtgacgagcagtataccgccctgtcaaatatgcccaaaaagagtagcgtggtcctcgacgacgggctcgttcaagatgaatttagcgagtccgtgaagatgtccacttatctggtcgcgtttatcgtgggggagatgaagaacttgtctcaggacgtaaatggcacccttgtgagtatctacgccgtgccggagaagataggacaagtacattacgcgctcgagaccacggtcaaactcttggaatttttccagaattattttgaaatacaatatcctttgaagaaacttgacttagtggcaattcccgacttcgaggccggggccatggagaactggggactgctgactttccgagaggagaccctgctatatgattccaacacctcctctatggcagacagaaaactggtaaccaagatcatcgcacatgaacttgctcaccaatggttcggcaacctggtgaccatgaagtggtggaacgacctctggcttaacgaaggatttgcaaccttcatggagtatttcagtctcgaaaaaatctttaaagagctgtcttcctacgaggatttcctggatgcccggttcaaaactatgaaaaaggattccttaaatagttcccaccctatttcatctagcgtgcaaagttccgaacagattgaggaaatgtttgactccttgtcatacttcaaggggagctctttactactcatgctgaaaacgtacctctccgaggacgtgtttcaacatgcagtcgtgctctacctccacaatcatagttatgcttctattcagtcagatgacctgtgggactcttttaatgaagtaaccaaccagacgctggatgtgaaaaggatgatgaaaacttggaccttacagaagggttttcccttagttacggtgcagaagaaggggaaagagctttttattcagcaagaacgcttttttctgaacatgaaacccgagatccaaccctccgatacatcgtacctgtggcatatacctctatcatatgtcaccgaaggccgcaactattctaagtatcagagtgtctcgctccttgataagaaatctggggttataaatttgacggaggaagttctctgggttaaggtcaacatcaacatgaatgggtactacattgtgcactatgccgacgacgactgggaggctctgatccatcagctcaagatcaacccctatgtactatccgataaggacagggccaaccttatcaacaacattttcgagctggctggcttgggcaaagttccgcttaaacgcgcctttgatctcattaactatctgggtaatgaaaaccacactgctcctatcacggaggcactgtttcagacagatttgatctataacctcttagagaaactgggatatatggatttggcctccaggctggtgacgcgggtgttcaaactgttgcagaaccagattcagcaacagacatggacggatgaaggaacaccctccatgagggagctgcgctccgcacttttggagttcgcgtgtacgcacaacctgggaaactgttctactactgccatgaagctgttcgacgactggatggcttccaacgggacccagtctctgccaactgacgttatgacaaccgtgttcaaagttggcgctaagactgacaaaggatggagttttctcttaggtaaatacatctccatcggcagtgaggctgagaaaaataaaatcctggaggccttggcctcctctgaggatgtgagaaaactctattggctcatgaagagtagtcttaacggcgataatttccgcacccaaaagctttctttcattattcgcaccgtaggcaggcactttcctgggcatctgctcgcctgggatttcgtgaaagagaactggaacaagctagtccaaaagttccccttggggagctatacaattcagaacattgtggctggatccacttatcttttttccacgaaaactcacctgtccgaggtgcaggccttcttcgaaaatcaatctgaagccacttttaggctgcgatgcgtacaagaggctttggaggtaatccagctcaatattcaatggatggagaagaatctgaaatctctgacatggtggctttag

SEQ ID NO: 157542 - DNA, 3078 bp, Artificial Sequence
  derived and/or modified sequence
atggagccgttcaccaacgataggttacagctgccaagaaatatgatcgagaacagtatgtttgaagaggagcctgatgtggtcgatctggcaaaggagccatgtcttcatcccctcgaacctgacgaagttgagtatgaacctagaggctcccgattgctggtacgtgggctcggcgagcacgagatggaagaagacgaggaagattatgaatcttcagccaagctcctaggtatgtcctttatgaataggagttctggactccgcaatagcgcgacaggctatcggcaatctccggatggagcatgtagcgtgccttcagccagaaccatggtagtttgtgcctttgtcatagtggtggcagtaagtgttatcatggtgatctacctgctgcctaggtgcaccttcacaaaagaggggtgccacaaaaaaaaccaatcgatcggactcattcagccatttgccacaaacggcaaattgttcccctgggcccaaattcggctgcccactgcggtggttcctttgaggtacgagctcagccttcacccgaatctaacttccatgaccttcagagggagcgtaaccatttccgttcaggccctgcaggtgacctggaacatcattctccactctactgggcataatatatctcgggtcacctttatgtccgctgtatcctcacaagagaaacaggcggagatcctggagtatgcctaccacggccagatcgctatcgtggcacctgaggccctcctggctggccacaattacaccctgaagatcgagtattcagccaacatatcatcctcttattacggtttttacggatttagttataccgacgagagcaacgagaaaaaatactttgcagccacccagtttgaaccccttgccgcacgttcagccttcccgtgctttgatgagcccgctttcaaggctacttttattattaaaatcatccgtgacgaacagtacacggctctatccaatatgcctaaaaaatcgtccgtggtgctcgacgacggactggtccaggatgaattttcagaatctgtgaagatgtcaacgtatctcgtggcctttattgtgggtgaaatgaaaaacttgtcacaggatgtgaacggcacactggtctcaatttatgctgtgccggaaaagatcggacaggtgcactacgctctggaaaccaccgtgaagctgctggagttcttccagaactattttgaaatacagtatcctctcaaaaaactagacctggtagccatacctgacttcgaggccggtgcgatggagaactggggactacttacatttagagaggagaccctgttatacgacagcaacactagtagcatggccgatagaaaactcgttacgaagattattgcccatgagctcgcacaccagtggttcgggaacctggtgactatgaaatggtggaatgacctgtggcttaatgagggttttgccacatttatggagtattttagcctggagaagatcttcaaggagctgtcctcatacgaggatttcctagatgccaggttcaaaacgatgaagaaggactcactgaatagcagccaccctatttctagtagcgttcagtccagcgagcaaatcgaggagatgttcgacagcctcagttattttaagggctccagtctgcttctgatgctgaagacgtacctaagcgaagacgtcttccagcacgccgtggtcctgtacttgcacaaccacagctacgcttccattcagtccgatgacctatgggactcctttaatgaagtgactaatcaaaccctagacgtgaaaaggatgatgaaaacatggactcttcaaaaggggtttccactggtgacagtgcagaagaagggcaaggagctgttcatccagcaagaaagattttttctgaacatgaaacccgagatccagccatccgatactagttacttgtggcatattcccttatcttatgtgacagagggtaggaactactcaaagtatcagtctgtgtcactgttagataagaagtcaggcgtcatcaatcttaccgaggaagtgctgtgggtcaaggtgaacatcaatatgaatggctactacatcgtgcattatgctgacgatgactgggaggccttaattcatcagctgaaaattaatccctacgtgctgtccgataaagatcgggctaatctcatcaataacatattcgaactcgccggactcggcaaagtgcctctgaaaagagctttcgacctgatcaactatctcggtaacgaaaatcacactgcccctattaccgaggcacttttccaaacagacttgatatacaatctgctggagaaactagggtatatggacctagcctctcggctcgtgacgagagtatttaagctactgcagaatcagattcagcaacaaacgtggaccgacgagggtactccgtccatgcgcgagctgcggtctgcgctgctcgagttcgcatgcacccataacctaggcaattgttctacaaccgcaatgaagctttttgatgattggatggcatctaatggtactcagagcctgcccacagacgtgatgacaacggtcttcaaagtaggggcaaaaactgataaggggtggagcttcctgttgggtaaatatatatccataggtagcgaagcggaaaaaaataaaatccttgaggctctcgcctcttccgaggacgttaggaagctctactggctcatgaagagcagcctgaatggggataacttccgcacccagaaactgtctttcattatcagaaccgttggaagacattttccaggccacttacttgcgtgggactttgtgaaggagaactggaacaaactggtccagaagttccctctcgggtcttataccatacagaatatcgtcgctggcagtacctatcttttcagtacaaagacacacctgtccgaagtgcaggcctttttcgagaaccagagcgaggccactttccggctaagatgcgtgcaagaggctctggaagtgatccaactcaacattcagtggatggaaaaaaacctgaagtctctgacctggtggctatag

SEQ ID NO: 157543 - DNA, 3036 bp, Artificial Sequence
  derived and/or modified sequence
atgatcgagaacagcatgttcgaagaagagcccgatgtggtggatctggccaaggagccttgtttgcacccacttgaacccgatgaagtggaatatgaaccaagggggtcgcgactcctcgtgcggggactcggagaacacgagatggaagaggacgaagaggactacgagagctctgcaaagctactcgggatgtctttcatgaatcgctcctctggattacggaattcagccactgggtaccgacagagtcccgatggcgcttgctcagttccctcagcccgaaccatggtggtctgtgcctttgtaatcgtcgtggcggtttctgtgattatggtcatttacctgttgccgcgttgcacttttacaaaggaggggtgtcataagaagaaccaatcgatcggcttaattcagcccttcgctacaaatgggaaactatttccttgggcccagataaggctccctactgccgtagtgccacttcgttatgagctgtccctccatcccaacctgacctcgatgaccttcagaggctcggttactatatccgtgcaggcccttcaggtgacgtggaacataatactccatagtaccggccataatatttccagagtgacgttcatgagcgcagtttcctctcaggagaagcaggccgagattctggagtatgcatatcacgggcagatagcaattgttgcccctgaggctctacttgccggacacaactacacccttaaaatagaatatagcgcgaacatcagtagttcctactatggcttttatggcttctcttacactgacgaatcaaacgaaaaaaaatatttcgcggcaacgcagtttgagccattggccgctcggagcgctttcccctgctttgatgagccagcctttaaggccacattcatcattaaaatcataagggacgagcagtacacggccttgagcaacatgccaaaaaaaagcagtgtcgttcttgacgatggtctggtgcaggatgagtttagcgagtcagttaagatgagcacatacttagtagcatttatcgtgggcgagatgaaaaacctttcccaagatgtgaacggaacactcgtgagcatctacgctgtacctgaaaaaattggccaggtgcattatgcactggagactactgtgaaactacttgaattcttccagaactattttgagatccagtaccctctgaagaagttggaccttgtggccattcccgacttcgaagccggagccatggaaaattggggcctgcttacattccgggaggaaaccctgctgtacgacagtaatacatcttcaatggccgacaggaaactggtgaccaagatcatagcccacgagcttgcacatcaatggtttggaaaccttgtcaccatgaagtggtggaacgacttatggctgaatgagggcttcgccacatttatggaatatttcagcctggagaagatatttaaggagctgtcctcttacgaagactttctagacgctagatttaaaactatgaagaaagatagccttaacagcagccacccaatttcttcttccgtacagtcaagcgaacagatcgaagagatgtttgacagcctctcctacttcaaaggttcgtcacttttactcatgcttaaaacatatctgagcgaagacgtgtttcaacacgcagttgtcctttatcttcataaccatagctatgctagcatacagtcagatgatctctgggatagcttcaatgaagtgacgaatcaaacactggacgtaaaacgaatgatgaagacatggacactccaaaagggattccccttggtgacagttcagaagaaggggaaggaactctttatacagcaggaaaggtttttcttaaatatgaagccagaaatacaaccgagcgacacgagttacttgtggcatatcccacttagctacgtgacagagggcagaaactactctaagtaccagagcgtcagtcttctcgataaaaagagtggcgtgattaacctgaccgaggaagtgctgtgggtgaaggttaatattaacatgaatggctattatatagtccattacgcggacgatgattgggaagctctcatccatcagttgaagataaatccatacgtattgagcgacaaggaccgggcaaatcttattaacaacatattcgaactagctgggctgggtaaggttcccctgaagcgggcattcgatctgattaattatttaggcaatgagaaccatacagccccaatcaccgaggccctgttccaaaccgacttaatatataacctcctcgagaaacttggatacatggacctcgcctctaggctggtaacccgtgtgttcaagcttctccagaaccaaatacagcagcagacctggaccgacgaaggtaccccatctatgagagaactgaggagcgctctcctcgagtttgcttgtacgcacaacctggggaattgtagtaccactgccatgaaactctttgacgactggatggcttctaatggaacccagtccctgcccaccgacgtaatgacgaccgtgttcaaagtgggggcaaagacagacaagggttggtcgtttttactggggaaatacatttcgatcggttctgaagccgagaaaaataagatccttgaggccctagcgagctctgaagacgtccggaagttgtactggctgatgaagagtagccttaatggggacaatttccgtacccagaaactgagcttcataattcggaccgtgggcaggcactttccaggtcatctgctggcatgggactttgttaaggaaaactggaacaaacttgtacagaagttccctctgggctcgtacaccattcagaatatcgtggccggaagcacatacctgtttagtaccaaaacccacctgtctgaggtacaggccttttttgagaatcagtccgaggctacgtttcgactgcgatgcgtgcaagaagctctggaggttatacaattgaacatacagtggatggagaaaaacctgaaatccctgacatggtggctctag

SEQ ID NO: 157544 - DNA, 3078 bp, Artificial Sequence
  derived and/or modified sequence
atggagcccttcaccaacgacagactgcagctgcccagaaacatgatcgagaacagcatgttcgaggaggagcccgacgtggtggacctggccaaggagccctgcctgcaccccctggagcccgacgaggtggagtacgagcccagaggcagcagactgctggtgagaggcctgggcgagcacgagatggaggaggacgaggaggactacgagagcagcgccaagctgctgggcatgagcttcatgaacagaagcagcggcctgagaaacagcgccaccggctacagacagagccccgacggcgcctgcagcgtgcccagcgccagaaccatggtggtgtgcgccttcgtgatcgtggtggccgtgagcgtgatcatggtgatctacctgctgcccagatgcaccttcaccaaggagggctgccacaagaagaaccagagcatcggcctgatccagcccttcgccaccaacggcaagctgttcccctgggcccagatcagactgcccaccgccgtggtgcccctgagatacgagctgagcctgcaccccaacctgaccagcatgaccttcagaggcagcgtgaccatcagcgtgcaggccctgcaggtgacctggaacatcatcctgcacagcaccggccacaacatcagcagagtgaccttcatgagcgccgtgagcagccaggagaagcaggccgagatcctggagtacgcctaccacggccagatcgccatcgtggcccccgaggccctgctggccggccacaactacaccctgaagatcgagtacagcgccaacatcagcagcagctactacggcttctacggcttcagctacaccgacgagagcaacgagaagaagtacttcgccgccacccagttcgagcccctggccgccagaagcgccttcccctgcttcgacgagcccgccttcaaggccaccttcatcatcaagatcatcagagacgagcagtacaccgccctgagcaacatgcccaagaagagcagcgtggtgctggacgacggcctggtgcaggacgagttcagcgagagcgtgaagatgagcacctacctggtggccttcatcgtgggcgagatgaagaacctgagccaggacgtgaacggcaccctggtgagcatctacgccgtgcccgagaagatcggccaggtgcactacgccctggagaccaccgtgaagctgctggagttcttccagaactacttcgagatccagtaccccctgaagaagctggacctggtggccatccccgacttcgaggccggcgccatggagaactggggcctgctgaccttcagagaggagaccctgctgtacgacagcaacaccagcagcatggccgacagaaagctggtgaccaagatcatcgcccacgagctggcccaccagtggttcggcaacctggtgaccatgaagtggtggaacgacctgtggctgaacgagggcttcgccaccttcatggagtacttcagcctggagaagatcttcaaggagctgagcagctacgaggacttcctggacgccagattcaagaccatgaagaaggacagcctgaacagcagccaccccatcagcagcagcgtgcagagcagcgagcagatcgaggagatgttcgacagcctgagctacttcaagggcagcagcctgctgctgatgctgaagacctacctgagcgaggacgtgttccagcacgccgtggtgctgtacctgcacaaccacagctacgccagcatccagagcgacgacctgtgggacagcttcaacgaggtgaccaaccagaccctggacgtgaagagaatgatgaagacctggaccctgcagaagggcttccccctggtgaccgtgcagaagaagggcaaggagctgttcatccagcaggagagattcttcctgaacatgaagcccgagatccagcccagcgacaccagctacctgtggcacatccccctgagctacgtgaccgagggcagaaactacagcaagtaccagagcgtgagcctgctggacaagaagagcggcgtgatcaacctgaccgaggaggtgctgtgggtgaaggtgaacatcaacatgaacggctactacatcgtgcactacgccgacgacgactgggaggccctgatccaccagctgaagatcaacccctacgtgctgagcgacaaggacagagccaacctgatcaacaacatcttcgagctggccggcctgggcaaggtgcccctgaagagagccttcgacctgatcaactacctgggcaacgagaaccacaccgcccccatcaccgaggccctgttccagaccgacctgatctacaacctgctggagaagctgggctacatggacctggccagcagactggtgaccagagtgttcaagctgctgcagaaccagatccagcagcagacctggaccgacgagggcacccccagcatgagagagctgagaagcgccctgctggagttcgcctgcacccacaacctgggcaactgcagcaccaccgccatgaagctgttcgacgactggatggccagcaacggcacccagagcctgcccaccgacgtgatgaccaccgtgttcaaggtgggcgccaagaccgacaagggctggagcttcctgctgggcaagtacatcagcatcggcagcgaggccgagaagaacaagatcctggaggccctggccagcagcgaggacgtgagaaagctgtactggctgatgaagagcagcctgaacggcgacaacttcagaacccagaagctgagcttcatcatcagaaccgtgggcagacacttccccggccacctgctggcctgggacttcgtgaaggagaactggaacaagctggtgcagaagttccccctgggcagctacaccatccagaacatcgtggccggcagcacctacctgttcagcaccaagacccacctgagcgaggtgcaggccttcttcgagaaccagagcgaggccaccttcagactgagatgcgtgcaggaggccctggaggtgatccagctgaacatccagtggatggagaagaacctgaagagcctgacctggtggctgtag

SEQ ID NO: 157545 - DNA, 3036 bp, Artificial Sequence
  derived and/or modified sequence
atgatcgagaacagcatgttcgaggaggagcccgacgtggtggacctggccaaggagccctgcctgcaccccctggagcccgacgaggtggagtacgagcccagaggcagcagactgctggtgagaggcctgggcgagcacgagatggaggaggacgaggaggactacgagagcagcgccaagctgctgggcatgagcttcatgaacagaagcagcggcctgagaaacagcgccaccggctacagacagagccccgacggcgcctgcagcgtgcccagcgccagaaccatggtggtgtgcgccttcgtgatcgtggtggccgtgagcgtgatcatggtgatctacctgctgcccagatgcaccttcaccaaggagggctgccacaagaagaaccagagcatcggcctgatccagcccttcgccaccaacggcaagctgttcccctgggcccagatcagactgcccaccgccgtggtgcccctgagatacgagctgagcctgcaccccaacctgaccagcatgaccttcagaggcagcgtgaccatcagcgtgcaggccctgcaggtgacctggaacatcatcctgcacagcaccggccacaacatcagcagagtgaccttcatgagcgccgtgagcagccaggagaagcaggccgagatcctggagtacgcctaccacggccagatcgccatcgtggcccccgaggccctgctggccggccacaactacaccctgaagatcgagtacagcgccaacatcagcagcagctactacggcttctacggcttcagctacaccgacgagagcaacgagaagaagtacttcgccgccacccagttcgagcccctggccgccagaagcgccttcccctgcttcgacgagcccgccttcaaggccaccttcatcatcaagatcatcagagacgagcagtacaccgccctgagcaacatgcccaagaagagcagcgtggtgctggacgacggcctggtgcaggacgagttcagcgagagcgtgaagatgagcacctacctggtggccttcatcgtgggcgagatgaagaacctgagccaggacgtgaacggcaccctggtgagcatctacgccgtgcccgagaagatcggccaggtgcactacgccctggagaccaccgtgaagctgctggagttcttccagaactacttcgagatccagtaccccctgaagaagctggacctggtggccatccccgacttcgaggccggcgccatggagaactggggcctgctgaccttcagagaggagaccctgctgtacgacagcaacaccagcagcatggccgacagaaagctggtgaccaagatcatcgcccacgagctggcccaccagtggttcggcaacctggtgaccatgaagtggtggaacgacctgtggctgaacgagggcttcgccaccttcatggagtacttcagcctggagaagatcttcaaggagctgagcagctacgaggacttcctggacgccagattcaagaccatgaagaaggacagcctgaacagcagccaccccatcagcagcagcgtgcagagcagcgagcagatcgaggagatgttcgacagcctgagctacttcaagggcagcagcctgctgctgatgctgaagacctacctgagcgaggacgtgttccagcacgccgtggtgctgtacctgcacaaccacagctacgccagcatccagagcgacgacctgtgggacagcttcaacgaggtgaccaaccagaccctggacgtgaagagaatgatgaagacctggaccctgcagaagggcttccccctggtgaccgtgcagaagaagggcaaggagctgttcatccagcaggagagattcttcctgaacatgaagcccgagatccagcccagcgacaccagctacctgtggcacatccccctgagctacgtgaccgagggcagaaactacagcaagtaccagagcgtgagcctgctggacaagaagagcggcgtgatcaacctgaccgaggaggtgctgtgggtgaaggtgaacatcaacatgaacggctactacatcgtgcactacgccgacgacgactgggaggccctgatccaccagctgaagatcaacccctacgtgctgagcgacaaggacagagccaacctgatcaacaacatcttcgagctggccggcctgggcaaggtgcccctgaagagagccttcgacctgatcaactacctgggcaacgagaaccacaccgcccccatcaccgaggccctgttccagaccgacctgatctacaacctgctggagaagctgggctacatggacctggccagcagactggtgaccagagtgttcaagctgctgcagaaccagatccagcagcagacctggaccgacgagggcacccccagcatgagagagctgagaagcgccctgctggagttcgcctgcacccacaacctgggcaactgcagcaccaccgccatgaagctgttcgacgactggatggccagcaacggcacccagagcctgcccaccgacgtgatgaccaccgtgttcaaggtgggcgccaagaccgacaagggctggagcttcctgctgggcaagtacatcagcatcggcagcgaggccgagaagaacaagatcctggaggccctggccagcagcgaggacgtgagaaagctgtactggctgatgaagagcagcctgaacggcgacaacttcagaacccagaagctgagcttcatcatcagaaccgtgggcagacacttccccggccacctgctggcctgggacttcgtgaaggagaactggaacaagctggtgcagaagttccccctgggcagctacaccatccagaacatcgtggccggcagcacctacctgttcagcaccaagacccacctgagcgaggtgcaggccttcttcgagaaccagagcgaggccaccttcagactgagatgcgtgcaggaggccctggaggtgatccagctgaacatccagtggatggagaagaacctgaagagcctgacctggtggctgtag

SEQ ID NO: 157546 - protein, 574 aa, Artificial Sequence
  derived and/or modified sequence
MALARGSRQLGALVWGACLCVLVHGQQAQPGQGSDPARWRQLIQWENNGQVYSLLNSGSEYVPAGPQRSESSSRVLLAGAPQAQQRRSHGSPRRRQAPSLPLPGRVGSDTVRGQARHPFGFGQVPDNWREVAVGDSTGMARARTSVSQQRHGGSASSVSASAFASTYRQQPSYPQQFPYPQAPFVSQYENYDPASRTYDQGFVYYRPAGGGVGAGAAAVASAGVIYPYQPRARYEEYGGGEELPEYPPQGFYPAPERPYVPPPPPPPDGLDRRYSHSLYSEGTPGFEQAYPDPGPEAAQAHGGDPRLGWYPPYANPPPEAYGPPRALEPPYLPVRSSDTPPPGGERNGAQQGRLSVGSVYRPNQNGRGLPDLVPDPNYVQASTYVQRAHLYSLRCAAEEKCLASTAYAPEATDYDVRVLLRFPQRVKNQGTADFLPNRPRHTWEWHSCHQHYHSMDEFSHYDLLDAATGKKVAEGHKASFCLEDSTCDFGNLKRYACTSHTQGLSPGCYDTYNADIDCQWIDITDVQPGNYILKVHVNPKYIVLESDFTNNVVRCNIHYTGRYVSATNCKIVQS

SEQ ID NO: 157547 - protein, 436 aa, Artificial Sequence
  derived and/or modified sequence
MARARTSVSQQRHGGSASSVSASAFASTYRQQPSYPQQFPYPQAPFVSQYENYDPASRTYDQGFVYYRPAGGGVGAGAAAVASAGVIYPYQPRARYEEYGGGEELPEYPPQGFYPAPERPYVPPPPPPPDGLDRRYSHSLYSEGTPGFEQAYPDPGPEAAQAHGGDPRLGWYPPYANPPPEAYGPPRALEPPYLPVRSSDTPPPGGERNGAQQGRLSVGSVYRPNQNGRGLPDLVPDPNYVQASTYVQRAHLYSLRCAAEEKCLASTAYAPEATDYDVRVLLRFPQRVKNQGTADFLPNRPRHTWEWHSCHQHYHSMDEFSHYDLLDAATGKKVAEGHKASFCLEDSTCDFGNLKRYACTSHTQGLSPGCYDTYNADIDCQWIDITDVQPGNYILKVHVNPKYIVLESDFTNNVVRCNIHYTGRYVSATNCKIVQS

SEQ ID NO: 157548 - DNA, 1725 bp, Artificial Sequence
  derived and/or modified sequence
atggccctggccagaggcagcagacagctgggcgccctggtgtggggcgcctgcctgtgcgtgctggtgcacggccagcaggcccagcccggccagggcagcgaccccgccagatggagacagctgatccagtgggagaacaacggccaggtgtacagcctgctgaacagcggcagcgagtacgtgcccgccggcccccagagaagcgagagcagcagcagagtgctgctggccggcgccccccaggcccagcagagaagaagccacggcagccccagaagaagacaggcccccagcctgcccctgcccggcagagtgggcagcgacaccgtgagaggccaggccagacaccccttcggcttcggccaggtgcccgacaactggagagaggtggccgtgggcgacagcaccggcatggccagagccagaaccagcgtgagccagcagagacacggcggcagcgccagcagcgtgagcgccagcgccttcgccagcacctacagacagcagcccagctacccccagcagttcccctacccccaggcccccttcgtgagccagtacgagaactacgaccccgccagcagaacctacgaccagggcttcgtgtactacagacccgccggcggcggcgtgggcgccggcgccgccgccgtggccagcgccggcgtgatctacccctaccagcccagagccagatacgaggagtacggcggcggcgaggagctgcccgagtaccccccccagggcttctaccccgcccccgagagaccctacgtgcccccccccccccccccccccgacggcctggacagaagatacagccacagcctgtacagcgagggcacccccggcttcgagcaggcctaccccgaccccggccccgaggccgcccaggcccacggcggcgaccccagactgggctggtaccccccctacgccaaccccccccccgaggcctacggcccccccagagccctggagcccccctacctgcccgtgagaagcagcgacacccccccccccggcggcgagagaaacggcgcccagcagggcagactgagcgtgggcagcgtgtacagacccaaccagaacggcagaggcctgcccgacctggtgcccgaccccaactacgtgcaggccagcacctacgtgcagagagcccacctgtacagcctgagatgcgccgccgaggagaagtgcctggccagcaccgcctacgcccccgaggccaccgactacgacgtgagagtgctgctgagattcccccagagagtgaagaaccagggcaccgccgacttcctgcccaacagacccagacacacctgggagtggcacagctgccaccagcactaccacagcatggacgagttcagccactacgacctgctggacgccgccaccggcaagaaggtggccgagggccacaaggccagcttctgcctggaggacagcacctgcgacttcggcaacctgaagagatacgcctgcaccagccacacccagggcctgagccccggctgctacgacacctacaacgccgacatcgactgccagtggatcgacatcaccgacgtgcagcccggcaactacatcctgaaggtgcacgtgaaccccaagtacatcgtgctggagagcgacttcaccaacaacgtggtgagatgcaacatccactacaccggcagatacgtgagcgccaccaactgcaagatcgtgcagagctag

SEQ ID NO: 157549 - DNA, 1311 bp, Artificial Sequence
  derived and/or modified sequence
atggccagagccagaaccagcgtgagccagcagagacacggcggcagcgccagcagcgtgagcgccagcgccttcgccagcacctacagacagcagcccagctacccccagcagttcccctacccccaggcccccttcgtgagccagtacgagaactacgaccccgccagcagaacctacgaccagggcttcgtgtactacagacccgccggcggcggcgtgggcgccggcgccgccgccgtggccagcgccggcgtgatctacccctaccagcccagagccagatacgaggagtacggcggcggcgaggagctgcccgagtaccccccccagggcttctaccccgcccccgagagaccctacgtgcccccccccccccccccccccgacggcctggacagaagatacagccacagcctgtacagcgagggcacccccggcttcgagcaggcctaccccgaccccggccccgaggccgcccaggcccacggcggcgaccccagactgggctggtaccccccctacgccaaccccccccccgaggcctacggcccccccagagccctggagcccccctacctgcccgtgagaagcagcgacacccccccccccggcggcgagagaaacggcgcccagcagggcagactgagcgtgggcagcgtgtacagacccaaccagaacggcagaggcctgcccgacctggtgcccgaccccaactacgtgcaggccagcacctacgtgcagagagcccacctgtacagcctgagatgcgccgccgaggagaagtgcctggccagcaccgcctacgcccccgaggccaccgactacgacgtgagagtgctgctgagattcccccagagagtgaagaaccagggcaccgccgacttcctgcccaacagacccagacacacctgggagtggcacagctgccaccagcactaccacagcatggacgagttcagccactacgacctgctggacgccgccaccggcaagaaggtggccgagggccacaaggccagcttctgcctggaggacagcacctgcgacttcggcaacctgaagagatacgcctgcaccagccacacccagggcctgagccccggctgctacgacacctacaacgccgacatcgactgccagtggatcgacatcaccgacgtgcagcccggcaactacatcctgaaggtgcacgtgaaccccaagtacatcgtgctggagagcgacttcaccaacaacgtggtgagatgcaacatccactacaccggcagatacgtgagcgccaccaactgcaagatcgtgcagagctag

SEQ ID NO: 157550 - DNA, 1725 bp, Artificial Sequence
  derived and/or modified sequence
atggcgctggcaagaggcagtcggcaactgggagccctggtttggggtgcttgtctgtgtgtgttagtgcacggccaacaagcacaacccggccaaggctccgatcccgcgcgatggcgacagctgatccagtgggaaaacaacggacaggtgtatagtttactgaattctggatccgagtatgtgcccgctggcccccagcggtcagaatctagttcccgcgtactgttggccggggctccacaagctcaacagaggcgatcacatgggagtccccgcaggagacaggcaccatccctacccctgcccggtcgggtcggcagcgatacagtaaggggacaagccagacaccccttcggatttgggcaagtacctgacaattggcgcgaagttgccgtcggagacagcaccggcatggcccgcgcccgtacaagtgtgtcacaacagagacacggcggctctgcttcatccgtgtctgcgtcggccttcgcaagtacctaccggcagcagccatcatacccccagcagtttccatatccccaggcacctttcgttagccagtatgagaattatgacccagcttcccggacatacgaccagggcttcgtttactatcggcccgccggcggaggggttggagcaggggccgccgccgtagcctctgctggagttatatacccctaccagcctagagcccggtacgaagagtacggaggtggcgaggagctccccgaataccccccccaggggttttatcctgcgcctgaaagaccgtatgtaccgccgcccccacctccgcctgacgggttggataggagatactcccattctctctatagcgagggaacccccgggtttgagcaggcatatcctgatccagggccagaagccgcccaggctcacggaggtgatccgagattgggatggtacccaccatacgccaacccaccacctgaggcttacgggccgccaagagccctggagccaccttacctgcctgttcgcagcagcgacacccctccacctgggggagaacggaacggggctcagcaaggccgccttagtgttgggagtgtttacaggccaaaccaaaacgggaggggtctccctgatctggttcctgatccaaattatgtgcaggcctctacgtatgtgcagagagctcacctatactctctccgatgcgcggctgaggagaagtgcctagccagcaccgcctatgctccggaagcaactgactacgacgtgcgggtactgctgagatttcctcagagagtgaagaatcagggtacagccgattttctgccaaacagaccacgtcacacatgggagtggcatagctgtcaccagcattatcacagtatggacgagttcagccattacgacctccttgatgccgctactggaaaaaaggtcgccgaaggccacaaagcaagcttttgtcttgaagacagtacatgtgacttcggcaacctaaaacggtatgcttgcacctctcatacacagggccttagtcccggatgctacgacacctataacgccgacattgattgccagtggatagatatcaccgacgtccagcccggaaattacatcctgaaggtccatgtgaatcctaagtatatcgtcctcgaatcagattttacaaacaacgtcgtgcgttgtaacatccattacactgggcggtatgtcagcgccaccaactgtaagattgtgcaatcctag

SEQ ID NO: 157551 - DNA, 1311 bp, Artificial Sequence
  derived and/or modified sequence
atggctagggctcgaacatcagtctcccagcagcggcacggcggaagcgcttcatccgtctctgcctcagcattcgcttccacctataggcagcagccatcttaccctcagcagttcccatacccacaagccccctttgtgagccagtatgaaaattacgaccctgcaagccgcacatatgaccagggttttgtgtattatcgccccgccgggggaggggtgggcgcaggagcagctgcagttgcctctgccggagtgatctacccatatcaaccacgcgcccgttacgaggaatatgggggaggcgaagaattacccgagtatcccccgcagggcttctaccccgctcccgaacggccctacgtacccccaccacctcccccacctgatggcctcgataggcggtacagccattccctgtacagtgaagggacacccgggttcgaacaggcctatccagaccccgggcctgaggccgcacaggcccacggcggtgacccgcgcttaggctggtatcctccatacgcaaacccacctcccgaggcttacgggccccctagagcgcttgagcctccctacctcccggtgcggagctccgataccccaccccccgggggggaacgtaacggggcgcagcagggcaggctctctgtgggcagtgtttaccgcccaaaccagaatgggcgcgggctccccgacctggtcccggatccgaactatgtgcaagcctccacctacgtgcagagagcgcacctgtactcactgagatgtgccgcggaggagaagtgcctcgcatccaccgcttatgctcctgaggctactgactatgatgtgcgggtgctcctccgcttcccgcagagggtgaagaatcaaggcactgctgattttctgccaaatcgaccacgacatacctgggagtggcactcatgtcaccagcactatcatagtatggacgagttctctcactatgacctgctggacgctgctactgggaaaaaagtggcagagggccacaaggcctcattttgccttgaagattccacctgcgacttcgggaatctgaaacgctacgcatgtacatcccatacccagggcctttcgcctggttgctatgacacatataacgcggacattgattgtcagtggatcgatatcaccgatgtccagcccggaaactacattctgaaggtgcatgtgaaccccaaatacattgttctggagtcggattttacaaacaacgtggtgcggtgcaatatccactataccggacggtacgtgagtgcaacaaattgcaagattgtgcagtcatag

SEQ ID NO: 157552 - DNA, 1725 bp, Artificial Sequence
  derived and/or modified sequence
atggccctggcccggggcagccggcagctgggcgccctggtgtggggcgcctgcctgtgtgtgctggtgcacggccagcaggcccagcccggccagggcagtgaccctgcccgctggaggcagctgatccagtgggagaacaacggccaggtgtacagcctgctgaacagcggctctgaatatgtgcctgctggcccccagaggtctgagagcagcagccgggtgctgctggccggggccccccaggcccagcagaggaggagccacggcagcccccggcggcggcaggcccccagcctgcccctgcccggccgggtgggcagtgacacagtgcggggccaggcccggcacccctttggatttggccaggtgcctgacaactggagggaggtggccgtgggggacagcacaggcatggcccgggcccggacctctgtgtcccagcagagacatggaggcagcgccagctctgtgtctgccagcgcctttgccagcacctaccggcagcagcccagctacccccagcagttcccctacccccaggccccctttgtgtcccagtatgaaaattatgaccctgccagcaggacctatgaccagggctttgtgtactacagacctgctgggggcggcgtgggcgctggagctgctgctgtggccagcgctggggtcatctacccctaccagccccgggcccgctatgaggagtatggaggaggagaggagctgcctgagtacccaccccagggcttctacccagcccctgagcggccctacgtgcccccacctcctcctcctccagatggcctggaccggcgctacagccacagcctgtacagcgagggcaccccaggctttgagcaggcctacccagaccccggccctgaggccgcccaggcccatggaggagacccccggctgggctggtacccaccctatgccaaccccccacctgaggcctacggccccccccgggccctggagcccccctacctgcctgtgcgcagcagtgacaccccacctcctggaggagagagaaatggagcccagcagggccgcctgtctgtgggctctgtgtaccggcccaaccagaatggccggggcctgcctgacctggtgcctgaccccaactacgtgcaggccagcacctacgtgcagagggcccacctgtacagcctgcgctgtgccgctgaggagaagtgcctggccagcacagcctatgcccctgaggccacagattatgatgtgcgggtgctgctgcgcttcccccagagggtgaagaaccagggcacagctgacttcctgcccaaccggcccaggcacacctgggagtggcacagctgccaccagcactaccacagcatggatgagttcagccactatgacctgctggatgctgccaccgggaagaaggtggccgagggccacaaggccagcttctgcctggaggacagcacctgtgactttggaaacctgaagagatatgcctgcaccagccacacccagggcctgagccctggctgctatgacacctacaatgctgacatcgactgccagtggattgacatcacagatgtgcagcccggcaactacatcctgaaggtgcacgtgaaccccaagtacatcgtgctggagagtgacttcaccaacaacgtggtgcgctgcaacatccactacacaggccgctacgtgtctgccaccaactgcaagatcgtgcagagctag

SEQ ID NO: 157553 - DNA, 1311 bp, Artificial Sequence
  derived and/or modified sequence
atggcccgggcccggacctctgtgtcccagcagagacatggaggcagcgccagctctgtgtctgccagcgcctttgccagcacctaccggcagcagcccagctacccccagcagttcccctacccccaggccccctttgtgtcccagtatgaaaattatgaccctgccagcaggacctatgaccagggctttgtgtactacagacctgctgggggcggcgtgggcgctggagctgctgctgtggccagcgctggggtcatctacccctaccagccccgggcccgctatgaggagtatggaggaggagaggagctgcctgagtacccaccccagggcttctacccagcccctgagcggccctacgtgcccccacctcctcctcctccagatggcctggaccggcgctacagccacagcctgtacagcgagggcaccccaggctttgagcaggcctacccagaccccggccctgaggccgcccaggcccatggaggagacccccggctgggctggtacccaccctatgccaaccccccacctgaggcctacggccccccccgggccctggagcccccctacctgcctgtgcgcagcagtgacaccccacctcctggaggagagagaaatggagcccagcagggccgcctgtctgtgggctctgtgtaccggcccaaccagaatggccggggcctgcctgacctggtgcctgaccccaactacgtgcaggccagcacctacgtgcagagggcccacctgtacagcctgcgctgtgccgctgaggagaagtgcctggccagcacagcctatgcccctgaggccacagattatgatgtgcgggtgctgctgcgcttcccccagagggtgaagaaccagggcacagctgacttcctgcccaaccggcccaggcacacctgggagtggcacagctgccaccagcactaccacagcatggatgagttcagccactatgacctgctggatgctgccaccgggaagaaggtggccgagggccacaaggccagcttctgcctggaggacagcacctgtgactttggaaacctgaagagatatgcctgcaccagccacacccagggcctgagccctggctgctatgacacctacaatgctgacatcgactgccagtggattgacatcacagatgtgcagcccggcaactacatcctgaaggtgcacgtgaaccccaagtacatcgtgctggagagtgacttcaccaacaacgtggtgcgctgcaacatccactacacaggccgctacgtgtctgccaccaactgcaagatcgtgcagagctag

SEQ ID NO: 157554 - DNA, 2358 bp, Artificial Sequence
  derived and/or modified sequence
gttgcttattcattcagagtgggaaagcgccagccgagcggccagccagtgcggggctggccatgtaaggcccacaggcggtcctgcccgcccggtgccctgcggagagcctcgtgcagccctgggcaccgcccctgccctgccctgaccccttggccttgaaatgctgtcatcggaggagccgtcccgctcgggacaaggccagcatggacaaagctagagctggggcaagcaaggagccttcctgtcctcgaggccgtgggaagagaagcacgcccagggggccactcctgagagcctctctgtccaccaggcctctgcagaggggtcaccatggctctggcccgaggcagccggcagctgggggccctggtgtggggcgcctgcctgtgcgtgctggtgcacgggcagcaggcgcagcccgggcagggctcggaccccgcccgctggcggcagctgatccagtgggagaacaacgggcaggtgtacagcttgctcaactcgggctcagagtacgtgccggccggacctcagcgctccgagagtagctcccgggtgctgctggccggcgcgccccaggcccagcagcggcgcagccacgggagcccccggcgtcggcaggcgccgtccctgcccctgccggggcgcgtgggctcggacaccgtgcgcggccaggcgcggcacccattcggctttggccaggtgcccgacaactggcgcgaggtggccgtcggggacagcacgggcatggcccgggcccgcacctccgtctcccagcaacggcacgggggctccgcctcctcggtctcggcttcggccttcgccagcacctaccgccagcagccctcctacccgcagcagttcccctacccgcaggcgcccttcgtcagccagtacgagaactacgaccccgcgtcgcggacctacgaccagggtttcgtgtactaccggcccgcgggcggcggcgtgggcgcgggggcggcggccgtggcctcggcgggggtcatctacccctaccagccccgggcgcgctacgaggagtacggcggcggcgaagagctgcccgagtacccgcctcagggcttctacccggcccccgagaggccctacgtgccgccgccgccgccgccccccgacggcctggaccgccgctactcgcacagtctgtacagcgagggcacccccggcttcgagcaggcctaccctgaccccggtcccgaggcggcgcaggcccatggcggagacccacgcctgggctggtacccgccctacgccaacccgccgcccgaggcgtacgggccgccgcgcgcgctggagccgccctacctgccggtgcgcagctccgacacgcccccgccgggtggggagcggaacggcgcgcagcagggccgcctcagcgtgggcagcgtgtaccggcccaaccagaacggccgcggtctccctgacttggtcccagaccccaactatgtgcaagcatccacttatgtgcagagagcccacctgtactccctgcgctgtgctgcggaggagaagtgtctggccagcacagcctatgcccctgaggccaccgactacgatgtgcgggtgctactgcgcttcccccagcgcgtgaagaaccagggcacagcagacttcctccccaaccggccacggcacacctgggagtggcacagctgccaccagcattaccacagcatggacgagttcagccactacgacctactggatgcagccacaggcaagaaggtggccgagggccacaaggccagtttctgcctggaggacagcacctgtgacttcggcaacctcaagcgctatgcatgcacctctcatacccagggcctgagcccaggctgctatgacacctacaatgcggacatcgactgccagtggatcgacataaccgacgtgcagcctgggaactacatcctcaaggtgcacgtgaacccaaagtatattgttttggagtctgacttcaccaacaacgtggtgagatgcaacattcactacacaggtcgctacgtttctgcaacaaactgcaaaattgtccaatcctgatctccgggagggacagatggccaatctctccccttccaaagcaggccctgctccccgggcagcctcccgccgaggggcccagcccccaacccacaggcacggaggggcatccctccctgccggcctcagggagcgaacgtggatgaaaaccacagggattccggacgccagaccccattttatacttcacttttctctacagtgttgttttgttgttgttggtttttattttttatactttggccataccacagagctagattgcccaggtctgggctgaataaaacaaggtttttctac

SEQ ID NO: 157555 - DNA, 1953 bp, Artificial Sequence
  derived and/or modified sequence
attcagagtgggaaagcgccagccgagcggccagccagtgcggggctggccatgtaaggcccacaggcggtcctgcccgcccggtgccctgcggagagcctcgtgcagccctgggcaccgcccctgccctgccctgaccccttggccttgaaatgctgtcatcggaggagccgtcccgctcgggacaaggccagcatggacaaagctagagctggggcaagcaaggagccttcctgccggggcgcgtgggctcggacaccgtgcgcggccaggcgcggcacccattcggctttggccaggtgcccgacaactggcgcgaggtggccgtcggggacagcacgggcatggcccgggcccgcacctccgtctcccagcaacggcacgggggctccgcctcctcggtctcggcttcggccttcgccagcacctaccgccagcagccctcctacccgcagcagttcccctacccgcaggcgcccttcgtcagccagtacgagaactacgaccccgcgtcgcggacctacgaccagggtttcgtgtactaccggcccgcgggcggcggcgtgggcgcgggggcggcggccgtggcctcggcgggggtcatctacccctaccagccccgggcgcgctacgaggagtacggcggcggcgaagagctgcccgagtacccgcctcagggcttctacccggcccccgagaggccctacgtgccgccgccgccgccgccccccgacggcctggaccgccgctactcgcacagtctgtacagcgagggcacccccggcttcgagcaggcctaccctgaccccggtcccgaggcggcgcaggcccatggcggagacccacgcctgggctggtacccgccctacgccaacccgccgcccgaggcgtacgggccgccgcgcgcgctggagccgccctacctgccggtgcgcagctccgacacgcccccgccgggtggggagcggaacggcgcgcagcagggccgcctcagcgtgggcagcgtgtaccggcccaaccagaacggccgcggtctccctgacttggtcccagaccccaactatgtgcaagcatccacttatgtgcagagagcccacctgtactccctgcgctgtgctgcggaggagaagtgtctggccagcacagcctatgcccctgaggccaccgactacgatgtgcgggtgctactgcgcttcccccagcgcgtgaagaaccagggcacagcagacttcctccccaaccggccacggcacacctgggagtggcacagctgccaccagcattaccacagcatggacgagttcagccactacgacctactggatgcagccacaggcaagaaggtggccgagggccacaaggccagtttctgcctggaggacagcacctgtgacttcggcaacctcaagcgctatgcatgcacctctcatacccagggcctgagcccaggctgctatgacacctacaatgcggacatcgactgccagtggatcgacataaccgacgtgcagcctgggaactacatcctcaaggtgcacgtgaacccaaagtatattgttttggagtctgacttcaccaacaacgtggtgagatgcaacattcactacacaggtcgctacgtttctgcaacaaactgcaaaattgtccaatcctgatctccgggagggacagatggccaatctctccccttccaaagcaggccctgctccccgggcagcctcccgccgaggggcccagcccccaacccacaggcacggaggggcatccctccctgccggcctcagggagcgaacgtggatgaaaaccacagggattccggacgccagaccccattttatacttcacttttctctacagtgttgttttgttgttgttggtttttattttttatactttggccataccacagagctagattgcccaggtctgggctgaataaaacaaggtttttct

SEQ ID NO: 157556 - DNA, 1725 bp, Artificial Sequence
  derived and/or modified sequence
atggccctggcccggggcagccggcagctgggcgccctggtgtggggcgcctgcctctgcgtactcgtgcacggccagcaggctcagcccggccagggttcagaccccgcaaggtggcgacaacttatccaatgggaaaataatggtcaagtatattcactcttgaacagtggtagtgagtacgtccccgccgggccacagcggagcgagtcctcatcacgtgttctgctggccggggccccccaggcccagcaacgacggtcacacggcagcccccggaggagacaggcgccaagcttgcccctgcctgggcgtgttggttcagacactgtgaggggacaggcccggcaccccttcggcttcggacaagtgcctgacaactggagagaagtggccgtgggcgacagcaccggaatggcccgtgctcgaaccagcgtctcccagcaacggcatggaggttccgcttcttcggtgtcagcatctgccttcgccagcacttatagacagcagccctcctacccacagcagtttccctatccccaagccccctttgtgagccaatacgagaattacgaccctgcttcaagaacctacgaccaggggtttgtctattatcgtccagctggggggggagtgggggcaggtgccgccgccgtagccagcgccggggttatttatccctatcaacccagggcaaggtacgaagaatatggcggcggagaagagctgcctgagtacccaccccagggtttctaccccgcccccgaaagaccatatgtgccaccaccaccaccaccccccgatgggttagatagaagatacagtcacagtttgtatagcgagggaacacctggctttgaacaggcgtatcccgacccggggcctgaggccgcccaagcgcacggcggtgatccacgacttggctggtaccccccatacgcgaacccccccccagaagcttacggacctccacgcgctttggaacccccgtatctgcccgtccggagctctgacaccccacccccaggaggagaaaggaatggagcacagcagggtaggctgtccgtgggtagcgtctaccgtcctaaccaaaacgggcgggggctcccagatctcgtacccgacccgaactacgtgcaggcctccacctacgtgcagcgagcgcatctctacagcctgcgttgcgcagccgaagagaagtgccttgccagcacagcttacgctcctgaggcgacggactatgacgtgagggttttgctgcgttttccacagcgcgtgaagaaccaaggcaccgcagatttcttacccaatcgcccccggcacacgtgggaatggcactcctgccaccagcactatcactctatggatgagttctcacactacgacctattggatgccgcaacagggaaaaaggtggctgaggggcacaaagctagtttttgtttggaggattcaacctgtgactttggtaacttgaagcggtacgcatgcacttcacatactcagggtctttcccccgggtgttacgacacctataatgccgatatcgattgtcagtggatcgacatcaccgatgtccagcctggcaattacatactgaaagtacacgtgaatcccaagtatatcgttcttgagagcgattttacaaacaatgtggtcagatgcaatattcactatactgggagatatgtgtccgcaaccaactgcaagatcgtccagtcgtag

SEQ ID NO: 157557 - DNA, 1311 bp, Artificial Sequence
  derived and/or modified sequence
atggcccgggcccggaccagcgtgagccagcagcggcacggcggcagtgcgtccagcgtgagcgcttccgcatttgcatccacttacaggcaacagccttcctacccccagcagtttccgtacccacaggcacctttcgtaagtcagtatgaaaattatgaccctgcatccaggacttatgatcaaggatttgtctactatagacctgcgggaggtggcgtgggggctggtgccgcagctgtcgctagtgccggtgtgatatacccttaccagccgagagcccggtacgaggagtatggggggggtgaagagctccccgagtacccgccacaaggcttctaccctgcccctgaacgcccctacgtgccccctccccctccaccccctgatgggctcgaccgacggtactcacactcactttatagcgaaggaactcctggcttcgaacaggcgtacccggatccgggcccggaagctgcccaagctcatggtggagaccccagactggggtggtatccgccctatgccaaccccccccccgaagcctatggccctccccgcgccctggagcctccgtatcttcctgtgagatctagcgatacccccccccctggaggagaacgaaacggagcacagcagggtagactgtcagtggggagtgtgtatagacctaaccagaacgggcgaggcctgcctgacttggtgccagacccaaactacgtccaggccagtacatacgttcagagagcgcacctctactcactgcgctgcgccgctgaagaaaagtgtctagccagcacggcgtacgctccggaagccaccgattatgacgtgcgcgttctactgagatttccacagcgcgtgaaaaaccaggggacagccgactttttgccaaacagaccacgtcacacttgggagtggcactcttgccaccagcactatcatagcatggatgaatttagccactacgacctgctggatgcggctacagggaagaaagttgccgaaggacacaaggcaagtttttgcctggaagacagcacgtgtgattttggaaatctaaaacgctacgcttgcaccagtcacacccagggcttatcaccgggatgctatgacacgtacaatgcagatatcgattgccagtggatcgacatcacagacgttcagccgggcaattatattctcaaagtgcacgtcaatccaaaatatatcgtgctagagtctgatttcaccaataatgtggtgcggtgtaatatacactacacaggccgttacgtatcggcgacaaattgcaagattgtccagtcttag

SEQ ID NO: 157558 - DNA, 1725 bp, Artificial Sequence
  derived and/or modified sequence
atggctctcgcccgtgggagcaggcagctaggtgcacttgtctggggggcatgcctgtgtgtcctggtccacggacagcaagcacaaccaggccaggggtctgacccggcaagatggagacagctcattcaatgggagaataatggacaggtctatagcctactgaattccggtagcgaatatgtgccagctggtccacagcgtagcgagtctagtagccgggtgctgctagctggcgcaccacaagcccaacagaggagatcacacggcagcccacggaggcgacaggcgcctagtttgccattgcccggtcgagtgggcagcgacacagtcagaggacaagcaagacaccctttcgggttcggccaagtgcccgataattggcgcgaggtggccgttggcgactcaaccggtatggccagagccagaacgtccgtgtcccaacagagacatggaggcagcgccagttctgtgtctgcaagtgcatttgctagcacctaccgccagcaaccctcttatccccagcagttcccgtacccacaggctccattcgtgagccaatacgagaattatgaccccgcatcacggacatacgaccagggcttcgtgtattaccggcctgcaggagggggtgtcggcgctggagctgcagctgttgccagcgccggagtaatctacccctatcagccacgcgctagatatgaggaatacggcggaggcgaggagctgccagagtatcctccacaagggttttatccagcacccgaacgtccctatgtgccaccccctccaccacctccagacggcctggacagaagatactctcattcgctgtacagtgagggaacacctggtttcgagcaagcctaccctgaccctggccctgaagctgcgcaggctcatggtggggatccgagactgggctggtatccaccttacgccaatccccctcccgaagcttatggccctccccgtgcactggaacccccatatcttcctgtacgctcctcagatactccacctcctggaggagaacgcaatggtgctcagcaagggagactcagtgtggggtcagtctatcggccaaaccagaacggacggggtctacccgacctagtgcccgaccctaactacgtccaggcctccacctatgttcagcgtgcacacctgtactctctccggtgcgcggcagaggaaaaatgcctggcctcgacggcttacgccccagaggccacagattatgacgtcagggtcctactgcgtttcccacagcgtgtgaaaaatcagggtacagctgatttcctcccgaatcgacctaggcacacctgggagtggcattcctgccaccaacattatcactctatggatgagtttagccattatgacctcttggatgcagccacgggcaagaaggtggccgaagggcacaaagccagcttttgcctggaggattccacctgtgacttcggtaacctaaaaaggtacgcgtgtacgtcccatactcagggtctctctccagggtgctatgacacatataacgccgatattgactgccagtggattgatattactgatgtacagccaggcaattacatcttgaaagttcacgttaatcctaagtacatcgtgttggagtcggactttacaaataacgttgtaagatgtaacatccactacaccggacgctacgtctcagctaccaactgcaaaattgtgcagtcatag

SEQ ID NO: 157559 - DNA, 1311 bp, Artificial Sequence
  derived and/or modified sequence
atggctcgcgctcggacttctgtgagccagcaaaggcatgggggttctgcttctagcgtatccgctagcgcgttcgcaagtacatatagacagcagccctcgtacccccaacagtttccgtacccgcaggcacctttcgtctctcagtatgaaaattatgatccagcttctcgcacctatgaccagggattcgtgtactatcgcccagccggtgggggtgtcggcgctggagcggctgccgtcgcctccgcaggtgtgatatatccgtaccagccgcgtgctcgatatgaggagtacggtggcggagaggagctgcctgaatatccacctcaggggttctaccccgcaccggagcgaccttacgtgcctcccccacccccacctcctgatggactcgatcgcagatactctcattcactctactctgagggcaccccaggtttcgaacaggcttatccagaccctggtcccgaggccgctcaagcccacggtggtgatcccaggcttggatggtatcccccttatgcaaatcccccacccgaagcttatggtccccctagggccctggagcctccctacctgccagtgcgctcctctgacacaccacctccaggtggagagcgtaatggagcccaacagggacgactctcagtgggctctgtgtatagaccgaaccaaaatggaagagggcttcccgatctagtacctgaccccaactacgtacaggccagcacctatgtgcagcgcgcacatctctactccctcagatgcgcggctgaggagaagtgcctggcctcaactgcatatgctccagaggccaccgattacgacgtgagggtgctcctgagattcccgcaacgggtgaaaaaccaagggactgccgatttcctaccgaatcggccacggcatacctgggagtggcactcctgtcaccagcactaccactcaatggatgaattctctcattatgacttgttagacgctgctacggggaagaaagtagcggaagggcataaagcttcattctgcctagaggacagtacctgtgattttgggaacctgaagagatatgcctgcacctcccatactcagggcctgtcccctggttgttatgatacttacaacgctgacatcgattgccagtggattgatattaccgatgtccagccagggaattacatactgaaagtgcatgtgaatcctaagtatatcgtcttggagtctgacttcacaaacaatgtggtgaggtgcaatatccactataccggaaggtatgtatcggccaccaattgcaaaatagtccaaagttag

SEQ ID NO: 157560 - protein, 2040 aa, Artificial Sequence
  derived and/or modified sequence
MEHKEVVLLLLLFLKSAAPEQSHVVQDCYHGDGQSYRGTYSTTVTGRTCQAWSSMTPHQHNRTTENYPNAGLIMNYCRNPDAVAAPYCYTRDPGVRWEYCNLTQCSDAEGTAVAPPTVTPVPSLEAPSEQAPTEQRPGVQECYHGNGQSYRGTYSTTVTGRTCQAWSSMTPHSHSRTPEYYPNAGLIMNYCRNPDAVAAPYCYTRDPGVRWEYCNLTQCSDAEGTAVAPPTVTPVPSLEAPSEQAPTEQRPGVQECYHGNGQSYRGTYSTTVTGRTCQAWSSMTPHSHSRTPEYYPNAGLIMNYCRNPDAVAAPYCYTRDPGVRWEYCNLTQCSDAEGTAVAPPTVTPVPSLEAPSEQAPTEQRPGVQECYHGNGQSYRGTYSTTVTGRTCQAWSSMTPHSHSRTPEYYPNAGLIMNYCRNPDAVAAPYCYTRDPGVRWEYCNLTQCSDAEGTAVAPPTVTPVPSLEAPSEQAPTEQRPGVQECYHGNGQSYRGTYSTTVTGRTCQAWSSMTPHSHSRTPEYYPNAGLIMNYCRNPDAVAAPYCYTRDPGVRWEYCNLTQCSDAEGTAVAPPTVTPVPSLEAPSEQAPTEQRPGVQECYHGNGQSYRGTYSTTVTGRTCQAWSSMTPHSHSRTPEYYPNAGLIMNYCRNPDAVAAPYCYTRDPGVRWEYCNLTQCSDAEGTAVAPPTVTPVPSLEAPSEQAPTEQRPGVQECYHGNGQSYRGTYSTTVTGRTCQAWSSMTPHSHSRTPEYYPNAGLIMNYCRNPDAVAAPYCYTRDPGVRWEYCNLTQCSDAEGTAVAPPTVTPVPSLEAPSEQAPTEQRPGVQECYHGNGQSYRGTYSTTVTGRTCQAWSSMTPHSHSRTPEYYPNAGLIMNYCRNPDPVAAPYCYTRDPSVRWEYCNLTQCSDAEGTAVAPPTITPIPSLEAPSEQAPTEQRPGVQECYHGNGQSYQGTYFITVTGRTCQAWSSMTPHSHSRTPAYYPNAGLIKNYCRNPDPVAAPWCYTTDPSVRWEYCNLTRCSDAEWTAFVPPNVILAPSLEAFFEQALTEETPGVQDCYYHYGQSYRGTYSTTVTGRTCQAWSSMTPHQHSRTPENYPNAGLTRNYCRNPDAEIRPWCYTMDPSVRWEYCNLTQCLVTESSVLATLTVVPDPSTEASSEEAPTEQSPGVQDCYHGDGQSYRGSFSTTVTGRTCQSWSSMTPHWHQRTTEYYPNGGLTRNYCRNPDAEISPWCYTMDPNVRWEYCNLTQCPVTESSVLATSTAVSEQAPTEQSPTVQDCYHGDGQSYRGSFSTTVTGRTCQSWSSMTPHWHQRTTEYYPNGGLTRNYCRNPDAEIRPWCYTMDPSVRWEYCNLTQCPVMESTLLTTPTVVPVPSTELPSEEAPTENSTGVQDCYRGDGQSYRGTLSTTITGRTCQSWSSMTPHWHRRIPLYYPNAGLTRNYCRNPDAEIRPWCYTMDPSVRWEYCNLTRCPVTESSVLTTPTVAPVPSTEAPSEQAPPEKSPVVQDCYHGDGRSYRGISSTTVTGRTCQSWSSMIPHWHQRTPENYPNAGLTENYCRNPDSGKQPWCYTTDPCVRWEYCNLTQCSETESGVLETPTVVPVPSMEAHSEAAPTEQTPVVRQCYHGNGQSYRGTFSTTVTGRTCQSWSSMTPHRHQRTPENYPNDGLTMNYCRNPDADTGPWCFTMDPSIRWEYCNLTRCSDTEGTVVAPPTVIQVPSLGPPSEQDCMFGNGKGYRGKKATTVTGTPCQEWAAQEPHRHSTFIPGTNKWAGLEKNYCRNPDGDINGPWCYTMNPRKLFDYCDIPLCASSSFDCGKPQVEPKKCPGSIVGGCVAHPHSWPWQVSLRTRFGKHFCGGTLISPEWVLTAAHCLKKSSRPSSYKVILGAHQEVNLESHVQEIEVSRLFLEPTQADIALLKLSRPAVITDKVMPACLPSPDYMVTARTECYITGWGETQGTFGTGLLKEAQLLVIENEVCNHYKYICAEHLARGTDSCQGDSGGPLVCFEKDKYILQGVTSWGLGCARPNKPGVYARVSRFVTWIEGMMRNN

SEQ ID NO: 157561 - DNA, 6123 bp, Artificial Sequence
  derived and/or modified sequence
atggaacacaaagaagtggtgctgctcctgctgctgttcctgaaaagtgcggcaccagagcagagccatgtggtacaagattgttaccatggcgacggacagagttacaggggaacctattccacaacagtcaccggccggacctgccaagcatggtcttctatgacccctcatcagcataatcgcactacagagaactatccaaatgctggcctgattatgaattactgtcgcaatcccgacgcggttgcagctccttactgttatacaagagatccaggtgtacggtgggaatactgcaatttgacgcagtgctctgacgccgagggaactgctgttgccccccctactgtgactcctgtgccctccttggaggctccctcggagcaggctcccactgagcaacggcccggagtccaggagtgttaccacggaaatggtcagtcctatcgcggaacctactccacgacagttactgggagaacttgccaagcatggagtagcatgaccccgcacagccattcaagaactcccgagtactacccaaacgccggactcatcatgaattactgccgaaacccagatgcggtcgccgccccatactgctatactagggatcctggggtgcggtgggaatactgcaacctcacacagtgcagtgatgcagagggtacagcagttgctccaccaactgtgaccccggtgccatcattggaggccccaagtgaacaagcccctacagaacagcggcccggagttcaggaatgttaccacggcaacgggcaatcttatagaggcacctattctaccaccgtcacaggcagaacgtgccaggcctggtcatccatgaccccccattcccattcgagaacaccagaatattatcctaatgccggactgataatgaactactgtcggaatccagacgcagttgccgccccatactgctacacccgtgatccaggcgtgaggtgggagtactgcaacttgacacagtgctctgacgctgaagggacggcagtggctccaccaaccgtgacccctgtgccctcattagaggccccttccgaacaggctccaaccgagcagagaccaggggtccaggaatgctaccacggcaacgggcaatcttacaggggcacgtactccacaactgtgaccggccgaacctgtcaggcctggtcttccatgactccccactcccactccagaactccagaatattatcctaacgctggccttattatgaactactgtaggaaccccgatgcggtggctgcgccctactgttacacccgagatccaggcgtgaggtgggaatattgcaacttgacacagtgcagcgatgctgagggaaccgccgtggcacctccaaccgtgacaccagtgccatctttggaagcaccatcagagcaggcccccaccgagcagaggcctggtgtgcaggagtgttatcacgggaacggacaatcttaccgagggacatattcaaccaccgttacagggcgcacatgtcaggcctggtcctccatgacaccacactcccactctcggacccctgagtattaccctaacgcaggcctgatcatgaattattgtcgcaaccccgatgccgtcgcagccccctactgctatacccgggatccaggagtccgatgggaatactgcaatctaacgcagtgcagcgacgctgagggcactgccgtggctccccctactgtgactcccgtcccaagcctcgaagctccgtccgagcaagccccaacggagcaaaggcctggggtgcaggaatgctaccatggcaatggccaatcgtataggggcacgtattccactaccgtaacgggcagaacttgtcaagcatggagttctatgacaccacatagccatagcaggacccccgagtattaccctaacgccggcctgataatgaactattgcaggaaccccgatgccgtagctgcgccttactgctacacaagagaccccggggtccgatgggaatactgcaatctaacccagtgttccgatgcggagggcacggcagttgctccacccaccgtaactcctgtaccaagcctggaggcccccagtgagcaggctcccacggagcagcgcccgggtgtgcaggagtgttaccatggaaatggccaatcctaccggggaacgtacagcacaacggtgactggcaggacctgccaggcttggtcgagcatgacgccacacagtcatagcagaaccccagagtattatcctaatgcaggactgattatgaactattgtcgcaatcctgacgcggttgcggccccctactgctatacacgggaccccggggtgcgctgggaatactgtaatctgacccagtgcagtgatgccgagggcaccgcagtggccccacccacagtgactccggtgcccagcctcgaagccccatccgagcaggcccctactgaacaacgtccgggagtgcaggaatgctatcacggcaatggacagtcctaccgcgggacatattctaccacggtgaccggacgaacatgccaggcgtggagttccatgacaccccacagtcatagtcggacgcccgagtactacccaaacgcagggctcatcatgaactattgcagaaatccagatccggtggccgcaccctattgttacactcgcgatccttcagtgaggtgggagtactgtaacctgacccagtgttccgatgccgaggggactgcagtggcccctccgacaataactccgattccaagtttggaggccccctctgaacaggccccaaccgagcagagacccggggtacaggagtgttaccatggaaatggccagagctaccaaggaacttattttataaccgtgacaggaagaacatgtcaggcatggtctagcatgacgccccactctcatagccgtacaccagcttattatcctaacgccgggttgatcaaaaactactgtcgaaaccccgatcctgtggctgcaccgtggtgctacaccacagatccatctgtccgctgggagtactgtaacctcacaaggtgcagcgatgcggagtggaccgcttttgtgccacccaatgtgattctggcacccagcctggaggccttctttgaacaggccttaacggaggagacgcctggggtacaggactgctactatcactacggtcagtcctatcgcggaacgtattccaccaccgtcaccggtcgcacatgccaggcctggagcagcatgacacctcatcagcactcaagaacaccggaaaactatccaaacgccgggctgacccggaactattgcaggaaccctgacgccgaaattcgcccttggtgttacaccatggacccatcagtccgctgggagtactgtaacttaactcaatgtctagtcaccgagagttcggtgttagctacgttaacggtcgtgccagacccttccactgaggcctctagtgaggaggcaccgaccgaacagtcccccggcgtgcaggactgctaccacggtgatggacagtcttacagggggtccttctcaacaacagtgaccgggcgcacatgtcagagttggagcagtatgacgccccactggcaccaaaggactactgaatactatcctaacggcgggctaacacggaattactgccgtaatcccgacgccgaaatttcaccctggtgctacaccatggaccccaatgtaagatgggagtattgcaatctgactcaatgccccgtgacggagagctctgttctggccactagcacggcagtctctgagcaggctccgaccgaacagtcccctaccgtacaggattgctatcatggagatggccagagttaccgcggatccttttccacaactgtgaccgggcggacttgtcaatcatggtcctctatgacacctcattggcatcagcgtacaaccgagtactacccaaacggtggtctgactaggaactattgcagaaatcctgacgccgaaatcaggccgtggtgctatacgatggaccctagcgtacggtgggaatactgtaatcttactcagtgtccagtcatggaatcaaccctgttgacaactcccactgttgtgcctgtgccttccacagagctgcctagcgaagaagcccccacggaaaattccacaggagtccaagattgttatcggggggacggacagagctatcgagggaccctgtccaccactatcaccggacgcacctgccagtcatggtcatccatgacaccccattggcacagaagaatcccgctgtattaccctaatgcaggcctcaccaggaattattgtcgcaatcctgatgcggagatcagaccatggtgctacaccatggatccaagcgtgcggtgggagtattgcaacctcacccgatgccctgtcacagagagtagtgtgttaaccacacccaccgtggccccagtaccttctaccgaagcacctagcgaacaggctccccccgaaaagagccctgtggttcaagattgctatcatggagacggaaggtcctaccggggcatctcatccacgaccgtaacaggacggacctgtcaatcatggagcagcatgatccctcactggcaccagagaacacctgagaactaccctaacgcgggcctcacagaaaactattgtagaaatcctgactcaggcaaacaaccatggtgctacaccacagacccatgtgtgcgctgggagtactgcaatctgacccaatgctctgaaacggaatccggggttctggagacaccaaccgtggtaccggtgccttctatggaagctcatagcgaggctgccccaactgaacagacgcccgtcgttagacagtgctaccacggtaatggacaatcttacagagggacattctccacaacagtgacagggaggacctgtcaaagctggtctagcatgaccccccaccgtcatcagaggaccccagagaactatcctaacgacggcctgaccatgaactactgccggaatcctgatgcagataccgggccttggtgcttcacaatggatccatccattcgatgggagtattgtaatctaaccagatgttccgacacagaagggaccgtcgtcgctccacctacagtgatacaggtcccctccctggggcctccatcagagcaggactgcatgtttggaaacggtaaaggttatagagggaagaaggccactactgtcaccggcaccccctgccaggaatgggccgctcaggagccccacagacatagtacattcataccaggcaccaataagtgggcagggctcgaaaaaaattactgcaggaatcctgacggagatatcaacggcccctggtgctacaccatgaatcctcgcaagcttttcgactactgtgacatacccttgtgcgccagttcaagctttgactgcggtaagccccaggttgaaccaaagaagtgtcctggatccatcgtgggtggatgcgtcgcacacccacactcctggccttggcaagtatccttgcgtaccaggtttggcaaacatttctgcggtggaactctgatcagcccagaatgggtgctgaccgccgcccattgtctgaaaaagtcctcccggccgtctagttacaaagtgatactcggggctcatcaggaggtgaatctagagtctcacgtacaggagatcgaggtgtcacgccttttcctggaaccaacccaggcagacatcgccttgctgaagctgagccggcccgcagtgataacagataaggttatgcccgcttgcctcccaagcccagattacatggtgaccgcccggaccgaatgctacataactggctggggtgagactcagggtacgtttggtacagggttgctcaaagaggcacagctgcttgtgattgagaatgaggtctgcaatcactataaatacatctgcgcagagcatcttgcccgtggcactgattcctgccagggggactctggggggcccttggtatgtttcgaaaaagacaaatatatcctgcagggggtgaccagttgggggttagggtgtgctaggccgaacaaaccgggcgtttatgccagggtatcccggtttgtcacctggattgaaggcatgatgaggaacaactag

SEQ ID NO: 157562 - DNA, 6123 bp, Artificial Sequence
  derived and/or modified sequence
atggagcacaaggaagttgtgctgctcctgctactgttcctgaagtcggcagcgccagaacaatctcacgtggtccaggactgctatcatggggatgggcagtcatatagaggcacttactctacaacagtgacaggtcggacttgccaggcctggagttccatgacgcctcaccagcacaaccgcacaaccgaaaactaccctaacgcaggcctgattatgaattactgccggaatcccgatgctgtcgccgctccttattgctacaccagggatcctggggtgagatgggaatattgcaacctaactcagtgcagcgacgcggaaggtactgccgtcgccccccccaccgtgacacccgtcccatcactagaagccccatctgaacaggccccaacagagcagaggcctggcgtccaggagtgttatcacggcaacggacagagctatcggggaacttactccacaaccgtcactgggaggacctgccaggcatggtcttcaatgactccgcactctcactctcgcacccctgagtactaccctaacgccggccttattatgaattattgcagaaatcccgacgctgttgccgcaccctattgctacacacgggatccgggcgtcaggtgggagtattgcaatctaacacaatgctcggacgctgagggcactgcggtagcccctcccacagtcacacccgtgccctccctcgaggcaccttcagagcaggcccccaccgaacagaggccaggcgtgcaggagtgttaccatggtaacggtcagagctataggggaacctacagcaccaccgtaacagggaggacctgtcaggcatggagtagcatgaccccacattcacactcccgcacccctgaatactacccgaacgctgggcttatcatgaactactgtcggaatccagacgccgtggcagctccatattgttacacccgagaccccggggtacgttgggagtattgtaatctcacccagtgctccgacgctgagggaaccgccgtggctccacccacggtcacccccgttccctctctcgaggctccctcggagcaagcccccaccgagcaaagacccggcgtccaggagtgttaccatggcaatggtcagtcctataggggcacatattctacgactgtgacagggcgtacatgccaggcctggtccagtatgacaccccacagccattcgagaacaccggagtactaccccaacgcagggctcatcatgaattattgcaggaaccctgacgccgtcgccgctccctattgttacaccagagatcccggcgtccgctgggagtactgcaacttgactcagtgttccgacgcggagggcacagctgtcgccccccccacggtgaccccggtcccatccttggaggcaccctcggaacaggctccaaccgaacagagacccggagtgcaggagtgttaccacggaaatggacagagttacaggggaacctattccacaaccgtgaccgggcgaacttgccaggcttggagctctatgacgcctcactctcactcacgcactcctgagtattaccccaatgcgggtctgattatgaactattgcaggaaccccgatgctgtggccgcaccatactgctatacgagggatcctggggtgaggtgggagtactgtaacctcacccagtgctctgatgctgaagggacagcagtggctccaccaaccgtaacacccgtaccctctcttgaggctccctcagaacaggctcctactgaacagagacccggcgtccaggagtgttaccacggaaacggccagagctaccgggggacctatagcaccaccgtgaccggccgcacctgtcaggcatggtcatcaatgaccccacacagtcattccaggacaccggagtactatccgaatgctggcctgataatgaattactgtaggaacccagacgcagtcgcggctccatactgttataccagagatccgggcgtgcgatgggaatactgtaacttgactcaatgctctgatgccgaaggtaccgctgtggccccccccactgtgactccggtgccatccctggaagccccatcagaacaggcccctaccgagcaaaggccaggagtacaggagtgctatcacggcaatgggcagtcctacagaggaacctactccaccactgtcaccgggagaacctgtcaagcctggtcatctatgactccgcatagtcatagccgtacacctgaatattatcccaatgctggcctgatcatgaattattgtcgaaatccagatgctgtggcagctccgtattgctacacgagggaccccggagttcggtgggaatactgcaacctgactcagtgctccgacgctgaaggtaccgccgtggctccacctaccgtgactcctgtgccttcactggaagctccttcagaacaggcccccactgagcaacggccgggagtgcaggaatgttaccatggcaacggtcagtcataccgcggtacctacagtaccaccgtgacaggtcgcacatgtcaggcctggtctagtatgaccccccacagccactctagaacaccagagtactaccccaacgcaggcttgattatgaattattgtagaaaccccgatccagtagctgcaccttactgttacactcgcgatccgtccgttcgttgggaatactgtaatcttacccagtgttctgatgcagagggaaccgccgtggcacccccaaccattactcccatacccagtctcgaagcaccttccgagcaggctccaaccgaacagcgaccgggcgtacaggagtgctatcatggtaatggccagtcctaccagggaacttactttatcacagtcaccgggagaacttgccaggcttggtcaagtatgacccctcattcacactctcgaactcccgcctattaccccaatgcaggactgatcaaaaattattgccgcaaccccgacccggttgccgcgccatggtgttacacaacagaccccagcgtgagatgggagtattgcaacctgaccaggtgctccgacgcggagtggaccgcattcgtcccgcctaatgttattctcgcaccaagcctggaggcctttttcgagcaagcccttactgaggagactccaggagtccaggactgttactaccattatgggcagagttatcgtgggacatattctacaaccgtgacggggcgaacatgtcaggcatggtctagtatgactcctcatcagcactccagaactccagagaactaccccaatgcagggttgactcgaaactattgcagaaatcccgacgcagaaattcggccttggtgttataccatggatccaagtgtaaggtgggaatactgcaatctgacccagtgcctggtgaccgagagcagcgtgctggctaccctcacggtggtgcctgaccctagcactgaagcctctagtgaggaggcacccaccgaacagtctccaggtgtccaagactgctatcatggggacggtcaaagctaccgaggttccttcagcaccaccgtaacggggaggacctgtcagtcttggtctagtatgacacctcactggcaccaacgaacaacggagtattatccaaacggtggcctcactaggaattactgtagaaaccccgacgctgagatttcaccttggtgttacaccatggaccccaatgtccgctgggaatactgtaatcttactcagtgtccagtgactgagtcgtcagtgctggctacctctactgcggttagcgagcaagctcctacagagcagagcccaactgtgcaggactgctaccatggtgacggccagagctaccgaggtagcttttcgacaactgttaccgggcggacctgccaatcttggagcagcatgacacctcactggcatcagagaacaacagagtactatccaaatggcggattaaccagaaattactgccggaatccggatgctgagatccggccatggtgctatactatggatcccagtgtgaggtgggaatattgtaatctcacccaatgtcccgttatggagagtaccctgcttaccacaccaacagttgtacccgttccaagcacagaattaccttccgaagaggcccctaccgaaaatagtactggcgtacaagactgttatcgaggagatggccagagttatcgggggaccttgagcaccaccatcaccggacgcacatgccaatcatggtcatctatgaccccacattggcatcgacgcattcccttgtactaccccaatgccggactcacaaggaattactgtaggaatcctgatgctgagattaggccttggtgctacaccatggacccaagcgtgcgctgggagtattgtaacctaacgcgctgccccgtaacagaatcatcagtgctgactaccccaacagtagcccctgtaccctcgaccgaagctcctagcgaacaggcgccacccgaaaaaagccctgtagtacaggactgctaccacggagacgggagatcataccgggggatttcctctacaacggtgactggcagaacctgtcagtcttggtcgagcatgatcccccactggcatcagcggaccccagaaaactatcccaacgccgggctgaccgaaaactactgtcgcaaccctgactccggcaagcagccttggtgctataccaccgacccatgcgtccgctgggagtattgtaatctgacccagtgcagcgaaaccgaaagcggcgtgttggagaccccaaccgtggtacccgttccctccatggaagctcactcggaggctgctccaacggaacagacacctgtggtgagacaatgttatcatggcaacggccaatcttacagggggaccttttccacgacagtgacagggagaacatgccaatcctggtcatccatgacaccccatagacaccagaggacccccgaaaactacccaaacgatggtctgacaatgaattactgtaggaacccggatgccgacactggcccatggtgctttactatggacccaagcattcggtgggaatactgcaatcttactaggtgttctgataccgagggcacagtggttgcgccccctacggtgatccaagtgcccagtcttggacctccgtcagagcaggattgcatgtttggcaatgggaaaggttaccgtgggaaaaaggccaccaccgtgactggaaccccttgtcaggaatgggctgcgcaggagccccacagacattctacgtttattccgggcaccaacaaatgggccggtctggagaaaaattattgtcggaatcctgatggtgacatcaacggtccctggtgctacacaatgaaccctcggaaattgtttgactactgtgacattcccttgtgcgcaagttcgagtttcgactgcggtaaaccgcaggttgagcccaagaaatgtccaggtagtatcgtgggtggctgcgttgctcatccacatagctggccctggcaggtgtccctgaggacgcgctttggcaaacacttctgtgggggtactctaatcagccctgagtgggttctgacagccgcacattgtttaaagaagtcctcacgcccaagcagctacaaggtcatactgggagcccatcaagaggtgaatctggagtcccacgtgcaggagattgaggtgtcccgcctgttcctggaacctacccaggcagacattgccttgttaaaacttagccgccctgccgtgatcacggacaaggtgatgcctgcctgtttaccctcacccgattacatggttacagcgcggacggagtgttacattactgggtggggtgagactcaaggcacatttggcactggcttgctgaaagaggcccaactgctcgtaattgagaacgaggtgtgtaatcactacaaatacatttgcgcagagcatttggccaggggcaccgacagttgccaaggagacagtggcgggccgttagtttgcttcgaaaaagacaagtatatattgcagggcgtgacttcatgggggcttggctgtgctcggcccaataagccaggggtgtacgccagggtgagtcgattcgttacatggatcgaaggcatgatgcggaataactag

SEQ ID NO: 157563 - DNA, 6123 bp, Artificial Sequence
  derived and/or modified sequence
atggagcacaaggaggtggtgctgctgctgctgctcttcctgaagtctgctgcccctgagcagagccacgtggtgcaggactgctaccatggagatggccagagctaccggggcacctacagcaccaccgtgactggaagaacctgccaggcctggagctccatgaccccccaccagcacaacagaaccacagagaactacccaaatgccggcctcatcatgaactactgcaggaacccagatgctgtggccgccccctactgctacacccgggaccccggggtgcgctgggagtactgcaacctgacccagtgcagtgatgctgagggcacagctgtggcccccccaacagtgacccctgtgcccagcctggaggcccccagcgagcaggcccccacagagcagaggcctggggtgcaggagtgctaccacggcaatggccagagctaccggggcacctacagcaccaccgtgactggaagaacctgccaggcctggagctccatgaccccccacagccacagcaggaccccagagtactacccaaatgccggcctcatcatgaactactgcaggaacccagatgctgtggccgccccctactgctacacccgggaccccggggtgcgctgggagtactgcaacctgacccagtgcagtgatgctgagggcacagctgtggcccccccaacagtgacccctgtgcccagcctggaggcccccagcgagcaggcccccacagagcagaggcctggggtgcaggagtgctaccacggcaatggccagagctaccggggcacctacagcaccaccgtgactggaagaacctgccaggcctggagctccatgaccccccacagccacagcaggaccccagagtactacccaaatgccggcctcatcatgaactactgcaggaacccagatgctgtggccgccccctactgctacacccgggaccccggggtgcgctgggagtactgcaacctgacccagtgcagtgatgctgagggcacagctgtggcccccccaacagtgacccctgtgcccagcctggaggcccccagcgagcaggcccccacagagcagaggcctggggtgcaggagtgctaccacggcaatggccagagctaccggggcacctacagcaccaccgtgactggaagaacctgccaggcctggagctccatgaccccccacagccacagcaggaccccagagtactacccaaatgccggcctcatcatgaactactgcaggaacccagatgctgtggccgccccctactgctacacccgggaccccggggtgcgctgggagtactgcaacctgacccagtgcagtgatgctgagggcacagctgtggcccccccaacagtgacccctgtgcccagcctggaggcccccagcgagcaggcccccacagagcagaggcctggggtgcaggagtgctaccacggcaatggccagagctaccggggcacctacagcaccaccgtgactggaagaacctgccaggcctggagctccatgaccccccacagccacagcaggaccccagagtactacccaaatgccggcctcatcatgaactactgcaggaacccagatgctgtggccgccccctactgctacacccgggaccccggggtgcgctgggagtactgcaacctgacccagtgcagtgatgctgagggcacagctgtggcccccccaacagtgacccctgtgcccagcctggaggcccccagcgagcaggcccccacagagcagaggcctggggtgcaggagtgctaccacggcaatggccagagctaccggggcacctacagcaccaccgtgactggaagaacctgccaggcctggagctccatgaccccccacagccacagcaggaccccagagtactacccaaatgccggcctcatcatgaactactgcaggaacccagatgctgtggccgccccctactgctacacccgggaccccggggtgcgctgggagtactgcaacctgacccagtgcagtgatgctgagggcacagctgtggcccccccaacagtgacccctgtgcccagcctggaggcccccagcgagcaggcccccacagagcagaggcctggggtgcaggagtgctaccacggcaatggccagagctaccggggcacctacagcaccaccgtgactggaagaacctgccaggcctggagctccatgaccccccacagccacagcaggaccccagagtactacccaaatgccggcctcatcatgaactactgcaggaacccagatgctgtggccgccccctactgctacacccgggaccccggggtgcgctgggagtactgcaacctgacccagtgcagtgatgctgagggcacagctgtggcccccccaacagtgacccctgtgcccagcctggaggcccccagcgagcaggcccccacagagcagaggcctggggtgcaggagtgctaccacggcaatggccagagctaccggggcacctacagcaccaccgtgactggaagaacctgccaggcctggagctccatgaccccccacagccacagcaggaccccagagtactacccaaatgccggcctcatcatgaactactgcaggaacccagaccctgtggccgccccctactgctacacccgggaccccagcgtgcgctgggagtactgcaacctgacccagtgcagtgatgctgagggcacagctgtggccccacccaccatcacccccatccccagcctggaggcccccagcgagcaggcccccacagagcagaggcctggggtgcaggagtgctaccacggcaatggccagagctaccagggcacctacttcatcaccgtgactggaagaacctgccaggcctggagctccatgaccccccacagccacagcaggaccccagcctactacccaaatgccggcctcatcaagaactactgcaggaacccagaccctgtggccgccccctggtgctacaccacagaccccagcgtgcgctgggagtactgcaacctgacccgctgcagtgatgctgagtggacagcctttgtgcccccaaatgtcatcctggcccccagcctggaggccttctttgagcaggccctgacagaggagaccccaggagtgcaggactgctactaccactacggccagagctaccggggcacctacagcaccaccgtgactggaagaacctgccaggcctggagctccatgaccccccaccagcacagcaggaccccagagaactacccaaatgccggcctgaccaggaactactgcaggaacccagatgctgagatccggccctggtgctacaccatggaccccagcgtgcgctgggagtactgcaacctgacccagtgcctggtgacagagagctctgtgctggccaccctgactgtggtgcctgaccccagcacagaggccagcagcgaggaggcccccacagagcagagccctggggtgcaggactgctaccatggagatggccagagctaccggggcagcttcagcaccaccgtgactggaagaacctgccagagctggagctccatgaccccccactggcaccagaggaccacagagtactacccaaatggaggcctgaccaggaactactgcaggaacccagatgctgagatcagcccctggtgctacaccatggaccccaacgtgcgctgggagtactgcaacctgacccagtgccctgtgacagagagctctgtgctggccaccagcacagctgtgtctgagcaggcccccacagagcagagccccaccgtgcaggactgctaccatggagatggccagagctaccggggcagcttcagcaccaccgtgactggaagaacctgccagagctggagctccatgaccccccactggcaccagaggaccacagagtactacccaaatggaggcctgaccaggaactactgcaggaacccagatgctgagatccggccctggtgctacaccatggaccccagcgtgcgctgggagtactgcaacctgacccagtgccctgtgatggagagcaccctgctgaccacccccaccgtggtgcctgtgcccagcacagagctgcccagcgaggaggcccccacagagaacagcactggagtgcaggactgctacagaggagatggccagagctaccggggcaccctgagcaccaccatcactggaagaacctgccagagctggagctccatgaccccccactggcaccggcgcatccccctgtactacccaaatgccggcctgaccaggaactactgcaggaacccagatgctgagatccggccctggtgctacaccatggaccccagcgtgcgctgggagtactgcaacctgacccgctgccctgtgacagagagctctgtgctgaccacccccaccgtggcccctgtgcccagcacagaggcccccagcgagcaggcccctcctgagaagagccctgtggtgcaggactgctaccatggagatggccgcagctaccggggcatcagcagcaccaccgtgactggaagaacctgccagagctggagctccatgatcccccactggcaccagaggaccccagagaactacccaaatgccggcctgacagagaactactgcaggaacccagacagcggcaagcagccctggtgctacaccacagacccctgtgtgcgctgggagtactgcaacctgacccagtgcagcgagacagagagcggcgtgctggagacccccaccgtggtgcctgtgcccagcatggaggcccacagcgaggccgcccccacagagcagacccctgtggtgcggcagtgctaccacggcaatggccagagctaccggggcaccttcagcaccaccgtgactggaagaacctgccagagctggagctccatgaccccccaccgccaccagaggaccccagagaactacccaaatgatggcctgaccatgaactactgcaggaacccagatgctgacaccggcccctggtgcttcaccatggaccccagcatccgctgggagtactgcaacctgacccgctgcagcgacacagagggcaccgtggtggcccccccaacagtcatccaggtgcccagcctgggcccccccagcgagcaggactgcatgtttggaaatggcaagggctaccggggcaagaaggccaccaccgtgacaggcaccccctgccaggagtgggccgcccaggagccccaccgccacagcaccttcatccctggcaccaacaagtgggccggcctggagaagaactactgcagaaatccagatggagacatcaatggcccctggtgctacaccatgaaccccaggaagctgtttgactactgtgacatccccctgtgtgccagcagcagctttgactgtgggaagccccaggtggagcccaagaagtgccccggcagcatcgtgggcggctgtgtggcccacccccacagctggccctggcaggtgtccctgcggaccaggtttgggaagcacttctgtggcggcaccctcatcagccctgagtgggtgctgacagctgcccactgcctgaagaagagcagccggcccagcagctacaaggtgatcctgggcgcccaccaggaggtgaacctggagagccacgtgcaggagattgaggtgtcccggctcttcctggagcccacccaggccgacatcgccctgctgaagctgagcaggcctgctgtgatcacagacaaggtgatgcctgcctgcctgcccagcccagactacatggtgacagccaggacagagtgctacatcaccggctggggcgagacccagggcaccttcggcaccggcctgctgaaggaggcccagctgctggtgattgaaaatgaggtgtgcaaccactacaagtacatctgtgccgagcacctggcccggggcacagacagctgccagggcgacagcggcggccccctggtgtgctttgagaaggacaagtacatcctgcagggcgtgacctcctggggcctgggctgtgcccggcccaacaagccaggagtgtatgcccgggtgtccagatttgtgacctggattgagggcatgatgaggaacaactag

SEQ ID NO: 157564 - DNA, 6414 bp, Artificial Sequence
  derived and/or modified sequence
ctgggattgggacacactttctgggcactgctggccagtcccaaaatggaacataaggaagtggttcttctacttcttttatttctgaaatcagcagcacctgagcaaagccatgtggtccaggattgctaccatggtgatggacagagttatcgaggcacgtactccaccactgtcacaggaaggacctgccaagcttggtcatctatgacaccacatcaacataataggaccacagaaaactacccaaatgctggcttgatcatgaactactgcaggaatccagatgctgtggcagctccttattgttatacgagggatcccggtgtcaggtgggagtactgcaacctgacgcaatgctcagacgcagaagggactgccgtcgcgcctccgactgttaccccggttccaagcctagaggctccttccgaacaagcaccgactgagcaaaggcctggggtgcaggagtgctaccatggtaatggacagagttatcgaggcacatactccaccactgtcacaggaagaacctgccaagcttggtcatctatgacaccacactcgcatagtcggaccccagaatactacccaaatgctggcttgatcatgaactactgcaggaatccagatgctgtggcagctccttattgttatacgagggatcccggtgtcaggtgggagtactgcaacctgacgcaatgctcagacgcagaagggactgccgtcgcgcctccgactgttaccccggttccaagcctagaggctccttccgaacaagcaccgactgagcaaaggcctggggtgcaggagtgctaccatggtaatggacagagttatcgaggcacatactccaccactgtcacaggaagaacctgccaagcttggtcatctatgacaccacactcgcatagtcggaccccagaatactacccaaatgctggcttgatcatgaactactgcaggaatccagatgctgtggcagctccttattgttatacgagggatcccggtgtcaggtgggagtactgcaacctgacgcaatgctcagacgcagaagggactgccgtcgcgcctccgactgttaccccggttccaagcctagaggctccttccgaacaagcaccgactgagcagaggcctggggtgcaggagtgctaccacggtaatggacagagttatcgaggcacatactccaccactgtcactggaagaacctgccaagcttggtcatctatgacaccacactcgcatagtcggaccccagaatactacccaaatgctggcttgatcatgaactactgcaggaatccagatgctgtggcagctccttattgttatacgagggatcccggtgtcaggtgggagtactgcaacctgacgcaatgctcagacgcagaagggactgccgtcgcgcctccgactgttaccccggttccaagcctagaggctccttccgaacaagcaccgactgagcaaaggcctggggtgcaggagtgctaccatggtaatggacagagttatcgaggcacatactccaccactgtcacaggaagaacctgccaagcttggtcatctatgacaccacactcgcatagtcggaccccagaatactacccaaatgctggcttgatcatgaactactgcaggaatccagatgctgtggcagctccttattgttatacgagggatcccggtgtcaggtgggagtactgcaacctgacgcaatgctcagacgcagaagggactgccgtcgcgcctccgactgttaccccggttccaagcctagaggctccttccgaacaagcaccgactgagcaaaggcctggggtgcaggagtgctaccatggtaatggacagagttatcgaggcacatactccaccactgtcacaggaagaacctgccaagcttggtcatctatgacaccacactcgcatagtcggaccccagaatactacccaaatgctggcttgatcatgaactactgcaggaatccagatgctgtggcagctccttattgttatacgagggatcccggtgtcaggtgggagtactgcaacctgacgcaatgctcagacgcagaagggactgccgtcgcgcctccgactgttaccccggttccaagcctagaggctccttccgaacaagcaccgactgagcaaaggcctggggtgcaggagtgctaccatggtaatggacagagttatcgaggcacatactccaccactgtcacaggaagaacctgccaagcttggtcatctatgacaccacactcgcatagtcggaccccagaatactacccaaatgctggcttgatcatgaactactgcaggaatccagatgctgtggcagctccttattgttatacgagggatcccggtgtcaggtgggagtactgcaacctgacgcaatgctcagacgcagaagggactgccgtcgcgcctccgactgttaccccggttccaagcctagaggctccttccgaacaagcaccgactgagcagaggcctggggtgcaggagtgctaccacggtaatggacagagttatcgaggcacatactccaccactgtcactggaagaacctgccaagcttggtcatctatgacaccacactcgcatagtcggaccccagaatactacccaaatgctggcttgatcatgaactactgcaggaatccagatcctgtggcagccccttattgttatacgagggatcccagtgtcaggtgggagtactgcaacctgacacaatgctcagacgcagaagggactgccgtcgcgcctccaactattaccccgattccaagcctagaggctccttctgaacaagcaccaactgagcaaaggcctggggtgcaggagtgctaccacggaaatggacagagttatcaaggcacatacttcattactgtcacaggaagaacctgccaagcttggtcatctatgacaccacactcgcatagtcggaccccagcatactacccaaatgctggcttgatcaagaactactgccgaaatccagatcctgtggcagccccttggtgttatacaacagatcccagtgtcaggtgggagtactgcaacctgacacgatgctcagatgcagaatggactgccttcgtccctccgaatgttattctggctccaagcctagaggctttttttgaacaagcactgactgaggaaacccccggggtacaggactgctactaccattatggacagagttaccgaggcacatactccaccactgtcacaggaagaacttgccaagcttggtcatctatgacaccacaccagcatagtcggaccccagaaaactacccaaatgctggcctgaccaggaactactgcaggaatccagatgctgagattcgcccttggtgttacaccatggatcccagtgtcaggtgggagtactgcaacctgacacaatgcctggtgacagaatcaagtgtccttgcaactctcacggtggtcccagatccaagcacagaggcttcttctgaagaagcaccaacggagcaaagccccggggtccaggattgctaccatggtgatggacagagttatcgaggctcattctctaccactgtcacaggaaggacatgtcagtcttggtcctctatgacaccacactggcatcagaggacaacagaatattatccaaatggtggcctgaccaggaactactgcaggaatccagatgctgagattagtccttggtgttataccatggatcccaatgtcagatgggagtactgcaacctgacacaatgtccagtgacagaatcaagtgtccttgcgacgtccacggctgtttctgaacaagcaccaacggagcaaagccccacagtccaggactgctaccatggtgatggacagagttatcgaggctcattctccaccactgttacaggaaggacatgtcagtcttggtcctctatgacaccacactggcatcagagaaccacagaatactacccaaatggtggcctgaccaggaactactgcaggaatccagatgctgagattcgcccttggtgttataccatggatcccagtgtcagatgggagtactgcaacctgacgcaatgtccagtgatggaatcaactctcctcacaactcccacggtggtcccagttccaagcacagagcttccttctgaagaagcaccaactgaaaacagcactggggtccaggactgctaccgaggtgatggacagagttatcgaggcacactctccaccactatcacaggaagaacatgtcagtcttggtcgtctatgacaccacattggcatcggaggatcccattatactatccaaatgctggcctgaccaggaactactgcaggaatccagatgctgagattcgcccttggtgttacaccatggatcccagtgtcaggtgggagtactgcaacctgacacgatgtccagtgacagaatcgagtgtcctcacaactcccacagtggccccggttccaagcacagaggctccttctgaacaagcaccacctgagaaaagccctgtggtccaggattgctaccatggtgatggacggagttatcgaggcatatcctccaccactgtcacaggaaggacctgtcaatcttggtcatctatgataccacactggcatcagaggaccccagaaaactacccaaatgctggcctgaccgagaactactgcaggaatccagattctgggaaacaaccctggtgttacacaaccgatccgtgtgtgaggtgggagtactgcaatctgacacaatgctcagaaacagaatcaggtgtcctagagactcccactgttgttccagttccaagcatggaggctcattctgaagcagcaccaactgagcaaacccctgtggtccggcagtgctaccatggtaatggccagagttatcgaggcacattctccaccactgtcacaggaaggacatgtcaatcttggtcatccatgacaccacaccggcatcagaggaccccagaaaactacccaaatgatggcctgacaatgaactactgcaggaatccagatgccgatacaggcccttggtgttttaccatggaccccagcatcaggtgggagtactgcaacctgacgcgatgctcagacacagaagggactgtggtcgctcctccgactgtcatccaggttccaagcctagggcctccttctgaacaagactgtatgtttgggaatgggaaaggataccggggcaagaaggcaaccactgttactgggacgccatgccaggaatgggctgcccaggagccccatagacacagcacgttcattccagggacaaataaatgggcaggtctggaaaaaaattactgccgtaaccctgatggtgacatcaatggtccctggtgctacacaatgaatccaagaaaactttttgactactgtgatatccctctctgtgcatcctcttcatttgattgtgggaagcctcaagtggagccgaagaaatgtcctggaagcattgtaggggggtgtgtggcccacccacattcctggccctggcaagtcagtctcagaacaaggtttggaaagcacttctgtggaggcaccttaatatccccagagtgggtgctgactgctgctcactgcttgaagaagtcctcaaggccttcatcctacaaggtcatcctgggtgcacaccaagaagtgaacctcgaatctcatgttcaggaaatagaagtgtctaggctgttcttggagcccacacaagcagatattgccttgctaaagctaagcaggcctgccgtcatcactgacaaagtaatgccagcttgtctgccatccccagactacatggtcaccgccaggactgaatgttacatcactggctggggagaaacccaaggtacctttgggactggccttctcaaggaagcccagctccttgttattgagaatgaagtgtgcaatcactataagtatatttgtgctgagcatttggccagaggcactgacagttgccagggtgacagtggagggcctctggtttgcttcgagaaggacaaatacattttacaaggagtcacttcttggggtcttggctgtgcacgccccaataagcctggtgtctatgctcgtgtttcaaggtttgttacttggattgagggaatgatgagaaataattaattggacgggagacagagtgaagcatcaacctacttagaagctgaaacgtgggtaaggatttagcatgctggaaataatagacagcaatcaaacgaagacactgttcccagctaccagctatgccaaaccttggcatttttggtatttttgtgtataagcttttaaggtctgactgacaaattctgtattaaggtgtcatagctatgacatttgttaaaaataaactctgcacttattttgatttga

SEQ ID NO: 157565 - DNA, 6490 bp, Artificial Sequence
  derived and/or modified sequence
aggtacctttggggctggctttctcaaggaagcccagctccctgtgattgagaatgaagtgtgcaatcgcaatgtcctgggattgggacacactttctgggcactgctggccagtcccaaaatggaacataaggaagtggttcttctacttcttttatttctgaaatcagcagcacctgagcaaagccatgtggtccaggattgctaccatggtgatggacagagttatcgaggcacgtactccaccactgtcacaggaaggacctgccaagcttggtcatctatgacaccacatcaacataataggaccacagaaaactacccaaatgctggcttgatcatgaactactgcaggaatccagatgctgtggcagctccttattgttatacgagggatcccggtgtcaggtgggagtactgcaacctgacgcaatgctcagacgcagaagggactgccgtcgcgcctccgactgttaccccggttccaagcctagaggctccttccgaacaagcaccgactgagcaaaggcctggggtgcaggagtgctaccatggtaatggacagagttatcgaggcacatactccaccactgtcacaggaagaacctgccaagcttggtcatctatgacaccacactcgcatagtcggaccccagaatactacccaaatgctggcttgatcatgaactactgcaggaatccagatgctgtggcagctccttattgttatacgagggatcccggtgtcaggtgggagtactgcaacctgacgcaatgctcagacgcagaagggactgccgtcgcgcctccgactgttaccccggttccaagcctagaggctccttccgaacaagcaccgactgagcaaaggcctggggtgcaggagtgctaccatggtaatggacagagttatcgaggcacatactccaccactgtcacaggaagaacctgccaagcttggtcatctatgacaccacactcgcatagtcggaccccagaatactacccaaatgctggcttgatcatgaactactgcaggaatccagatgctgtggcagctccttattgttatacgagggatcccggtgtcaggtgggagtactgcaacctgacgcaatgctcagacgcagaagggactgccgtcgcgcctccgactgttaccccggttccaagcctagaggctccttccgaacaagcaccgactgagcagaggcctggggtgcaggagtgctaccacggtaatggacagagttatcgaggcacatactccaccactgtcactggaagaacctgccaagcttggtcatctatgacaccacactcgcatagtcggaccccagaatactacccaaatgctggcttgatcatgaactactgcaggaatccagatgctgtggcagctccttattgttatacgagggatcccggtgtcaggtgggagtactgcaacctgacgcaatgctcagacgcagaagggactgccgtcgcgcctccgactgttaccccggttccaagcctagaggctccttccgaacaagcaccgactgagcaaaggcctggggtgcaggagtgctaccatggtaatggacagagttatcgaggcacatactccaccactgtcacaggaagaacctgccaagcttggtcatctatgacaccacactcgcatagtcggaccccagaatactacccaaatgctggcttgatcatgaactactgcaggaatccagatgctgtggcagctccttattgttatacgagggatcccggtgtcaggtgggagtactgcaacctgacgcaatgctcagacgcagaagggactgccgtcgcgcctccgactgttaccccggttccaagcctagaggctccttccgaacaagcaccgactgagcaaaggcctggggtgcaggagtgctaccatggtaatggacagagttatcgaggcacatactccaccactgtcacaggaagaacctgccaagcttggtcatctatgacaccacactcgcatagtcggaccccagaatactacccaaatgctggcttgatcatgaactactgcaggaatccagatgctgtggcagctccttattgttatacgagggatcccggtgtcaggtgggagtactgcaacctgacgcaatgctcagacgcagaagggactgccgtcgcgcctccgactgttaccccggttccaagcctagaggctccttccgaacaagcaccgactgagcaaaggcctggggtgcaggagtgctaccatggtaatggacagagttatcgaggcacatactccaccactgtcacaggaagaacctgccaagcttggtcatctatgacaccacactcgcatagtcggaccccagaatactacccaaatgctggcttgatcatgaactactgcaggaatccagatgctgtggcagctccttattgttatacgagggatcccggtgtcaggtgggagtactgcaacctgacgcaatgctcagacgcagaagggactgccgtcgcgcctccgactgttaccccggttccaagcctagaggctccttccgaacaagcaccgactgagcagaggcctggggtgcaggagtgctaccacggtaatggacagagttatcgaggcacatactccaccactgtcactggaagaacctgccaagcttggtcatctatgacaccacactcgcatagtcggaccccagaatactacccaaatgctggcttgatcatgaactactgcaggaatccagatcctgtggcagccccttattgttatacgagggatcccagtgtcaggtgggagtactgcaacctgacacaatgctcagacgcagaagggactgccgtcgcgcctccaactattaccccgattccaagcctagaggctccttctgaacaagcaccaactgagcaaaggcctggggtgcaggagtgctaccacggaaatggacagagttatcaaggcacatacttcattactgtcacaggaagaacctgccaagcttggtcatctatgacaccacactcgcatagtcggaccccagcatactacccaaatgctggcttgatcaagaactactgccgaaatccagatcctgtggcagccccttggtgttatacaacagatcccagtgtcaggtgggagtactgcaacctgacacgatgctcagatgcagaatggactgccttcgtccctccgaatgttattctggctccaagcctagaggctttttttgaacaagcactgactgaggaaacccccggggtacaggactgctactaccattatggacagagttaccgaggcacatactccaccactgtcacaggaagaacttgccaagcttggtcatctatgacaccacaccagcatagtcggaccccagaaaactacccaaatgctggcctgaccaggaactactgcaggaatccagatgctgagattcgcccttggtgttacaccatggatcccagtgtcaggtgggagtactgcaacctgacacaatgcctggtgacagaatcaagtgtccttgcaactctcacggtggtcccagatccaagcacagaggcttcttctgaagaagcaccaacggagcaaagccccggggtccaggattgctaccatggtgatggacagagttatcgaggctcattctctaccactgtcacaggaaggacatgtcagtcttggtcctctatgacaccacactggcatcagaggacaacagaatattatccaaatggtggcctgaccaggaactactgcaggaatccagatgctgagattagtccttggtgttataccatggatcccaatgtcagatgggagtactgcaacctgacacaatgtccagtgacagaatcaagtgtccttgcgacgtccacggctgtttctgaacaagcaccaacggagcaaagccccacagtccaggactgctaccatggtgatggacagagttatcgaggctcattctccaccactgttacaggaaggacatgtcagtcttggtcctctatgacaccacactggcatcagagaaccacagaatactacccaaatggtggcctgaccaggaactactgcaggaatccagatgctgagattcgcccttggtgttataccatggatcccagtgtcagatgggagtactgcaacctgacgcaatgtccagtgatggaatcaactctcctcacaactcccacggtggtcccagttccaagcacagagcttccttctgaagaagcaccaactgaaaacagcactggggtccaggactgctaccgaggtgatggacagagttatcgaggcacactctccaccactatcacaggaagaacatgtcagtcttggtcgtctatgacaccacattggcatcggaggatcccattatactatccaaatgctggcctgaccaggaactactgcaggaatccagatgctgagattcgcccttggtgttacaccatggatcccagtgtcaggtgggagtactgcaacctgacacgatgtccagtgacagaatcgagtgtcctcacaactcccacagtggccccggttccaagcacagaggctccttctgaacaagcaccacctgagaaaagccctgtggtccaggattgctaccatggtgatggacggagttatcgaggcatatcctccaccactgtcacaggaaggacctgtcaatcttggtcatctatgataccacactggcatcagaggaccccagaaaactacccaaatgctggcctgaccgagaactactgcaggaatccagattctgggaaacaaccctggtgttacacaaccgatccgtgtgtgaggtgggagtactgcaatctgacacaatgctcagaaacagaatcaggtgtcctagagactcccactgttgttccagttccaagcatggaggctcattctgaagcagcaccaactgagcaaacccctgtggtccggcagtgctaccatggtaatggccagagttatcgaggcacattctccaccactgtcacaggaaggacatgtcaatcttggtcatccatgacaccacaccggcatcagaggaccccagaaaactacccaaatgatggcctgacaatgaactactgcaggaatccagatgccgatacaggcccttggtgttttaccatggaccccagcatcaggtgggagtactgcaacctgacgcgatgctcagacacagaagggactgtggtcgctcctccgactgtcatccaggttccaagcctagggcctccttctgaacaagactgtatgtttgggaatgggaaaggataccggggcaagaaggcaaccactgttactgggacgccatgccaggaatgggctgcccaggagccccatagacacagcacgttcattccagggacaaataaatgggcaggtctggaaaaaaattactgccgtaaccctgatggtgacatcaatggtccctggtgctacacaatgaatccaagaaaactttttgactactgtgatatccctctctgtgcatcctcttcatttgattgtgggaagcctcaagtggagccgaagaaatgtcctggaagcattgtaggggggtgtgtggcccacccacattcctggccctggcaagtcagtctcagaacaaggtttggaaagcacttctgtggaggcaccttaatatccccagagtgggtgctgactgctgctcactgcttgaagaagtcctcaaggccttcatcctacaaggtcatcctgggtgcacaccaagaagtgaacctcgaatctcatgttcaggaaatagaagtgtctaggctgttcttggagcccacacaagcagatattgccttgctaaagctaagcaggcctgccgtcatcactgacaaagtaatgccagcttgtctgccatccccagactacatggtcaccgccaggactgaatgttacatcactggctggggagaaacccaaggtacctttgggactggccttctcaaggaagcccagctccttgttattgagaatgaagtgtgcaatcactataagtatatttgtgctgagcatttggccagaggcactgacagttgccagggtgacagtggagggcctctggtttgcttcgagaaggacaaatacattttacaaggagtcacttcttggggtcttggctgtgcacgccccaataagcctggtgtctatgctcgtgtttcaaggtttgttacttggattgagggaatgatgagaaataattaattggacgggagacagagtgaagcatcaacctacttagaagctgaaacgtgggtaaggatttagcatgctggaaataatagacagcaatcaaacgaagacactgttcccagctaccagctatgccaaaccttggcatttttggtatttttgtgtataagcttttaaggtctgactgacaaattctgtattaaggtgtcatagctatgacatttgttaaaaataaactctgcacttattttgatttga

SEQ ID NO: 157566 - DNA, 6123 bp, Artificial Sequence
  derived and/or modified sequence
atggagcacaaggaggtggtgctgctgctgctgctgttcctgaagtccgcagccccagagcaaagccacgtggttcaggactgttatcatggcgacggtcagtcctaccgcggcacatactctaccactgtgacggggaggacctgtcaggcatggtccagcatgaccccacaccaacacaatcgaacgactgagaattaccccaatgctggcttaatcatgaactactgtcgtaatcccgatgccgtggcagcaccttattgttatacccgcgaccctggggttcggtgggagtattgcaacctgacacagtgtagcgacgccgagggcactgccgtggcgccacctaccgtgactccggtcccaagcctggaagcgccgagtgaacaggcgcccactgagcaaagaccaggagtgcaggagtgttatcatggaaatggacagtcataccggggtacttattccaccacggtcaccggacggacttgtcaggcttggtcgagcatgaccccccacagtcattctcggacccctgagtactatcccaacgcagggctcataatgaattactgcaggaatccggatgccgtagccgccccatactgctacacaagggaccctggggtgcggtgggaatactgtaacctgacccagtgctccgacgccgaaggaacagctgtagctcccccaacagtgacacccgtgccgagtttagaagccccctcggaacaagctccaactgagcagcgaccaggcgtccaagagtgttatcacggaaacggccagtcctacaggggaacttactcaaccacggttaccggccgaacgtgccaggcatggtctagtatgaccccccacagccatagtcgcaccccagaatattaccctaacgccggtctgataatgaattattgcaggaacccggatgccgtggcagctccgtactgttacaccagagaccctggcgtgcgctgggagtattgcaaccttacccagtgtagcgatgctgaagggaccgccgtagcccctcccactgttacacccgtgccctctctcgaggccccatctgagcaggctcctactgagcagcggccgggcgtccaggagtgttaccacggaaatggacaatcatatcgaggcacttactccacaacagtaacgggccggacctgtcaggcctggtcaagcatgacacctcactcacactcccggactcctgagtattatccaaatgcgggactgattatgaattactgccggaatcctgatgcggttgctgccccatattgttacactagggacccaggcgtgaggtgggaatattgcaatttgacccagtgtagcgatgctgagggcaccgcggtggcacctccgacagtgacccctgtcccaagtctggaagcaccatccgagcaggcccccacggagcagaggccaggagtccaggagtgctaccacgggaatggccaaagttacagggggacctattctaccaccgtgacaggacgaacctgccaagcctggagctcaatgactccccattcccactcgagaacgcctgagtattatccaaacgcagggctgataatgaattattgtcgcaatccagatgcggtggcggccccttactgttacacacgggatccaggtgtacggtgggagtattgtaacttgactcagtgttcagacgctgagggcaccgccgtcgcaccacccactgttacccctgtcccaagtcttgaggcgccaagtgaacaggcccccacggagcagaggccgggcgtgcaggaatgctatcatgggaacggccagagctaccgcggcacctactctaccaccgtaacaggcaggacatgtcaggcttggtcctctatgacacctcacagtcacagccgaactccagagtactatcccaacgcaggcctcatcatgaattactgccggaaccctgatgctgtggcggccccatattgctacacaagagaccccggggtcagatgggaatattgcaacctgacccagtgctccgatgctgaaggtactgccgtggccccacccacggtcacaccagtgccttcattggaggcgccgtctgagcaggccccaaccgaacagcgccccggcgtgcaggagtgttatcatggaaacggacagtcctataggggtacatacagtactaccgtgacagggcgcacatgccaagcatggtcttccatgaccccgcatagtcacagccgcacacctgaatattatcccaatgccggcctgataatgaactattgtagaaacccagacgccgtggccgccccttattgttatacgagagatccaggcgtgagatgggagtattgcaacctgactcagtgcagcgacgccgaaggaaccgccgtggcccccccaacagttacacctgtgccatccttggaggccccatccgaacaggctcccacagagcagaggccaggagttcaggagtgttatcacgggaacggccagtcatatcgaggcacctacagcaccacagtcacgggaagaacctgtcaggcgtggagctctatgacccctcactctcattccagaacaccagaatattatcctaacgcgggcctgattatgaattactgcaggaatcctgatcccgtggctgccccctactgctatacccgagatcctagcgtgcggtgggagtattgcaatcttactcaatgttcagatgcggaaggcaccgcagtcgctccccccactataacaccgataccctcactagaggcaccctctgaacaggcgcccaccgagcagcgcccaggggtgcaggagtgttatcacggtaatgggcaatcataccagggtacatacttcatcacagtcacaggcagaacatgtcaggcttggtcctctatgactccacattcacactctcggacaccagcatactatcctaatgcaggcctgatcaagaactattgcaggaacccagatcccgtggcggcgccatggtgctacacaacagatccctcagtaaggtgggagtactgtaacctcacccggtgcagtgacgcggagtggactgcatttgtgcctcccaatgttatcctcgctccatccctggaagctttctttgagcaggctctaaccgaagagaccccgggggtgcaggactgctactatcactacggccagtcttatcgaggaacgtactctacaacagtgaccggacgcacatgtcaggcttggagttctatgacgccacaccagcacagcaggaccccggagaattatcctaacgcgggccttacccgtaattattgccggaatcccgatgccgaaatccgaccatggtgctacacaatggacccttcggttagatgggagtactgcaatctgacgcagtgtctcgtgacagagtcatccgtgcttgccaccctcaccgtggtccctgacccatctacagaggcgagttctgaggaagcacccacagagcaaagccctggcgtccaagactgttatcacggcgacgggcagagttatcggggttccttcagtacgactgttaccggaagaacctgtcaaagctggtcatccatgaccccgcactggcaccagagaaccacagaatactacccaaatgggggtctgacgagaaattactgtaggaatcctgacgctgaaatatccccctggtgctataccatggaccccaatgtacgctgggagtactgtaacctgacgcagtgcccagttacagagtcgagtgtcttggcgacaagcacggcagtgagtgaacaagcaccaaccgaacaaagccccacagtgcaggactgttaccatggggacggccagtcctatcgtgggagtttcagtacgacagtgacaggccgcacctgtcagagctggtcaagtatgacaccccactggcatcagaggaccaccgagtactaccctaacggtggcctcaccaggaactattgccgtaatcccgacgccgagatccggccctggtgctacacaatggacccttctgttaggtgggagtactgcaatttgacacagtgccctgttatggagtccactttgctgaccacgcctactgtggtgccagtgccttcaaccgagttgcccagtgaggaggcacctacagagaatagcacaggagtccaagactgttataggggggacggccagtcctaccgtggcacgctgtcaaccacgattaccggtaggacctgtcaaagctggagctccatgacacctcactggcacaggcgaatcccattatactatccgaatgcaggcttgactaggaactattgtcggaatccagacgccgagatccgcccatggtgctacacaatggatccttctgtaaggtgggagtattgcaacttaaccaggtgcccggtcactgaatcaagcgtgttgactaccccgacggtggctccagttccgtcaacagaggcccctagcgagcaggcaccacctgaaaaaagccccgtcgtccaggattgttatcatggtgacgggcgtagttacagaggcatctcctcgacaactgtaacaggcaggacctgccagagctggagttcgatgatccctcattggcaccagagaactcccgagaattaccctaatgccggtctaactgagaattactgcagaaacccggacagcggaaagcagccctggtgctacactacggatccctgcgtgcgatgggagtactgtaatctcacccaatgctctgagaccgagagcggcgtgctggagactccgaccgtggtcccagttccttccatggaggctcactctgaggcagctccaacagagcaaactcctgtcgtgcggcagtgctaccacggcaacggacaaagttacagagggacttttagtaccaccgtaactggcagaacttgtcaaagctggtcctccatgaccccacaccggcatcagaggactcctgagaattatcccaacgacggactgacgatgaactactgcaggaacccagatgccgataccggaccctggtgttttacgatggacccctccattcgctgggagtactgcaatttgacgcgctgttctgacacagagggcacagtcgtcgccccacctactgtgattcaagtccccagcctgggtcccccatccgagcaagattgcatgtttggaaatgggaaaggctaccgcggtaaaaaggcaactactgttacggggaccccatgtcaggagtgggccgctcaggaaccacatcggcactcaacctttattccagggaccaataaatgggccggactcgaaaagaactattgtcgtaaccccgatggagatatcaacggtccttggtgttacaccatgaaccctaggaagctgtttgactactgtgatatccctctctgcgcctcgtcatcttttgattgcgggaagccacaggttgaaccaaaaaagtgtccaggctctattgtcggcggttgcgtggctcacccccacagctggccttggcaggttagcttacggacgagatttggaaaacacttttgcggagggacactcatatcgcctgagtgggtgctgacggctgctcattgcctcaagaagtcaagccggccaagctcttacaaggtaatcttgggggcccaccaggaggtgaacctggaatcccacgtacaggaaattgaggtgagccgtctgttccttgaacctacacaggccgacatcgcattgcttaagctgtctagacccgcagtgattacagacaaggtgatgcccgcctgtctcccctctcccgactatatggttaccgcaagaaccgaatgctacatcactggatggggcgagactcaggggaccttcggtaccggcctactgaaagaggcccagctgctggtgattgagaatgaagtatgtaaccactataagtacatttgtgcggaacacctcgcacgaggtactgatagctgtcagggagactccggaggccccctggtatgttttgaaaaggataaatacattctgcaaggcgttactagctgggggttggggtgcgcgcggcccaataaacctggcgtgtatgcccgcgtctctcgctttgtgacctggattgagggcatgatgagaaacaactag

SEQ ID NO: 157567 - DNA, 6123 bp, Artificial Sequence
  derived and/or modified sequence
atggagcacaaggaggtggtgctgctgctgctgctgttcctgaagtcggcggccccggagcagtcacacgtggttcaggattgctatcatggcgatggccagagttataggggcacgtatagcactactgtgaccggccggacctgtcaggcctggtcttctatgacccctcaccagcataaccggactacggaaaattacccgaacgcaggattgataatgaactactgccgtaatcccgatgctgtcgccgccccctactgctatacaagagacccaggggtgagatgggagtactgcaatctgactcaatgttcggatgcggaaggtacggccgtggcccccccgaccgtaacacctgtaccatccctcgaagcccccagcgagcaggcgccgaccgaacagcgacccggcgtgcaggaatgctatcacggtaatggccagtcataccggggaacatactctacaacggtcactgggcgtacatgccaggcctggagctccatgactccacattcccacagccggacacccgaatactaccccaacgctggactgattatgaactactgcaggaatccagatgctgtcgccgcgccctattgctatacgagggaccccggagtcaggtgggagtattgcaatctgactcagtgctccgatgcggaggggactgcagtggctcctccaaccgtcacccctgtcccaagcctagaggctcccagtgagcaagcgcctaccgagcagcgacccggagtgcaggagtgttaccacggaaatggtcaatcttatagagggacatactccaccaccgtcaccggtagaacatgccaggcctggtctagcatgacccctcacagccacagccggacacccgaatattaccccaatgctggcttaattatgaattattgtaggaatccagacgctgtggccgcaccatattgttatactagggaccctggggttcgatgggaatactgcaacctcacacagtgttccgacgcggaaggcaccgctgtggcgccccccactgtgacaccggtgccatctctcgaagctccatctgagcaggctcctaccgagcagcgacctggcgtgcaggagtgctaccacggcaatggccagagctacaggggaacgtattccaccacagtcaccgggagaacctgccaagcctggtccagcatgacaccacattctcactctagaacccctgaatactaccccaacgccgggctgattatgaattattgccgcaaccctgacgctgttgctgcaccctactgttacactagggacccgggagtacgatgggagtattgtaatctgacacaatgctctgacgctgagggaaccgccgtcgctcccccaaccgtgaccccagtgcctagtttagaggcaccttccgaacaggccccaactgagcagaggccgggcgtacaggaatgctaccatggcaatgggcagtcatatagagggacttacagcacaaccgtcacaggcagaacatgccaggcctggtcatccatgaccccccactcacacagccgcacacctgagtactaccccaacgccggcctgattatgaactattgtcggaatcctgatgcggtggccgctccctactgctacactagagatcctggagtgaggtgggaatactgtaatcttacccaatgttctgacgcggaggggacagccgtggctccacccaccgtaacacccgtaccatcacttgaggccccctctgagcaggctcctaccgagcagcggccaggagtgcaggagtgttaccatgggaatggccagtcatatagaggcacctattcaactactgtgactgggcgcacttgtcaggcctggtcgtcgatgactccccatagccatagccggactccggagtattacccaaacgccggactaattatgaattattgtcggaacccagatgctgttgcagccccctattgttatactagagacccaggagtgcgttgggaatattgcaacttgacgcagtgctcggacgccgaggggaccgctgtcgctcctcccacagttacacccgtgccatctctcgaagctcctagtgagcaggcccccaccgaacagaggcccggggtgcaagaatgctatcatggtaacgggcagtcgtaccggggcacctacagcacaaccgtgactggcagaacttgccaggcgtggagctctatgacacctcacagccatagtcgcactccagaatattaccctaatgcgggcctcattatgaattactgtcgtaatcccgacgctgtcgctgctccctactgctatacccgagatccgggcgtgcgctgggaatattgcaaccttactcaatgctctgatgccgagggtaccgcagtggccccaccgaccgtgacccccgtaccctcgttggaagcccctagcgagcaggcgccaactgagcagcgtccgggtgttcaggaatgttaccacggaaatggacaatcgtaccgggggacttacagcaccacagttaccggtcgcacgtgtcaggcctggtcttcaatgaccccacattctcacagcaggacacctgaatactatccaaatgcaggactgataatgaactattgccggaacccggatccagttgcagcgccatattgctacactagagacccctcagtcagatgggaatactgcaacctgacccagtgctccgacgctgaaggtacagcggtcgcaccaccaactattaccccgattccatccctggaggcgccctccgagcaggcacccacggagcagcgtcccggggtgcaggagtgttaccatggcaatggccaatcctaccagggaacctactttattactgtgactgggagaacatgccaagcttggagtagcatgaccccgcatagccattccaggaccccggcctattatcccaacgccggcctcattaagaattactgtagaaatcctgatccagtggctgctccttggtgttatactacagatccaagcgtcagatgggagtattgcaacctaacaaggtgctctgatgccgaatggacagcttttgtgccccccaacgtgatcttggcaccatccctcgaggccttctttgaacaagccctcaccgaggagactccaggggtacaggattgctactaccactatggacagtcttaccgcgggacatacagtactacagttacaggcaggacctgtcaggcgtggtcttctatgacgccccatcagcattctagaacacccgagaattatcccaatgccggcctgactcgcaactactgccgaaacccagatgctgaaatccgaccatggtgttataccatggacccctcggtccgctgggagtactgcaacctaacacagtgtctagtgactgaaagtagtgttctcgccacactgacggtggtgcctgacccctccacggaagcctcctctgaggaagcccccaccgagcagtccccgggggtgcaggactgttaccatggggacgggcagagttacaggggaagctttagtacaaccgtcaccgggcggacttgccagtcttggagctctatgactcctcattggcaccagagaactaccgagtattatccaaacgggggcctgacccgtaattactgtcggaacccagatgccgagatctctccctggtgctacactatggaccccaacgtgcggtgggagtattgtaatctgacacaatgcccagtgactgagagttcagtcctggccacctctaccgccgtgtctgaacaggcacccacggaacaaagcccaacagttcaggactgctaccatggtgatggccagagctatcgagggtctttttctactacagtgacagggcgcacctgccaatcctggtcttctatgactccacattggcatcagcgtactaccgagtactaccccaatggcggactcaccaggaattactgtagaaacccggacgcggagatcagaccttggtgttacacaatggatccaagtgtccggtgggagtattgcaatctaacccagtgtccagtgatggagtcaaccttgctaacgacaccgacagtggtgcctgttccgtccacagagttgccttctgaggaagcccccaccgaaaattcgaccggggtgcaggattgttaccggggcgatggccagtcttaccgggggaccttatctacaactataaccggtagaacttgtcaatcctggtctagtatgaccccacactggcacagaaggatacctctgtactacccaaacgcggggcttacgaggaattattgccgaaatccagacgctgagattaggccttggtgctacacaatggaccccagtgtgcgctgggagtattgcaacctgacaaggtgcccagttactgaaagtagtgtactgacaaccccaactgttgctccagtgccatctactgaggccccttccgagcaggcaccacccgaaaagtcacccgtggtacaggactgctatcatggtgatggacgtagttatcgcggcataagctccacaacggtgacagggagaacctgtcagagttggagctccatgatacctcactggcaccagaggactccagaaaactacccgaacgccggtttgacagagaactactgtcgcaaccctgattccggcaaacaaccatggtgttacacaacggacccttgtgtgaggtgggagtattgtaatttgactcagtgcagtgagacggagtccggagtgctggagacacctactgtcgtacccgtcccttccatggaggctcatagcgaagctgctcctacggagcagactcctgtggtgcgtcagtgctatcatgggaatggacagtcctatcgcgggacattttctacaaccgtgacgggtcgtacctgtcaatcgtggagttccatgacgccccacagacatcagcggacccctgaaaactacccgaatgacggcctcactatgaattattgtaggaatccagacgctgatactggaccttggtgctttaccatggatccttccatccggtgggagtattgcaatttgactcgatgttccgacaccgagggaaccgtggtggctccacctacagtgattcaagtcccctccttggggccaccttctgagcaggactgtatgttcggaaacggaaaggggtatcgcggtaagaaagccacaactgtgactggcaccccttgtcaggagtgggccgctcaagagccccacagacatagtacgttcattcccggcacaaacaagtgggccggactggaaaaaaattattgtcgaaacccggacggggatatcaatggtccctggtgctatacgatgaaccctcgaaagctctttgattactgcgacattcctctgtgcgctagcagcagcttcgattgtgggaaaccccaagtggagcccaagaagtgccctggtagcatcgtgggcggatgcgtggctcatccacactcgtggccatggcaggtatccttacgaacacgcttcggaaaacacttctgtgggggaacgctgatttctcccgagtgggtccttacggctgcacattgtttgaagaagagcagccgcccaagcagctataaggtgattctcggagcgcaccaggaggtcaacttagagtcgcatgtccaggagatcgaggtttctaggctttttctcgagcctactcaagccgatatcgcattgcttaagctgagtcgcccggcagtcataacagataaggtcatgcccgcatgcctgcccagtcccgattacatggtgaccgcccgtaccgaatgctatatcacaggatggggagagacccagggcacgtttggcactggtctgcttaaagaagcccagttattagtcattgaaaacgaggtctgcaatcattacaagtatatatgcgccgagcatctcgcacgcggcacggattcgtgtcagggggacagtggaggtcctttggtgtgcttcgagaaggataagtacattctgcaaggggtgacttcttggggactcggttgcgcacgcccgaacaaacctggcgtgtacgcccgcgtatcccgtttcgtcacatggatcgaaggcatgatgagaaataattag

SEQ ID NO: 157568 - DNA, 6122 bp, Artificial Sequence
  derived and/or modified sequence
atggagcacaaggaggtggtactgctgcttttgctgtttctaaagtccgcagccccagaacagtcgcacgtggtgcaagactgttatcatggcgacggccagtcgtatcggggtacctactccaccacagtgaccgggcgtacctgccaagcctggagtagcatgacgccccatcaacacaatcgcaccaccgaaaattatcctaatgccggacttatcatgaactactgtcggaaccccgacgcggtggctgcaccttattgttatacaagagaccccggagtgagatgggaatattgcaacttgacccaatgctctgacgcagagggaactgctgtcgcgccacctacggtgacacctgtccccagcctggaagctcctagcgaacaggcccctacagaacaacgccctggagttcaggagtgctatcatgggaatggacaatcttataggggtacctactctactactgttaccggtaggacctgtcaggcatggtcaagtatgacgccccattcccattcaaggactccggaatactaccctaatgccggactgatcatgaactactgccggaatccagacgctgtcgcggctccttactgttatactcgcgaccccggagtgagatgggagtattgtaacctcacccagtgttccgatgccgagggaacagccgttgcaccacccaccgtgacccccgtgccgagcctagaagcccctagtgagcaagcacccaccgagcagcgcccaggggttcaagagtgttaccatggaaatggacaatcctaccgtggaacatattccacaacagtgactgggcgaacatgtcaggcctggtcctcaatgactccacatagtcactcccgtacccccgaatattacccgaacgctggcttgataatgaactattgcaggaaccctgatgcagttgccgcaccttactgctatactcgggaccccggagtgcggtgggaatactgtaacctcactcagtgctctgacgccgaagggacagctgtagcaccaccgacagttaccccggtgccctctctcgaagctccctccgagcaggcaccaaccgagcagcgcccaggcgtgcaggagtgttatcatggaaacggccagtcgtatcgcggaacttacagcacaactgtcacaggtcgtacctgccaagcctggagttccatgacgccacatagccattcccgaacccctgaatattatccaaacgccggtcttattatgaactactgcaggaatccagacgcggtcgccgcaccatactgttacacaagagatcctggagtgagatgggaatactgtaacttgacccagtgttccgatgcggaagggacagccgttgcgccacccaccgttaccccagttccaagcctggaggcgccatcagagcaggcccctactgagcagcgtccaggtgtccaggaatgctaccacggtaatggccaatcatatcggggaacttattcaaccaccgtgactggaagaacatgccaggcctggagctcgatgacacctcacagccacagccgtacccctgaatattatcccaacgccggtctcatcatgaattactgtagaaatccagatgccgtcgcagccccatactgctatactagggatccgggagtgaggtgggagtactgtaacctgacacaatgtagcgatgctgagggaactgccgtggcccctcccactgtgacacccgttccctcccttgaggcccctagcgaacaagccccaacagagcagcgccctggtgtacaagaatgctatcatgggaatgggcagtcgtacagagggacgtacagcaccacagtcaccgggaggacgtgccaggcatggtcttctatgacaccccattcacattcaagaacgcctgaatactacccaaacgcgggacttattatgaactactgcaggaaccccgacgcagttgctgcgccttattgctacactagagatccaggcgttaggtgggagtattgcaatctgactcaatgctctgacgccgaggggacggctgtggcgccacccaccgtgacccccgtgccatcgctggaggctccatccgagcaggcaccaactgagcaaaggcccggagtccaggagtgttatcatggtaacggacagagctatcgaggtacctattctacaactgtgaccggacgaacctgtcaggcctggtcctctatgacacctcactcccactcacgcaccccggagtattatccgaacgcaggcctcattatgaattactgtagaaaccccgatgctgtagcagcgccatactgctacacacgggacccaggggtgcggtgggagtactgcaacttgacgcagtgctcggacgccgagggcacagctgtcgccccacctactgtgactcctgtgccctcgttggaggctcccagcgagcaagcacccaccgagcaacggccaggagtccaggaatgctaccatggcaacggccagtcgtatcggggaacctattccaccaccgttactggccgtacgtgtcaagcctggtcaagtatgacaccccacagccactctagaacaccagagtactatccgaatgccggactgataatgaactactgcagaaatccagaccccgtggcagcaccatactgttacactcgcgatccaagcgtgcgctgggaatactgtaatctgactcagtgttcagatgctgaagggacagctgtcgcgcctccgacaataaccccaatcccctcactggaggctccttctgaacaggcacctacagagcagcgcccaggtgtgcaggaatgctaccacggtaatggacagtcttaccaagggacctactttatcaccgtgaccgggaggacgtgtcaggcctggtcgagtatgacgcctcactctcattcacggacgccagcatattatcctaatgccggactgattaaaaattactgtcgcaatcccgatcctgtagccgcaccctggtgctatactactgacccctccgtacgctgggagtactgtaacctcacacgctgttccgatgccgagtggactgcattcgtgccccctaatgtcatcctcgcgccttctctggaagcatttttcgaacaggcccttactgaagagacccctggggtgcaggactgctactaccattatggccagagctatcgaggaacctacagcacaacagtgacaggtcggacctgccaggcttggtcttctatgacgccgcaccaacacagcaggacacccgagaattatcccaacgctggcttgactcgaaactactgtcgaaatcccgatgccgagattcgcccttggtgctacaccatggacccatctgtacgctgggagtattgtaacctaacccagtgcttggtgaccgaatcgtccgttctcgctacactgactgtggtacccgacccgtccaccgaagcctcgtcagaagaagcaccaactgaacagtcccctggggtgcaggactgctatcatggtgacggacaatcctatcggggttcattctcaaccaccgtgacaggccgaacctgccagtcatggtccagtatgacaccccactggcatcagagaactaccgagtattaccccaacggaggtctcacacgtaattattgccgtaaccctgacgccgaaatcagtccatggtgttacacaatggaccctaacgtgcgttgggagtactgtaacttgactcagtgcccagtgacagaatctagcgtgcttgcgacatctacagctgtttccgagcaagccccaaccgaacaatcacccactgtacaggattgctaccacggtgatggacaaagttaccggggttcgtttagtactacggtaacgggcagaacatgccagagctggtcttcaatgactcctcattggcatcagaggacaacggagtattaccctaacggcggactgacgaggaactactgccgcaatcccgacgccgagattaggccatggtgttacacaatggatccttctgtgagatgggagtactgcaacctgacacagtgcccagtgatggaaagcacacttctgacaacaccaactgtcgttcctgttccaagtacggaattgcctagcgaggaagcgccaaccgagaacagcacaggcgttcaagattgctacaggggtgacggtcagagttaccgtgggaccctctccaccactataacagggcgtacgtgtcaatcctggagtagtatgactccgcactggcacaggaggattccgctctactatccaaatgcgggtctgactcgcaattactgtcggaacccggatgccgaaattcgtccttggtgctacacgatggaccccagcgtccgctgggaatattgtaatctcaccaggtgccccgtcactgaatcttccgtgctcaccaccccgacagttgccccagttccttcaaccgaagccccaagcgagcaagcgccacctgaaaagtccccagtcgtgcaggactgctatcacggagatggtaggtcttatagagggatttccagcactacagtgaccggaaggacctgccaatcctggtcatctatgatacctcactggcatcagcggactccggagaactatccaaacgcaggactcaccgagaattactgcaggaacccagattccggaaagcagccctggtgttacacaacggatccttgcgtgaggtgggagtactgcaacctgacccagtgtagcgaaacagagagcggcgtactcgagactcccaccgtcgtccctgttccttctatggaggctcatagtgaggcagcaccaaccgagcagactcctgttgtccgccaatgctatcatggcaatggacagtcatataggggcaccttttcgaccacagtcacaggcaggacttgtcagtcttggtccagtatgacaccccaccggcatcaacggacccccgaaaattatcctaatgacgggctgaccatgaattactgccgaaatcccgacgccgacacaggtccctggtgttttaccatggatccatctatacgctgggagtactgtaacctgacccggtgctccgacaccgaaggcaccgtcgtggctccgcctacagttattcaggttccaagtctcggcccaccaagcgagcaagactgtatgtttgggaatggtaaaggctacagagggaagaaggcaaccaccgttaccggtacaccttgccaagagtgggccgctcaggaaccacaccggcattctactttcatccctggaactaataaatgggctgggctggagaagaattactgtcgcaaccctgacggcgacatcaatggtccatggtgttataccatgaacccacgcaagttgttcgattattgtgacattcccctatgcgcaagcagcagctttgactgcggaaagccacaggtggaaccaaaaaaatgccctgggtctatagtgggtggctgtgtggctcatcctcacagttggccctggcaggtaagtttaagaacccggttcggtaaacacttctgtggtggaacactgatctctcctgagtgggtgctgacagctgcccactgtcttaagaaatcttcccggccaagctcatataaagtgattctcggggcacaccaagaagttaatctggagtcacacgtccaggaaatcgaggttagccgactattcctcgagccaacccaggccgacatcgccttgctcaaacttagtagacccgcagtcataaccgataaagtcatgcccgcatgcctccctagcccagattatatggttacagcgaggactgaatgttatatcaccggttggggggaaacacaggggacatttggtactggcctcttgaaagaagcccagcttctggtgatcgaaaatgaagtttgtaatcattacaagtatatatgcgccgagcatctcgcccgtggcaccgatagctgccagggcgattccgggggaccattagtctgttttgagaaggacaagtacatactccagggagtcactagctgggggttgggatgtgccaggcctaacaagccgggagtgtacgcacgggtgagccgctttgtgacatggattgaggggatgatgcgcaataacta

SEQ ID NO: 157569 - DNA, 6122 bp, Artificial Sequence
  derived and/or modified sequence
atggaacacaaggaagtcgtgttgctgttgctgctcttcctcaaaagtgctgccccagagcagtcacatgtggtccaggattgttaccacggcgatggccagtcctaccggggaacatatagcacaactgttaccggaaggacatgtcaggcttggtcgtccatgacacctcaccagcacaatagaactaccgaaaattacccaaatgccggactgatcatgaactactgtaggaatccagatgccgtcgctgccccttattgttacacccgggatcccggagttcggtgggaatactgcaacctcacgcagtgttcagacgcagagggtaccgctgttgcccctcccacggtgacgcctgtcccctcattggaggctccaagtgagcaggcgccaacagaacagaggcccggtgtccaggaatgctaccacggaaacggccagtcataccgaggcacatactcaacgactgtcacgggacgcacctgccaagcctggagttccatgactccacactcccatagccgaacacctgagtactaccccaacgctgggttgatcatgaattactgccgtaatccagacgctgtggccgctccatattgttatactcgggaccccggagtccggtgggagtattgtaacctcacgcagtgctccgacgcagagggaacggccgtagccccaccgacagtgacaccagttccatcactggaggccccatcagaacaggcaccaactgagcagagacccggagtacaggagtgctatcatggaaacgggcagtcttaccggggaacttacagtacaactgttacaggaaggacatgccaagcctggagttccatgactccccactcccactctagaacacctgagtattacccgaatgcgggactgataatgaactactgtcggaaccctgatgccgttgccgcaccctactgctatacaagggatcccggtgtacgctgggagtactgcaatttaacgcagtgttccgacgcggaagggacagcagtcgccccaccaactgtgaccccggtcccttcactcgaagccccttcagaacaggcacctacagagcaacggcctggtgtgcaggagtgctatcacggaaatggccaaagctaccggggaacctactccaccactgtcacagggagaacttgccaggcttggtccagtatgactccacattctcatagccgaacacccgagtattatcccaacgccggtctgattatgaattattgccggaacccagacgctgtggccgctccatactgctatacacgtgacccaggagtccggtgggagtattgtaacctgacacagtgtagcgacgcagaaggaacggccgtggctcccccaacagtgacacctgtgccctcactggaggctcctagcgagcaagcccctaccgaacagcggccaggagtccaggagtgctatcacggaaatggacaaagttatagaggaacttacagcacgacggtgactgggaggacttgccaagcctggagttcaatgactccacattcccacagcagaacccccgagtactacccaaacgccggactgatcatgaattattgtcggaatcctgacgctgtggcagccccatattgttacactagggacccgggagtgcggtgggagtactgcaacctgacacagtgtagcgacgcagaaggcaccgccgtagcccctcccaccgtgacccctgtcccatctctggaagctccatccgaacaggctccaactgaacagaggcccggagtacaggagtgctaccacggtaacggacagtcttacagaggtacgtactccaccacagtgaccggcaggacttgccaggcttggtcctccatgactcctcactctcattcccgcaccccagagtactacccaaacgctggcctgatcatgaattactgccgcaatcctgacgccgtggctgctccatattgttacacaagagatcctggggtgcgatgggagtactgtaacctgacccagtgctctgatgccgagggtactgccgtggcacccccaacagtgacccccgttccaagcctggaagcacccagcgagcaggcccctacagagcagcgacctggggtgcaggagtgctatcacgggaatgggcagagctacagaggaacctatagtactaccgtaactggccgtacctgccaggcctggagtagcatgacaccccacagccatagtcggaccccagagtactaccccaacgccggactaattatgaactactgtagaaatccagatgccgtggcggctccttactgttacacacgggacccaggtgtgcggtgggagtactgcaatctcacgcaatgctcagatgccgaaggtaccgctgtggcccctcctacagtaacaccagtgccctctctggaagctccatctgaacaggctcccactgaacagagacccggagttcaggaatgttatcatggtaacgggcagagttacagaggcacctatagtactactgtcacagggagaacctgccaggcttggagctccatgaccccacactctcactcacgcacgcccgagtactaccctaatgccggtcttattatgaactactgcagaaatcccgacccagtggcggcaccatattgctacacccgcgaccctagcgtccggtgggaatactgtaacttaacacagtgttctgatgccgaaggtaccgcagttgcccctcctacaatcaccccgattcccagtctggaggccccttcggagcaggcccctactgagcaacgccctggcgttcaggaatgctaccacggaaacggccaatcctaccaggggacctactttatcacagtcaccggaagaacatgccaggcatggagctcaatgactccgcattcccactcccgcacgccggcatactaccccaacgcgggtctgattaaaaactactgtagaaatccagacccagtcgcagcaccttggtgttacacaactgacccttccgtcagatgggagtactgcaatttgactaggtgttctgatgcagaatggactgcgttcgtgcctcctaacgtgattttggctccttcacttgaggccttctttgaacaggcccttacggaagaaacccctggagttcaggattgctactatcattacggtcaatcttaccgcggtacatacagcactactgtcactggaagaacttgtcaagcatggtcatccatgacccctcaccaacactcccggacccctgagaactacccaaacgctgggctgacccgaaattattgccgcaaccccgatgctgaaatccgaccctggtgctacaccatggatcctagtgtaaggtgggaatattgcaacctgacgcagtgcctggttactgagtcgtccgtactggctacattgactgttgtacccgatccgtcgactgaggctagttcggaagaggctccaactgaacagagcccaggggttcaggattgttatcatggtgatggccaaagctatcgaggctccttctccacaactgtcaccggcaggacttgtcaatcgtggtctagcatgaccccccactggcatcagaggacgaccgagtactacccaaatggcggactgacccgcaattattgtcgtaacccagacgcggagatcagcccttggtgctacactatggaccccaatgtgcggtgggaatactgcaacctgactcagtgtcctgtgactgaatcgagtgtgcttgcaacatccactgctgtgtctgaacaagctcccacagagcagagtccaaccgtccaggattgttatcatggagatggacaaagctacagaggcagcttctccactactgttactggcagaacgtgtcagagctggtcctccatgacaccacattggcaccagcgaacgactgaatattacccaaatggaggcctcaccaggaactactgcagaaacccggatgccgaaatccggccttggtgctacacaatggaccccagcgtgaggtgggaatactgtaacctgacacagtgtcccgtaatggagtcaacgctgcttactacgccaaccgttgtgccagtccctagcactgaactgccaagcgaggaggcgccaaccgaaaactctaccggggttcaggactgttaccgtggagacggacagagttataggggaaccctctccaccactatcacagggcgtacatgccagagctggtctagtatgactccccattggcatcgcaggattcccctctactacccgaacgccggactgaccagaaattactgtcgcaaccccgatgctgagatccgcccatggtgttacaccatggacccttcggtcagatgggagtactgcaatctcacccgctgtcctgtgacagagtcttcggttcttaccacacccaccgtggctcccgtgccttctacggaggccccatcggaacaggctcccccagagaagtcacctgttgttcaggattgctatcatggggatggaagatcctatcggggtatctcctctactaccgtaaccggtcgcacctgccaaagttggtcatccatgattccccactggcaccagagaacacccgaaaactatcctaatgccggtttgactgagaactattgccgcaatcccgacagcgggaagcagccctggtgctacactacagacccctgtgtgcgttgggaatattgcaacctgacgcagtgttctgagaccgagagcggagttttggagacgcctactgtcgtccccgtgccatctatggaggcacattctgaagcggcaccaacagagcaaacaccagtggttcggcagtgctaccatggcaatggacagtcatacagaggtacattttcaactactgtgaccggccgaacctgccaatcttggagctcaatgaccccacatagacaccaaaggacccctgaaaattatccgaacgatggtcttaccatgaattactgcaggaatcctgatgcggacacaggaccatggtgtttcactatggaccctagtattcggtgggaatattgtaatctgacgcgctgctccgataccgagggcaccgtcgtggcaccacccaccgtgattcaggtaccctccttaggacctccatccgagcaggattgtatgtttggcaacggaaaaggatatcggggaaagaaggctacaacggtgacaggcaccccgtgtcaggagtgggccgcacaggaaccacaccgacatagtacctttatccctggcacaaacaagtgggccggactcgagaagaactattgtcgaaatccagatggggacattaatggaccttggtgttataccatgaaccctaggaaactcttcgattactgtgacatacccttgtgtgctagctccagttttgactgcggaaaaccccaggttgagcctaaaaaatgtccaggctccattgtgggcggatgcgtggcccacccccattcctggccctggcaggtgagcttacggactcgcttcggtaagcatttttgcggtggcaccttgatatccccagaatgggtgctcacagcggcacactgtctcaagaaatctagtcgacccagctcatacaaggtgatcttgggagcccatcaggaagtcaacctcgaatctcacgttcaagaaatagaggtgagcaggctgtttctcgagcccacccaggccgatatcgcattgctcaagctgagcaggccagcagtaattacagacaaggtgatgccagcttgtctgccatccccagactacatggtcactgcgagaaccgaatgttacattacgggttggggcgagacccagggcacgttcggaactgggctactcaaggaggcacagctgctggtcatcgagaacgaggtgtgtaatcattacaaatatatttgcgctgagcatctggccagagggacagactcgtgccagggcgactctgggggaccactggtctgctttgagaaggataaatacatactgcaaggcgtgacatcctggggcctggggtgtgctcgtcctaataaaccaggagtttatgccagggtgtcccggttcgtaacgtggatcgagggaatgatgcgcaacaacta

SEQ ID NO: 157570 - DNA, 6123 bp, Artificial Sequence
  derived and/or modified sequence
atggagcacaaggaggtggtgctgctgctgctgctgttcctgaagagcgccgcccccgagcagagccacgtggtgcaggactgctaccacggcgacggccagagctacagaggcacctacagcaccaccgtgaccggcagaacctgccaggcctggagcagcatgaccccccaccagcacaacagaaccaccgagaactaccccaacgccggcctgatcatgaactactgcagaaaccccgacgccgtggccgccccctactgctacaccagagaccccggcgtgagatgggagtactgcaacctgacccagtgcagcgacgccgagggcaccgccgtggccccccccaccgtgacccccgtgcccagcctggaggcccccagcgagcaggcccccaccgagcagagacccggcgtgcaggagtgctaccacggcaacggccagagctacagaggcacctacagcaccaccgtgaccggcagaacctgccaggcctggagcagcatgaccccccacagccacagcagaacccccgagtactaccccaacgccggcctgatcatgaactactgcagaaaccccgacgccgtggccgccccctactgctacaccagagaccccggcgtgagatgggagtactgcaacctgacccagtgcagcgacgccgagggcaccgccgtggccccccccaccgtgacccccgtgcccagcctggaggcccccagcgagcaggcccccaccgagcagagacccggcgtgcaggagtgctaccacggcaacggccagagctacagaggcacctacagcaccaccgtgaccggcagaacctgccaggcctggagcagcatgaccccccacagccacagcagaacccccgagtactaccccaacgccggcctgatcatgaactactgcagaaaccccgacgccgtggccgccccctactgctacaccagagaccccggcgtgagatgggagtactgcaacctgacccagtgcagcgacgccgagggcaccgccgtggccccccccaccgtgacccccgtgcccagcctggaggcccccagcgagcaggcccccaccgagcagagacccggcgtgcaggagtgctaccacggcaacggccagagctacagaggcacctacagcaccaccgtgaccggcagaacctgccaggcctggagcagcatgaccccccacagccacagcagaacccccgagtactaccccaacgccggcctgatcatgaactactgcagaaaccccgacgccgtggccgccccctactgctacaccagagaccccggcgtgagatgggagtactgcaacctgacccagtgcagcgacgccgagggcaccgccgtggccccccccaccgtgacccccgtgcccagcctggaggcccccagcgagcaggcccccaccgagcagagacccggcgtgcaggagtgctaccacggcaacggccagagctacagaggcacctacagcaccaccgtgaccggcagaacctgccaggcctggagcagcatgaccccccacagccacagcagaacccccgagtactaccccaacgccggcctgatcatgaactactgcagaaaccccgacgccgtggccgccccctactgctacaccagagaccccggcgtgagatgggagtactgcaacctgacccagtgcagcgacgccgagggcaccgccgtggccccccccaccgtgacccccgtgcccagcctggaggcccccagcgagcaggcccccaccgagcagagacccggcgtgcaggagtgctaccacggcaacggccagagctacagaggcacctacagcaccaccgtgaccggcagaacctgccaggcctggagcagcatgaccccccacagccacagcagaacccccgagtactaccccaacgccggcctgatcatgaactactgcagaaaccccgacgccgtggccgccccctactgctacaccagagaccccggcgtgagatgggagtactgcaacctgacccagtgcagcgacgccgagggcaccgccgtggccccccccaccgtgacccccgtgcccagcctggaggcccccagcgagcaggcccccaccgagcagagacccggcgtgcaggagtgctaccacggcaacggccagagctacagaggcacctacagcaccaccgtgaccggcagaacctgccaggcctggagcagcatgaccccccacagccacagcagaacccccgagtactaccccaacgccggcctgatcatgaactactgcagaaaccccgacgccgtggccgccccctactgctacaccagagaccccggcgtgagatgggagtactgcaacctgacccagtgcagcgacgccgagggcaccgccgtggccccccccaccgtgacccccgtgcccagcctggaggcccccagcgagcaggcccccaccgagcagagacccggcgtgcaggagtgctaccacggcaacggccagagctacagaggcacctacagcaccaccgtgaccggcagaacctgccaggcctggagcagcatgaccccccacagccacagcagaacccccgagtactaccccaacgccggcctgatcatgaactactgcagaaaccccgaccccgtggccgccccctactgctacaccagagaccccagcgtgagatgggagtactgcaacctgacccagtgcagcgacgccgagggcaccgccgtggccccccccaccatcacccccatccccagcctggaggcccccagcgagcaggcccccaccgagcagagacccggcgtgcaggagtgctaccacggcaacggccagagctaccagggcacctacttcatcaccgtgaccggcagaacctgccaggcctggagcagcatgaccccccacagccacagcagaacccccgcctactaccccaacgccggcctgatcaagaactactgcagaaaccccgaccccgtggccgccccctggtgctacaccaccgaccccagcgtgagatgggagtactgcaacctgaccagatgcagcgacgccgagtggaccgccttcgtgccccccaacgtgatcctggcccccagcctggaggccttcttcgagcaggccctgaccgaggagacccccggcgtgcaggactgctactaccactacggccagagctacagaggcacctacagcaccaccgtgaccggcagaacctgccaggcctggagcagcatgaccccccaccagcacagcagaacccccgagaactaccccaacgccggcctgaccagaaactactgcagaaaccccgacgccgagatcagaccctggtgctacaccatggaccccagcgtgagatgggagtactgcaacctgacccagtgcctggtgaccgagagcagcgtgctggccaccctgaccgtggtgcccgaccccagcaccgaggccagcagcgaggaggcccccaccgagcagagccccggcgtgcaggactgctaccacggcgacggccagagctacagaggcagcttcagcaccaccgtgaccggcagaacctgccagagctggagcagcatgaccccccactggcaccagagaaccaccgagtactaccccaacggcggcctgaccagaaactactgcagaaaccccgacgccgagatcagcccctggtgctacaccatggaccccaacgtgagatgggagtactgcaacctgacccagtgccccgtgaccgagagcagcgtgctggccaccagcaccgccgtgagcgagcaggcccccaccgagcagagccccaccgtgcaggactgctaccacggcgacggccagagctacagaggcagcttcagcaccaccgtgaccggcagaacctgccagagctggagcagcatgaccccccactggcaccagagaaccaccgagtactaccccaacggcggcctgaccagaaactactgcagaaaccccgacgccgagatcagaccctggtgctacaccatggaccccagcgtgagatgggagtactgcaacctgacccagtgccccgtgatggagagcaccctgctgaccacccccaccgtggtgcccgtgcccagcaccgagctgcccagcgaggaggcccccaccgagaacagcaccggcgtgcaggactgctacagaggcgacggccagagctacagaggcaccctgagcaccaccatcaccggcagaacctgccagagctggagcagcatgaccccccactggcacagaagaatccccctgtactaccccaacgccggcctgaccagaaactactgcagaaaccccgacgccgagatcagaccctggtgctacaccatggaccccagcgtgagatgggagtactgcaacctgaccagatgccccgtgaccgagagcagcgtgctgaccacccccaccgtggcccccgtgcccagcaccgaggcccccagcgagcaggccccccccgagaagagccccgtggtgcaggactgctaccacggcgacggcagaagctacagaggcatcagcagcaccaccgtgaccggcagaacctgccagagctggagcagcatgatcccccactggcaccagagaacccccgagaactaccccaacgccggcctgaccgagaactactgcagaaaccccgacagcggcaagcagccctggtgctacaccaccgacccctgcgtgagatgggagtactgcaacctgacccagtgcagcgagaccgagagcggcgtgctggagacccccaccgtggtgcccgtgcccagcatggaggcccacagcgaggccgcccccaccgagcagacccccgtggtgagacagtgctaccacggcaacggccagagctacagaggcaccttcagcaccaccgtgaccggcagaacctgccagagctggagcagcatgaccccccacagacaccagagaacccccgagaactaccccaacgacggcctgaccatgaactactgcagaaaccccgacgccgacaccggcccctggtgcttcaccatggaccccagcatcagatgggagtactgcaacctgaccagatgcagcgacaccgagggcaccgtggtggccccccccaccgtgatccaggtgcccagcctgggcccccccagcgagcaggactgcatgttcggcaacggcaagggctacagaggcaagaaggccaccaccgtgaccggcaccccctgccaggagtgggccgcccaggagccccacagacacagcaccttcatccccggcaccaacaagtgggccggcctggagaagaactactgcagaaaccccgacggcgacatcaacggcccctggtgctacaccatgaaccccagaaagctgttcgactactgcgacatccccctgtgcgccagcagcagcttcgactgcggcaagccccaggtggagcccaagaagtgccccggcagcatcgtgggcggctgcgtggcccacccccacagctggccctggcaggtgagcctgagaaccagattcggcaagcacttctgcggcggcaccctgatcagccccgagtgggtgctgaccgccgcccactgcctgaagaagagcagcagacccagcagctacaaggtgatcctgggcgcccaccaggaggtgaacctggagagccacgtgcaggagatcgaggtgagcagactgttcctggagcccacccaggccgacatcgccctgctgaagctgagcagacccgccgtgatcaccgacaaggtgatgcccgcctgcctgcccagccccgactacatggtgaccgccagaaccgagtgctacatcaccggctggggcgagacccagggcaccttcggcaccggcctgctgaaggaggcccagctgctggtgatcgagaacgaggtgtgcaaccactacaagtacatctgcgccgagcacctggccagaggcaccgacagctgccagggcgacagcggcggccccctggtgtgcttcgagaaggacaagtacatcctgcagggcgtgaccagctggggcctgggctgcgccagacccaacaagcccggcgtgtacgccagagtgagcagattcgtgacctggatcgagggcatgatgagaaacaactag

SEQ ID NO: 157571 - protein, 628 aa, Artificial Sequence
  derived and/or modified sequence
MEPPDAPAQARGAPRLLLLAVLLAAHPDAQAEVRLSVPPLVEVMRGKSVILDCTPTGTHDHYMLEWFLTDRSGARPRLASAEMQGSELQVTMHDTRGRSPPYQLDSQGRLVLAEAQVGDERDYVCVVRAGAAGTAEATARLNVFAKPEATEVSPNKGTLSVMEDSAQEIATCNSRNGNPAPKITWYRNGQRLEVPVEMNPEGYMTSRTVREASGLLSLTSTLYLRLRKDDRDASFHCAAHYSLPEGRHGRLDSPTFHLTLHYPTEHVQFWVGSPSTPAGWVREGDTVQLLCRGDGSPSPEYTLFRLQDEQEEVLNVNLEGNLTLEGVTRGQSGTYGCRVEDYDAADDVQLSKTLELRVAYLDPLELSEGKVLSLPLNSSAVVNCSVHGLPTPALRWTKDSTPLGDGPMLSLSSITFDSNGTYVCEASLPTVPVLSRTQNFTLLVQGSPELKTAEIEPKADGSWREGDEVTLICSARGHPDPKLSWSQLGGSPAEPIPGRQGWVSSSLTLKVTSALSRDGISCEASNPHGNKRHVFHFGTVSPQTSQAGVAVMAVAVSVGLLLLVVAVFYCVRRKGGPCCRQRREKGAPPPGEPGLSHSGSEQPEQTGLLMGGASGGARGGSGGFGDEC

SEQ ID NO: 157572 - DNA, 1887 bp, Artificial Sequence
  derived and/or modified sequence
atggaacctccagacgccccagcacaagccagaggagccccccggctgctcctcctcgccgtcttgctcgctgcacatccagatgcccaggccgaggtgagactcagtgtaccacctctggttgaggtgatgcggggcaagtccgtgatcttagattgtacccccacgggaactcacgatcattacatgttagagtggttcctgaccgaccgaagtggagccagaccacgactggcttccgcagaaatgcagggtagtgagctgcaggtcaccatgcatgacacaagaggtaggtctcctccctaccaacttgactcccagggacgtcttgttctcgctgaggcccaagtgggggatgaaagagactatgtgtgcgttgtgagggccggcgccgcaggtacagctgaagctaccgctaggttaaatgtctttgccaaacccgaagctacggaagtgtctcccaataagggaacgctatccgtcatggaagattctgctcaagagattgccacttgtaacagcaggaatggtaatccagctccgaagattacttggtaccgtaacggacagcgtttggaggtgccagtggagatgaatccagagggatacatgaccagcaggacggtacgcgaagcttccggattattgtccctgacaagtactttgtaccttcggctaaggaaggatgatcgagatgcaagtttccactgtgctgcccattacagcctgcccgaaggtcggcatggccgcctcgactcaccaacatttcatctcaccctgcattatccaaccgaacacgtgcagttctgggtcggcagtcccagcactcctgctggatgggtccgcgaaggtgatacagtacaactgctttgccgaggcgacgggtccccgtccccggaatataccctcttcaggctgcaggacgagcaggaagaggttctcaacgttaacttggaaggaaaccttactctggagggagtgactcggggtcagagcgggacgtacgggtgccgcgtcgaggactatgacgctgcagacgatgttcaactcagcaagaccctggagttgagggtggcatacttggacccacttgaactgagcgagggaaaggtactgtccctaccgctgaactcatccgccgtggtcaactgctctgtccatgggctccctacacccgcccttcggtggaccaaggactccacccctctaggcgatggacccatgctaagccttagcagtataacttttgattcaaacgggacctacgtgtgcgaggcttcccttcctactgtgccggtgctgtcccggacacagaacttcacacttttggtgcaaggttcacccgagttgaaaacagctgaaattgaacctaaggccgacggcagttggagggagggagacgaagtaacattaatttgttcggcccgcgggcaccctgacccaaagctgagctggagccagctcggtgggagccctgcagagccaatccctggaagacaaggctgggtctcctcttccttaaccctcaaagtcacatcggcccttagtagagacggcataagttgtgaggcttcaaacccccacggcaacaaacggcacgtgttccatttcgggacagtctcaccacagactagccaggcgggcgtagctgtcatggcagtagctgtgtctgtcggtttactcctcctagtcgtggctgttttctattgcgtccggaggaaaggagggccgtgctgccggcagcggagagagaaaggcgcccctccgcccggggaacctggcttatctcattccggatccgagcagcccgaacagacaggcctgcttatgggaggtgccagcggaggggctagaggagggtcaggcggcttcggggacgagtgctag

SEQ ID NO: 157573 - DNA, 1887 bp, Artificial Sequence
  derived and/or modified sequence
atggagcccccagatgccccagcccaggcccggggggccccccggctgctgctgctggccgtgctgctggccgcccacccagatgcccaggccgaggtgcggctgtctgtgccccccctggtggaggtgatgaggggcaagagcgtcatcctggactgcacccccaccggcacccatgaccactacatgctggagtggttcctgacagacagaagtggggcccggccccggctggccagcgctgagatgcagggcagcgagctgcaggtgaccatgcatgacacccggggccgcagccccccctaccagctggacagccagggccgcctggtgctggccgaggcccaggtgggagatgagcgggactatgtgtgtgtggtgcgggccggggccgccggcacagctgaggccacagcccggctgaatgtgtttgccaagccagaggccacagaggtgagccccaacaagggcaccctgtctgtgatggaggacagcgcccaggagatcgccacctgcaacagcagaaatggaaatcctgcccccaagatcacctggtacagaaatggccagaggctggaggtgcctgtggagatgaaccctgagggctacatgaccagcaggacagtgcgggaggccagcggcctgctgagcctgaccagcaccctgtacctgcggctgaggaaggatgacagagatgccagcttccactgtgccgcccactacagcctgcctgagggccgccacggccgcctggacagccccaccttccacctgaccctgcactaccccacagagcacgtgcagttctgggtgggcagccccagcaccccagctggctgggtgcgggagggggacacagtgcagctgctgtgcagaggagatggcagccccagccctgagtacaccctcttccggctgcaggatgagcaggaggaggtgctgaatgtgaacctggagggcaacctgaccctggagggcgtgacccggggccagagcggcacctacggctgccgggtggaggactatgatgctgctgatgatgtgcagctgagcaagaccctggagctgcgggtggcctacctggaccccctggagctgtctgagggcaaggtgctgagcctgcccctgaacagcagcgctgtggtgaactgcagcgtgcacggcctgcccaccccagccctgcgctggaccaaggacagcacccccctgggagatggccccatgctgagcctgagcagcatcacctttgacagcaatggcacctacgtgtgtgaggccagcctgcccaccgtgcctgtgctgagcaggacccagaacttcaccctgctggtgcagggcagccctgagctgaagacagctgagattgagcccaaggcagatggctcctggagagaaggagatgaggtgaccctcatctgcagcgcccggggccacccagaccccaagctgtcctggagccagctgggcggcagccctgctgagcccatccctggccggcagggctgggtgagcagcagcctgaccctgaaggtgaccagcgccctgagcagagatggcatcagctgtgaggccagcaacccccacggcaacaagagacatgtgttccactttggaacagtgagcccccagaccagccaggccggcgtggccgtgatggctgtggccgtgtctgtgggcctgctgctgctggtggtggccgtgttctactgtgtgcggaggaagggcggcccctgctgccggcagaggcgggagaagggggcccctcctcctggagagcccggcctgagccacagcggcagcgagcagcctgagcagacaggcctgctgatgggcggggccagcggcggggcccggggcggcagcggcggctttggagatgaatgttag

SEQ ID NO: 157574 - DNA, 1887 bp, Artificial Sequence
  derived and/or modified sequence
atggagccccccgacgcccccgcccaggcccggggcgccccccggctcctactcctcgcggttctgctcgccgcacatcccgatgctcaggctgaggtgagactgagcgtaccgccgctagtagaggtgatgaggggcaagagcgtgatcttagattgtacacctaccggcacccacgaccattacatgctcgaatggtttctgaccgatcgatccggggctagacctaggttggcgagtgctgagatgcagggaagcgagctgcaagtgacgatgcacgacacccgcggaagatccccaccgtatcaattagattctcagggacgccttgtactggctgaggcccaggtcggggacgaaagagattacgtctgtgtggtgcgggcaggggcggccggcaccgctgaggcaacagccagactgaacgtcttcgctaaacccgaggccactgaggtgtctcccaataaaggtaccctgtctgtgatggaggactcagcacaggagatagccacctgcaacagccgtaatggtaaccctgcccccaaaatcacgtggtacaggaatgggcagaggctggaagtgcccgtcgaaatgaatcctgaggggtacatgacctcccgcactgtgagagaggcgtctggtctcctctctttgacttccaccttgtacttgagactgaggaaggacgatcgcgacgcctcctttcattgcgccgctcattacagtttgcctgaaggacgccacggcaggttagacagtcccactttccacctcacactacactatccgacggagcacgtgcagttctgggttgggagcccgtcaacaccagctggctgggtacgcgaaggagacactgtgcaattactctgtcggggcgatggtagcccatcaccagagtacacgctgttccggttgcaggacgagcaggaagaagttttaaacgtgaacctcgaggggaatctgaccctggagggagtgactagggggcagagcggcacctatggctgccgagttgaagactacgatgccgcagacgacgtccaattgagcaaaaccctcgaacttcgagtcgcctatctcgaccctttggagctctccgaggggaaggttcttagcctgccgctcaatagcagcgcagtcgtcaactgctccgtgcacggattaccaactcccgccctgcgttggaccaaggattccactccgttgggtgacggacctatgctgagcttgtcctcaattacctttgactccaacgggacatacgtgtgcgaggcgagcttgccaacagtccctgtgctctcccgaacccagaatttcacactgctcgttcagggcagccctgaactcaagacagcagaaatcgaacccaaagccgacggctcttggagggagggggatgaagtgacactgatctgcagtgcaagagggcacccagatccgaagctgtcctggtcccagctcggtggctccccagctgaaccaatccccggacggcagggatgggtgtcatcttccctcaccctgaaggtcacatctgcccttagccgggacggaatatcctgtgaagcatccaatcctcacggaaataaaagacatgtttttcacttcggtactgtgtcgccgcaaacatcacaagcaggcgttgccgtgatggccgttgccgtttcggtaggacttcttttgctggtggtggctgtcttttactgtgtgaggcgtaagggcggtccatgctgtagacagcggagggagaaaggcgcacctcctccaggggaacccggactcagccactctggcagcgagcagcccgagcaaaccgggctgctcatgggcggcgccagtggcggagccaggggcggttccgggggattcggcgatgagtgctag

SEQ ID NO: 157575 - DNA, 1887 bp, Artificial Sequence
  derived and/or modified sequence
atggaacctccagacgctcccgctcaggccaggggtgcccctcggctgctgcttctagccgtgctgctcgcagcccacccagacgctcaggccgaggtgcggttgtctgtgcccccactggtcgaggtgatgagggggaagagcgtgatcctggattgcacccccacaggaacgcacgaccactacatgttggaatggttcctcaccgaccggtcaggggctcggcctcgcttggcgtccgccgagatgcaggggagcgagctgcaagttactatgcatgacacccggggaagatcccctccctatcagttagattctcagggaaggctggtactcgccgaggcccaggtgggagatgaacgggactatgtgtgcgttgtccgcgcaggagctgctggtactgcagaagctactgccaggttaaatgtgttcgccaagcctgaggccacggaggtgtctcctaacaagggtacattgtcagtgatggaggattcagcacaagaaatagccacctgcaattcgaggaatgggaaccccgctccaaagataacctggtataggaacggccagagacttgaagtgccagttgaaatgaaccctgaaggatatatgacatctcgtactgtcagagaggcttctggtctcctctccctgacctcaaccctgtaccttcgtctgcgcaaagatgacagagatgccagctttcactgcgctgcccattattcccttcccgaggggcgtcacgggaggttggacagtcctaccttccatcttaccctccactatccaacggaacacgtgcagttttgggtaggttctcctagtaccccggctggatgggtgagagagggcgacaccgtccagttattgtgtcgcggagacggaagtccatcgcccgaatacaccctttttcgacttcaagacgagcaggaggaagttcttaacgtgaacctggagggtaacctgacccttgagggcgtgacccgcggtcaatcggggacctacggatgtagagtagaagattacgatgcagccgacgatgtacagctgagcaagacactggaactccgtgtggcctacctggatcccttggagttaagcgaggggaaggtgctttctctgccgctcaactcttccgccgttgttaattgcagtgtccacggcctccccacacccgcactccgctggaccaaagattccacccctcttggcgatggacccatgctgtcgttgtcttcgattacatttgactccaacgggacctatgtatgtgaggcaagcctgccaactgtgccagtattgtctcgtacacagaatttcaccctcctcgtgcagggcagtcctgagctgaagactgctgagatcgagcccaaagcagacggaagctggcgcgagggggacgaggtcaccctcatttgcagtgccaggggacatcccgaccccaagctgtcatggagccaactcggtggaagtccagccgagccaataccagggagacaggggtgggtgtcttcaagcttgacacttaaagtcacatctgcgctcagccgggatggcatatcttgcgaagcatccaatcctcacggaaataaacggcacgtttttcattttggtaccgtgtcacctcagacctcccaggcgggagtcgccgttatggcagtggctgtcagcgtgggactactcttgctagttgtggcagtgttctactgcgtgagacgaaaaggcggaccttgctgtcggcagaggagggagaaaggagcccctcctccaggagagccaggtctttctcattccggctccgagcagcctgaacagactggtctcctgatgggtggagcctccggcggagcacggggaggctccggcggattcggggatgagtgctag

SEQ ID NO: 157576 - DNA, 2430 bp, Artificial Sequence
  derived and/or modified sequence
ggccgagctgcagcccgggctcagtctccgccgccgccgtgaacatggagcccccggacgcaccggcccaggcgcgcggggccccgcggctgctgttgctcgcagtcctgctggcggcgcacccagatgcccaggcggaggtgcgcttgtctgtacccccgctggtggaggtgatgcgaggaaagtctgtcattctggactgcacccctacgggaacccacgaccattatatgctggaatggttccttaccgaccgctcgggagctcgcccccgcctagcctcggctgagatgcagggctctgagctccaggtcacaatgcacgacacccggggccgcagtcccccataccagctggactcccaggggcgcctggtgctggctgaggcccaggtgggcgacgagcgagactacgtgtgcgtggtgagggcaggggcggcaggcactgctgaggccactgcgcggctcaacgtgtttgcaaagccagaggccactgaggtctcccccaacaaagggacactgtctgtgatggaggactctgcccaggagatcgccacctgcaacagccggaacgggaacccggcccccaagatcacgtggtatcgcaacgggcagcgcctggaggtgcccgtagagatgaacccagagggctacatgaccagccgcacggtccgggaggcctcgggcctgctctccctcaccagcaccctctacctgcggctccgcaaggatgaccgagacgccagcttccactgcgccgcccactacagcctgcccgagggccgccacggccgcctggacagccccaccttccacctcaccctgcactatcccacggagcacgtgcagttctgggtgggcagcccgtccaccccagcaggctgggtacgcgagggtgacactgtccagctgctctgccggggggacggcagccccagcccggagtatacgcttttccgccttcaggatgagcaggaggaagtgctgaatgtgaatctcgaggggaacttgaccctggagggagtgacccggggccagagcgggacctatggctgcagagtggaggattacgacgcggcagatgacgtgcagctctccaagacgctggagctgcgcgtggcctatctggaccccctggagctcagcgaggggaaggtgctttccttacctctaaacagcagtgcagtcgtgaactgctccgtgcacggcctgcccacccctgccctacgctggaccaaggactccactcccctgggcgatggccccatgctgtcgctcagttctatcaccttcgattccaatggcacctacgtatgtgaggcctccctgcccacagtcccggtcctcagccgcacccagaacttcacgctgctggtccaaggctcgccagagctaaagacagcggaaatagagcccaaggcagatggcagctggagggaaggagacgaagtcacactcatctgctctgcccgcggccatccagaccccaaactcagctggagccaattggggggcagccccgcagagccaatccccggacggcagggttgggtgagcagctctctgaccctgaaagtgaccagcgccctgagccgcgatggcatctcctgtgaagcctccaacccccacgggaacaagcgccatgtcttccacttcggcaccgtgagcccccagacctcccaggctggagtggccgtcatggccgtggccgtcagcgtgggcctcctgctcctcgtcgttgctgtcttctactgcgtgagacgcaaagggggcccctgctgccgccagcggcgggagaagggggctccgccgccaggggagccagggctgagccactcggggtcggagcaaccagagcagaccggccttctcatgggaggtgcctccggaggagccaggggtggcagcgggggcttcggagacgagtgctgagccaagaacctcctagaggctgtccctggacctggagctgcaggcatcagagaaccagccctgctcacgccatgcccgcccccgccttccctcttccctcttccctctccctgcccagccctcccttccttcctctgccggcaaggcagggacccacagtggctgcctgcctccgggagggaaggagagggagggtgggtgggtgggagggggccttcctccagggaatgtgactctcccaggccccagaatagctcctggacccaagcccaaggcccagcctgggacaaggctccgagggtcggctggccggagctatttttacctcccgcctcccctgctggtccccccacctgacgtcttgctgcagagtctgacactggattcccccccctcaccccgcccctggtcccactcctgcccccgccctacctccgccccaccccatcatctgtggacactggagtctggaataaatgctgtttgtcacatcaacacc

SEQ ID NO: 157577 - DNA, 1887 bp, Artificial Sequence
  derived and/or modified sequence
atggagccccccgacgcccccgcccaggccagaggcgcccccagactgctgctgctggccgtgctgctggccgcccaccccgacgcccaggccgaggtgagactgagcgtgccccccctggtggaggtgatgagaggcaagagcgtgatcctggactgcacccccaccggcacccacgaccactacatgctggagtggttcctgaccgacagaagcggcgccagacccagactggccagcgccgagatgcagggcagcgagctgcaggtgaccatgcacgacaccagaggcagaagccccccctaccagctggacagccagggcagactggtgctggccgaggcccaggtgggcgacgagagagactacgtgtgcgtggtgagagccggcgccgccggcaccgccgaggccaccgccagactgaacgtgttcgccaagcccgaggccaccgaggtgagccccaacaagggcaccctgagcgtgatggaggacagcgcccaggagatcgccacctgcaacagcagaaacggcaaccccgcccccaagatcacctggtacagaaacggccagagactggaggtgcccgtggagatgaaccccgagggctacatgaccagcagaaccgtgagagaggccagcggcctgctgagcctgaccagcaccctgtacctgagactgagaaaggacgacagagacgccagcttccactgcgccgcccactacagcctgcccgagggcagacacggcagactggacagccccaccttccacctgaccctgcactaccccaccgagcacgtgcagttctgggtgggcagccccagcacccccgccggctgggtgagagagggcgacaccgtgcagctgctgtgcagaggcgacggcagccccagccccgagtacaccctgttcagactgcaggacgagcaggaggaggtgctgaacgtgaacctggagggcaacctgaccctggagggcgtgaccagaggccagagcggcacctacggctgcagagtggaggactacgacgccgccgacgacgtgcagctgagcaagaccctggagctgagagtggcctacctggaccccctggagctgagcgagggcaaggtgctgagcctgcccctgaacagcagcgccgtggtgaactgcagcgtgcacggcctgcccacccccgccctgagatggaccaaggacagcacccccctgggcgacggccccatgctgagcctgagcagcatcaccttcgacagcaacggcacctacgtgtgcgaggccagcctgcccaccgtgcccgtgctgagcagaacccagaacttcaccctgctggtgcagggcagccccgagctgaagaccgccgagatcgagcccaaggccgacggcagctggagagagggcgacgaggtgaccctgatctgcagcgccagaggccaccccgaccccaagctgagctggagccagctgggcggcagccccgccgagcccatccccggcagacagggctgggtgagcagcagcctgaccctgaaggtgaccagcgccctgagcagagacggcatcagctgcgaggccagcaacccccacggcaacaagagacacgtgttccacttcggcaccgtgagcccccagaccagccaggccggcgtggccgtgatggccgtggccgtgagcgtgggcctgctgctgctggtggtggccgtgttctactgcgtgagaagaaagggcggcccctgctgcagacagagaagagagaagggcgcccccccccccggcgagcccggcctgagccacagcggcagcgagcagcccgagcagaccggcctgctgatgggcggcgccagcggcggcgccagaggcggcagcggcggcttcggcgacgagtgctag

SEQ ID NO: 157578 - protein, 661 aa, Artificial Sequence
  derived and/or modified sequence
MAFDVSCFFWVVLFSAGCKVITSWDQMCIEKEANKTYNCENLGLSEIPDTLPNTTEFLEFSFNFLPTIHNRTFSRLMNLTFLDLTRCQINWIHEDTFQSHHQLSTLVLTGNPLIFMAETSLNGPKSLKHLFLIQTGISNLEFIPVHNLENLESLYLGSNHISSIKFPKDFPARNLKVLDFQNNAIHYISREDMRSLEQAINLSLNFNGNNVKGIELGAFDSTIFQSLNFGGTPNLSVIFNGLQNSTTQSLWLGTFEDIDDEDISSAMLKGLCEMSVESLNLQEHRFSDISSTTFQCFTQLQELDLTATHLKGLPSGMKGLNLLKKLVLSVNHFDQLCQISAANFPSLTHLYIRGNVKKLHLGVGCLEKLGNLQTLDLSHNDIEASDCCSLQLKNLSHLQTLNLSHNEPLGLQSQAFKECPQLELLDLAFTRLHINAPQSPFQNLHFLQVLNLTYCFLDTSNQHLLAGLPVLRHLNLKGNHFQDGTITKTNLLQTVGSLEVLILSSCGLLSIDQQAFHSLGKMSHVDLSHNSLTCDSIDSLSHLKGIYLNLAANSINIISPRLLPILSQQSTINLSHNPLDCTCSNIHFLTWYKENLHKLEGSEETTCANPPSLRGVKLSDVKLSCGITAIGIFFLIVFLLLLAILLFFAVKYLLRWKYQHI

SEQ ID NO: 157579 - DNA, 1986 bp, Artificial Sequence
  derived and/or modified sequence
atggccttcgacgtgagctgcttcttctgggtggtgctgttcagcgccggctgcaaggtgatcaccagctgggaccagatgtgcatcgagaaggaggccaacaagacctacaactgcgagaacctgggcctgagcgagatccccgacaccctgcccaacaccaccgagttcctggagttcagcttcaacttcctgcccaccatccacaacagaaccttcagcagactgatgaacctgaccttcctggacctgaccagatgccagatcaactggatccacgaggacaccttccagagccaccaccagctgagcaccctggtgctgaccggcaaccccctgatcttcatggccgagaccagcctgaacggccccaagagcctgaagcacctgttcctgatccagaccggcatcagcaacctggagttcatccccgtgcacaacctggagaacctggagagcctgtacctgggcagcaaccacatcagcagcatcaagttccccaaggacttccccgccagaaacctgaaggtgctggacttccagaacaacgccatccactacatcagcagagaggacatgagaagcctggagcaggccatcaacctgagcctgaacttcaacggcaacaacgtgaagggcatcgagctgggcgccttcgacagcaccatcttccagagcctgaacttcggcggcacccccaacctgagcgtgatcttcaacggcctgcagaacagcaccacccagagcctgtggctgggcaccttcgaggacatcgacgacgaggacatcagcagcgccatgctgaagggcctgtgcgagatgagcgtggagagcctgaacctgcaggagcacagattcagcgacatcagcagcaccaccttccagtgcttcacccagctgcaggagctggacctgaccgccacccacctgaagggcctgcccagcggcatgaagggcctgaacctgctgaagaagctggtgctgagcgtgaaccacttcgaccagctgtgccagatcagcgccgccaacttccccagcctgacccacctgtacatcagaggcaacgtgaagaagctgcacctgggcgtgggctgcctggagaagctgggcaacctgcagaccctggacctgagccacaacgacatcgaggccagcgactgctgcagcctgcagctgaagaacctgagccacctgcagaccctgaacctgagccacaacgagcccctgggcctgcagagccaggccttcaaggagtgcccccagctggagctgctggacctggccttcaccagactgcacatcaacgccccccagagccccttccagaacctgcacttcctgcaggtgctgaacctgacctactgcttcctggacaccagcaaccagcacctgctggccggcctgcccgtgctgagacacctgaacctgaagggcaaccacttccaggacggcaccatcaccaagaccaacctgctgcagaccgtgggcagcctggaggtgctgatcctgagcagctgcggcctgctgagcatcgaccagcaggccttccacagcctgggcaagatgagccacgtggacctgagccacaacagcctgacctgcgacagcatcgacagcctgagccacctgaagggcatctacctgaacctggccgccaacagcatcaacatcatcagccccagactgctgcccatcctgagccagcagagcaccatcaacctgagccacaaccccctggactgcacctgcagcaacatccacttcctgacctggtacaaggagaacctgcacaagctggagggcagcgaggagaccacctgcgccaacccccccagcctgagaggcgtgaagctgagcgacgtgaagctgagctgcggcatcaccgccatcggcatcttcttcctgatcgtgttcctgctgctgctggccatcctgctgttcttcgccgtgaagtacctgctgagatggaagtaccagcacatctag

SEQ ID NO: 157580 - DNA, 1986 bp, Artificial Sequence
  derived and/or modified sequence
atggcattcgatgtgtcttgcttcttctgggtagtactgttctcggcaggatgcaaggtgatcacctcctgggaccagatgtgcattgaaaaggaggctaataaaacatataattgcgaaaacctaggcctctccgagatccctgacaccctgcccaacacgacggaatttctggagttctcctttaatttccttccaacaattcacaatcggaccttctccagactgatgaatttgacctttctggacctgacccgttgccagattaactggattcatgaagatacattccagtcccatcatcagctgagcaccctggtcctgactgggaatcctctgatttttatggccgaaacaagcctgaatggccccaagagtctgaagcacttatttcttatccagaccggcatatcaaatctggaattcattcctgtgcacaatctggagaatctggaatctctgtatctggggagcaatcacatcagctctatcaaattcccaaaggacttccctgcccggaaccttaaagtcctcgattttcagaacaatgcaatacattatatctcccgagaggatatgcgcagcctagaacaggccatcaaccttagtctgaattttaacggcaataatgtgaaaggaattgaactgggcgcattcgactcaactatatttcagtctctgaacttcggcggtacaccaaatctttctgttattttcaacggcctgcaaaacagcacaacccagtctctgtggttgggaacctttgaggacatagacgatgaagacatcagcagcgccatgctgaagggtctgtgcgagatgtctgtagaaagcctgaacttgcaggagcaccgtttctctgacatttcctcaacgacttttcagtgtttcactcaactccaagaactggacctcacagcgacccacctgaagggactgccctcaggcatgaaggggttgaacttgctgaagaaactcgttttaagtgtcaaccacttcgatcaactctgccagatcagtgccgctaactttccaagccttactcatctttacatacgcggaaatgtcaagaagctgcatctgggtgtgggctgcttggaaaaactggggaatctgcagactttggacctgagccataacgatattgaagcaagcgactgttgtagcttgcagctcaaaaatttgagtcacctgcagactttgaacctgtctcacaatgaaccacttggcttgcagtcacaggcttttaaggaatgccctcagttagagctcttagacctggcctttactagactgcacatcaacgccccccagtccccgtttcaaaatcttcacttcctgcaggttttaaacctaacttactgttttttagacacatcaaaccaacacctgctggcaggactgccagtactccgtcatctgaacctaaaaggtaatcattttcaagatggcactattacgaagacaaacctgctccagacggtggggtctctggaagttctgattctgtcatcctgtggtctgctgtcaattgatcaacaggcttttcattcactcggcaagatgtcacacgtggatctgtctcacaatagcttaacatgcgattctatcgactctctgtctcacctgaaaggcatttacttaaacctggctgcgaactcaatcaatattatctcaccgagacttttgcccattctaagccagcagagtactattaacctgtcccacaatcctctcgactgtacctgctcaaacattcacttccttacttggtacaaggaaaacctccacaaactggaggggagtgaagagaccacctgcgcaaacccgccctcgttaagaggggtgaaactctcagacgtaaagctctcgtgtgggattactgcgatcgggatatttttcttgatcgtattcctgctcctgctcgccatcctactgtttttcgcagttaaatatcttctcagatggaagtatcagcacatctag

SEQ ID NO: 157581 - DNA, 1986 bp, Artificial Sequence
  derived and/or modified sequence
atggcctttgatgtgtcctgcttcttctgggtggtgctcttctctgctggctgcaaggtgatcacctcctgggaccagatgtgcatcgagaaggaggccaacaagacctacaactgtgagaacctgggcctgtctgagatcccagacaccctgcccaacaccacagagttcctggagttctccttcaacttcctgcccaccatccacaacagaaccttcagccggctgatgaacctgaccttcctggacctgacccgctgccagatcaactggattcatgaggacaccttccagagccaccaccagctgagcaccctggtgctgactggaaaccccctcatcttcatggccgagaccagcctgaatggccccaagagcctgaagcacctgttcctgatccagacaggcatcagcaacctggagttcatccctgtgcacaacctggagaacctggagagcctgtacctgggcagcaaccacatcagcagcatcaagttccccaaggacttccctgccaggaacctgaaggtgctggacttccagaacaatgccatccactacatcagccgggaggacatgaggagcctggagcaggccatcaacctgagcctgaacttcaatggaaacaacgtgaagggcatcgagctgggcgcctttgacagcaccatcttccagagcctgaactttggaggcacccccaacctgagcgtcatcttcaacggcctgcagaacagcaccacccagagcctgtggctgggcacctttgaggacattgatgatgaggacatcagcagcgccatgctgaagggcctgtgtgagatgtctgtggagagcctgaacctgcaggagcaccgcttcagtgacatcagcagcaccaccttccagtgcttcacccagctgcaggagctggacctgacagccacccacctgaagggcctgcccagcggcatgaagggcctgaacctgctgaagaagctggtgctgtctgtgaaccactttgaccagctgtgccagatctctgctgccaacttccccagcctgacccacctgtacatcagaggaaatgtgaagaagctgcacctgggcgtgggctgcctggagaagctgggcaacctgcagaccctggacctgagccacaatgacatcgaggccagtgactgctgcagcctgcagctgaagaacctgagccacctgcagaccctgaacctgagccacaatgagcccctgggcctgcagagccaggccttcaaggagtgcccccagctggagctgctggacctggccttcacccggctgcacatcaatgccccccagagccccttccagaacctgcacttcctgcaggtgctgaacctgacctactgcttcctggacaccagcaaccagcacctgctggccggcctgcctgtgctgcggcacctgaacctgaagggcaaccacttccaggacggcaccatcaccaagaccaacctgctgcagacagtgggcagcctggaggtgctgatcctgagcagctgtggcctgctgagcattgaccagcaggccttccacagcctgggcaagatgagccacgtggacctgagccacaacagcctgacctgtgacagcattgacagcctgagccacctgaagggcatctacctgaacctggccgccaacagcatcaacatcatcagcccccggctgctgcccatcctgagccagcagagcaccatcaacctgagccacaaccccctggactgcacctgcagcaacatccacttcctgacctggtacaaggagaacctgcacaagctggagggcagcgaggagaccacctgtgccaacccccccagcctgcggggcgtgaagctgagtgatgtgaagctgagctgtggcatcacagccatcggcatcttcttcctgattgtgttcctgctgctgctggccatcctgctcttctttgctgtgaagtacctgctgcgctggaagtaccagcacatctag

SEQ ID NO: 157582 - DNA, 1986 bp, Artificial Sequence
  derived and/or modified sequence
atggccttcgacgtgagctgcttcttctgggtggtgctgttcagcgccggatgcaaggtgattactagctgggaccagatgtgcatcgagaaagaggcaaataagacatacaattgtgagaacttggggctgagcgagattccagacacactgcccaacacaaccgaattcctcgaattttcctttaacttccttccaactatacataataggacctttagtcgcctgatgaacctgacattcctggacttaacccggtgccagataaactggatccacgaagacacttttcagtctcaccaccaattgagcacattagttctgaccggaaatcctctgatatttatggccgaaacttctctgaacggccccaagagcctaaagcatctattcttgattcagaccggcatatcaaatctggagttcatcccggttcacaatcttgagaacctggaatctctgtatttgggttccaaccacatctcatctatcaaattccccaaagactttccggctcggaatttgaaggtcctggattttcaaaataatgctatccactatatctccagagaagacatgcgctctctcgagcaggctatcaatctaagcctaaatttcaatggcaacaatgttaaaggcatcgagctcggggccttcgactctactatattccagagcctaaatttcggcggcacgcccaacctctccgtcattttcaatggactgcaaaatagtacgacccaaagtctttggttgggaacttttgaggacatcgacgacgaagatatatccagcgccatgcttaaaggtctgtgcgagatgagcgttgaaagtcttaatctacaggagcataggttttcagatatctctagcactacctttcaatgcttcacccagctccaggaactggacctgactgccacacacctgaagggtctaccatcagggatgaagggtctgaatctgctcaagaaattagtgctttcagtaaatcactttgatcaactgtgtcaaatctccgcagctaattttcccagtctcacacacctgtacatacgcggcaacgtgaagaagttacacctgggcgtcggatgtttggaaaagcttggtaacctccagacacttgacctttctcataatgatattgaagcctccgactgctgctcattgcaactgaagaatctgagccatctacagaccctcaacctatctcacaatgaaccacttggcctgcagtctcaggcctttaaggaatgccctcagctggagctgctggatctggccttcacgagactgcatatcaatgccccacagtccccgtttcaaaatctccatttcctgcaggtactgaacctgacgtattgttttctggacacatcaaatcagcacctcctagccggactgccggtcttgagacatttaaacctcaagggtaatcattttcaagatggcacaatcaccaagaccaacctccttcagacagttgggtctctggaggtcctaatcctctcctcgtgcggcctcttgagtattgaccagcaggcatttcattccctgggcaagatgtcacacgtggatctgtcccataactctcttacctgcgattcaatcgattccctgagccaccttaagggaatttatctgaacctggccgccaactcaataaacattatttcacctaggttgctgccaatcctctcacagcagtctaccatcaatctgtctcataacccccttgactgtacctgctccaacattcacttcctgacatggtacaaggagaacctgcataaactggaaggatcggaggagaccacttgtgctaatcccccctcgctgcgtggcgtcaagctgagtgatgttaagctgagttgcggcattacggccatcgggattttcttcttaattgttttcctgctgcttttggcgatactgctgtttttcgctgtgaaatacctgcttagatggaagtaccagcacatttag

SEQ ID NO: 157583 - DNA, 1986 bp, Artificial Sequence
  derived and/or modified sequence
atggctttcgatgtatcttgcttcttctgggtggtacttttcagcgctggttgtaaggtcattacttcatgggaccagatgtgtatcgaaaaggaggccaataagacatacaactgcgagaacctggggttatcagagatccctgacacacttcctaacacgactgagttcctcgaattcagcttcaattttttgcctaccattcacaacaggactttttctcggctaatgaatttgacattcttagatctcacccgttgtcagatcaattggatccacgaggacactttccagagtcaccatcagctgtccaccctggtgctcacaggcaaccctctgatctttatggcggaaacttctctgaacggtccaaaatcacttaagcacctgtttctgattcagaccggcatttctaacctagagtttattcctgtccataaccttgagaatcttgagtctttgtacctgggatccaatcacatcagctccattaagttcccgaaagacttcccagctagaaatctcaaggttctcgacttccagaataacgcgatacactatattagcagggaagacatgcggtctctcgaacaagctattaacctgagcttgaactttaatgggaataacgtcaaaggcatcgagttgggcgcattcgattcaaccatttttcagtcactaaacttcggtgggacacctaacctgtccgtgatattcaacggtctgcaaaactccacgacccagtctttgtggttgggaacatttgaggacatcgatgacgaggacattagctcggcaatgctgaaggggttatgtgaaatgtccgtcgaatcccttaaccttcaagaacaccgcttctctgacataagctccaccaccttccagtgctttacgcagctgcaggaactcgacctgacagctacccatctgaaaggattacccagcgggatgaaagggctgaacctgcttaagaagctggtgctgagcgtcaaccatttcgatcagctgtgccaaattagcgccgcaaatttcccgtccctaacccatctctacatcagaggaaacgtcaagaagctccacctgggcgttggctgcctcgagaaactcgggaacctgcaaacgcttgacctatctcacaatgatattgaggcgagcgattgttgctctttgcagttaaaaaatctgtctcatctacaaacgctgaatctcagtcacaatgagccccttggccttcagtcccaggctttcaaagagtgcccgcagctcgagttgctggacctagcctttacacgactgcacatcaacgcccctcaatctccattccagaatctgcactttctccaggtcctgaatctcacatattgctttctggatacctccaaccagcatctcttggccggattgcccgtccttcggcatctcaatctaaagggtaatcattttcaagatggcacaatcacaaaaaccaacttgctacaaacagttgggtctttggaggtactgattctctcatcttgtgggttactgagcatcgaccagcaggcatttcacagtctgggcaagatgtcccatgtggacctgagccacaatagcttgacatgcgattcaattgactccctgtctcatcttaagggaatttacctaaacctggcagccaattccatcaacataatttctccacgcctgctgcctatcctgagtcagcaatccaccataaacttatcgcacaatccattggattgcacatgttctaatattcacttcctgacatggtataaggagaacttgcataagctagagggatccgaagagacgacctgtgcaaacccaccatccctgaggggcgttaagcttagtgatgtcaaactctcatgcggtattacagcgatcggcatattcttccttattgtctttttactgttgctggccattctgttgttcttcgcggtaaagtatctgctccggtggaaatatcaacacatctag

SEQ ID NO: 157584 - DNA, 2726 bp, Artificial Sequence
  derived and/or modified sequence
acagagccacagaatgctgagcagtcaacagcatttcttgttccaagatcacccttctgagtacctctctggctgccaaattgccagggccttcacagtttgattccatttctcagctccaagcattaggtaaacccaccaagcaatcctagcctgtgatggcgtttgacgtcagctgcttcttttgggtggtgctgttttctgccggctgtaaagtcatcacctcctgggatcagatgtgcattgagaaagaagccaacaaaacatataactgtgaaaatttaggtctcagtgaaatccctgacactctaccaaacacaacagaatttttggaattcagctttaattttttgcctacaattcacaatagaaccttcagcagactcatgaatcttacctttttggatttaactaggtgccagattaactggatacatgaagacacttttcaaagccatcatcaattaagcacacttgtgttaactggaaatcccctgatattcatggcagaaacatcgcttaatgggcccaagtcactgaagcatcttttcttaatccaaacgggaatatccaatctcgagtttattccagtgcacaatctggaaaacttggaaagcttgtatcttggaagcaaccatatttcctccattaagttccccaaagacttcccagcacggaatctgaaagtactggattttcagaataatgctatacactacatctctagagaagacatgaggtctctggagcaggccatcaacctaagcctgaacttcaatggcaataatgttaaaggtattgagcttggggcttttgattcaacgatcttccaaagtttgaactttggaggaactccaaatttgtctgttatattcaatggtctgcagaactctactactcagtctctctggctgggaacatttgaggacattgatgacgaagatattagttcagccatgctcaagggactctgtgaaatgtctgttgagagcctcaacctgcaggaacaccgcttctctgacatctcatccaccacatttcagtgcttcacccaactccaagaattggatctgacagcaactcacttgaaagggttaccctctgggatgaagggtctgaacttgctcaagaaattagttctcagtgtaaatcatttcgatcaattgtgtcaaatcagtgctgccaatttcccctcccttacacacctctacatcagaggcaacgtgaagaaacttcaccttggtgttggctgcttggagaaactaggaaaccttcagacacttgatttaagccataatgacatagaggcttctgactgctgcagtctgcaactcaaaaacctgtcccacttgcaaaccttaaacctgagccacaatgagcctcttggtctccagagtcaggcattcaaagaatgtcctcagctagaactcctcgatttggcatttacccgcttacacattaatgctccacaaagtcccttccaaaacctccatttccttcaggttctgaatctcacttactgcttccttgataccagcaatcagcatcttctagcaggcctaccagttctccggcatctcaacttaaaagggaatcactttcaagatgggactatcacgaagaccaacctacttcagaccgtgggcagcttggaggttctgattttgtcctcttgtggtctcctctctatagaccagcaagcattccacagcttgggaaaaatgagccatgtagacttaagccacaacagcctgacatgcgacagcattgattctcttagccatcttaagggaatctacctcaatctggctgccaacagcattaacatcatctcaccccgtctcctccctatcttgtcccagcagagcaccattaatttaagtcataaccccctggactgcacttgctcgaatattcatttcttaacatggtacaaagaaaacctgcacaaacttgaaggctcggaggagaccacgtgtgcaaacccgccatctctaaggggagttaagctatctgatgtcaagctttcctgtgggattacagccataggcattttctttctcatagtatttctattattgttggctattctgctattttttgcagttaaataccttctcaggtggaaataccaacacatttagtgctgaaggtttccagagaaagcaaataagtgtgcttagcaaaattgctctaagtgaaagaactgtcatctgctggtgaccagaccagacttttcagattgcttcctggaactgggcagggactcactgtgcttttctgagcttcttactcctgtgagtcccagagctaaagaaccttctaggcaagtacaccgaatgactcagtccagagggtcagatgctgctgtgagaggcacagagccctttccgcatgtggaagagtgggaggaagcagagggagggactgggcagggactgccggccccggagtctcccacagggaggccattccccttctactcaccgacatccctcccagcaccacacaccccgcccctgaaaggagatcatcagcccccacaatttgtcagagctgaagccagcccactacccacccccactacagcattgtgcttgggtctgggttctcagtaatgtagccatttgagaaacttacttggggacaaagtctcaatccttattttaaatgaaaaaagaaaagaaaagcataataaatttaaaagaaaaggctgagaaatgaaa

SEQ ID NO: 157585 - protein, 359 aa, Artificial Sequence
  derived and/or modified sequence
MIAAQAKLVYHLNKYYNEKCQARKAAIAKTIREVCKVVSDVLKEVEVQEPRFISSLNEMDNRYEGLEVISPTEFEVVLYLNQMGVFNFVDDGSLPGCAVLKLSDGRKRSMSLWVEFITASGYLSARKIRSRFQTLVAQAVDKCSYRDVVKMVADTSEVKLRIRDRYVVQITPAFKCTGIWPRSAAHWPLPHIPWPGPNRVAEVKAEGFNLLSKECHSLAGKQSSAESDAWVLQFAEAENRLQMGGCRKKCLSILKTLRDRHLELPGQPLNNYHMKTLVSYECEKHPRESDWDESCLGDRLNGILLQLISCLQCRRCPHYFLPNLDLFQGKPHSALENAAKQTWRLAREILTNPKSLEKL

SEQ ID NO: 157586 - DNA, 1080 bp, Artificial Sequence
  derived and/or modified sequence
atgatagcagcacaagcaaagttagtatatcacctgaacaagtattataatgaaaagtgccaggccagaaaagccgcaattgctaaaacaatccgagaggtctgtaaggtggtcagcgatgtcctcaaggaggtggaggtgcaggagcccagattcatttcatccttaaacgaaatggataataggtatgaagggttagaggtgatctcccccaccgaattcgaagtggtcctctatctgaatcagatgggcgtgttcaatttcgttgatgacgggtcgttgcctgggtgcgctgtgttgaaactgtctgacgggagaaagcggagtatgagcctgtgggttgaattcattaccgcttcaggttacctatctgcccgtaagatccgcagcagattccagacactggttgcccaggccgtggataagtgttcttatagagatgtagttaaaatggttgctgacacttctgaggtgaaattgcgtatccgggatcggtacgtggtgcaaattactccagctttcaaatgtaccggtatttggccacgcagtgcggctcattggcccctgcctcatattccatggcctggccccaacagagtggctgaagtaaaggcggagggatttaatctgctgtcaaaagaatgccattcgttggccggaaaacagtcctcagccgagtcggatgcctgggtgctccagttcgccgaggccgaaaaccgcctgcagatgggcggatgtcggaaaaagtgtctctccatcctgaaaactctaagggacagacacctagagctgccagggcagcccctgaacaattatcacatgaaaactctcgtgtcttacgagtgcgaaaagcatccgcgcgagagcgattgggacgagagctgcctgggcgaccggttgaatgggatcttactgcaacttattagctgcctccagtgcaggagatgcccacactatttcttgccaaacttagatctgtttcaggggaagcctcattcggctctcgaaaacgccgccaagcagacctggcggttggccagggagatactcacaaatcccaagagccttgagaagttatag

SEQ ID NO: 157587 - DNA, 1080 bp, Artificial Sequence
  derived and/or modified sequence
atgattgctgcccaggccaagctggtgtaccacctgaacaagtactacaatgagaagtgccaggccaggaaggccgccatcgccaagaccatccgggaggtgtgcaaggtggtgtctgatgtgctgaaggaggtggaggtgcaggagccccgcttcatcagcagcctgaatgagatggacaacagatatgagggcctggaggtgatcagccccacagaatttgaggtggtgctgtacctgaaccagatgggcgtcttcaactttgtggatgatggcagcctgcccggctgtgctgtgctgaagctgagtgatggcaggaagaggtccatgagcctgtgggtggagttcatcacagccagcggctacctgagcgccaggaagatccgcagccgcttccagaccctggtggcccaggccgtggacaagtgcagctacagagatgtggtgaagatggtggccgacaccagcgaggtgaagctgcgcatccgggaccgctacgtggtgcagatcaccccagccttcaagtgcaccggcatctggcccaggtctgctgcccactggcccctgccccacatcccctggccaggccccaacagagtggccgaggtgaaggccgagggcttcaacctgctgagcaaggagtgccacagcctggccggcaagcagagcagcgctgagagtgatgcctgggtgctgcagtttgctgaggccgagaaccggctgcagatgggcggctgcaggaagaagtgcctgagcatcctgaagaccctgcgggacagacacctggagctgcccggccagcccctgaacaactaccacatgaagaccctggtgtcctatgaatgtgagaagcacccccgggagagtgactgggatgagagctgcctgggggaccggctgaatggcatcctgctgcagctgatcagctgcctgcagtgccgccgctgcccccactacttcctgcccaacctggacctcttccagggcaagccccacagcgccctggagaatgctgccaagcagacctggaggctggcccgggagatcctgaccaaccccaagagcctggagaagctgtag

SEQ ID NO: 157588 - DNA, 2907 bp, Artificial Sequence
  derived and/or modified sequence
gctcttagacaaaccaacagcagcttcttctgacatatacacacgcacactcaccccggacacacactcagcacacttttcctccatttgattaacagtgctgcacacacaatgattacgggaaagcgcaaataaatacggaaaggggtgcttattttgactactggaagagctttgctgggtctcagcgcaacttttgttttttattcctgagaaggtgatctctccatgcggttctctcacacaaggattctttaaaagaggaagagagacaagcagaggggggaggacagtctttcactttaagaacggctgggctcaaagataaaaggaagggaaaagcagcagcagcagcagcagcagcagcagcagcagcagcagcagcagcagcagcagcagggaaaccaacgctgcagcacttccgaaaggcatttttgatccatttctgagtgttgcggcccgtttctccaccgaagttggctccagctctagcagccgcattggatcccacagcttactgcgagactccggtgtacaatccggatctctgccccaacatgattgcggcccaggccaagctggtctaccatctgaataaatactacaacgaaaaatgccaagccaggaaagctgccattgccaaaactatccgggaagtctgcaaagtagtttccgacgtactgaaggaagtggaagtgcaggagccgcggttcatcagctctctcaacgagatggacaatcgctacgagggcctcgaggtcatctcccccaccgaatttgaagtggtgctttatctcaaccaaatgggggtgttcaacttcgtggacgatggctcactgcccggctgcgcggtgctgaagttgagcgacgggcgcaagaggagcatgtccctctgggtggaattcattaccgcctccggctacctctcggcgcgcaaaatccggtccaggtttcagacgctggtggctcaagcggtagacaaatgtagctaccgggatgtggtaaagatggtggcagacaccagcgaagtgaaactgagaatccgagataggtacgtggtgcagatcacgccggcctttaaatgcaccgggatctggccgaggagtgctgcccactggccacttccccacatcccctggccgggacccaaccgggtggcggaggtcaaggcggaaggtttcaatctcttgtccaaggagtgccactccttggccggcaagcagagctcggcggagagcgacgcctgggtgctgcagttcgcggaggcagagaacagactgcagatggggggctgcagaaagaagtgcctctccatcctcaaaaccttaagggatcgtcaccttgaactgccgggccagcccttgaacaattaccatatgaagactctggtttcctacgagtgtgaaaagcatccccgagagtcggactgggacgagtcttgcctgggtgatcggctgaacgggattttgctgcaacttatctcctgcctgcagtgccggcggtgtccccactactttctaccgaacttagatctgtttcaaggcaaacctcactcagctctggaaaacgctgccaaacaaacgtggcgactggcaagagagatcctgaccaacccgaaaagtttggaaaaactttagaggatgatttaatcaagagccgaaattattacccttctcaaagtccttattaagtgtaaacttctgttcaattcctaatattccactccgcagtgcaaacaatctcttcctttaaaaaggaataataatacaatatttaaacatcatctcacccacccccacaaggggagaaaaagtaggggaagcggatggagaaaaacccaaagccactagtattagaagacttctttccacacgatttcctatctcccttgaaaagtacaccgtaacactccgtaaacagcccagctgtaacgccagaccgagacgaacactctgcctaactatcaaaggattatagcaatcctggtgatttaggtgcatctgtctgtgagtaaacacgatttggatatgccatctgaaagaaactgtaatgtatattttgatttgtaacaaatattgtgatctcacattgtctttgaaagtgtggatgttggtgttttgtgatttggtgaacagaacttaaattgccattctggatacttccagacattttccactaacaaagatatcatttaaaggtagatttcttcctggtacttttatctgtctttgaaagtgtctgaactttaaaaagtttacattttgtttcaaatattgcttgttctatttctaacattccataaatatacttgaaatgttatttaaatatattcaaagaaatttgaattcagcttatataataacgcttgaatatctgaattatatatttgaaaaatgcacttgaaatacactggataattacttttgtgatttagattttaatttgttgctggtttttatttaattagatggtaataaatgaagtaaaataaaagttgttgtgtctcactttaaattgtttcctatcacaagatgtaatgatgcattttgaaaatcaaacccacttgaatatcttaaatattttgagaaatatgctaatgaaatccttaaaaataaaacattggagaaaagctctttctgtataggtccataagataacaatctactctcagtctctaacttacttgtaagacaattcctttctacaacagaaacaatttaaatctacctttgaaagcttgctcttcttgtagcatttttgataatataagaaaaaaagtctatcatgacagtagagatgactgagttaaaaatctgactaattcagaggaaatgaacttaacaaagtcataatgaaacttcgaaaattatgtatgaaaactaataaaacgatcctttctgaccaata

SEQ ID NO: 157589 - DNA, 1080 bp, Artificial Sequence
  derived and/or modified sequence
atgatcgccgcccaggccaagctggtgtaccacctgaacaagtactataatgaaaaatgccaggcacggaaagctgctattgcaaagacgattcgcgaggtttgcaaggtagtgtcagatgttctcaaagaggtggaggtgcaagaaccccgattcatttcatcactaaatgagatggacaacagatacgaaggactcgaagtgattagcccgacagaattcgaagttgttctgtatctaaatcagatgggggtcttcaacttcgtggacgacggcagcctcccaggctgcgctgttctgaagctgtcagacggcaggaagcgatccatgtccctgtgggtggagtttataaccgccagtggctatctgtcagctagaaaaataagaagccgattccaaacactggtggctcaggccgtagacaaatgcagctaccgtgatgttgtcaagatggtggcagacaccagcgaggtcaaacttaggataagagacagatacgttgtgcagattacgccagcatttaaatgcacaggcatctggcccagatccgcggcgcactggcctctcccgcacataccttggcccggcccaaacagggtggctgaagttaaagccgaggggttcaacttattgagtaaggagtgtcacagcctggctggtaagcagtcctccgcagagtctgatgcctgggtgttacaattcgctgaggccgagaatcgtctgcagatgggagggtgccgcaagaaatgcctttccattctcaagacacttcgggataggcacctggagcttccaggccagcccctcaataattatcacatgaagacactggtgtcctacgaatgcgaaaagcatccacgggaatccgactgggatgaaagctgcctaggtgataggctgaatgggattttgctgcaattaatttcctgccttcagtgccggcgctgcccccactattttctgccaaacctagatcttttccaaggtaagccacactccgctctggagaacgccgcgaagcagacctggcggctggcacgagaaattttaaccaatcctaagtccctcgaaaagctctag

SEQ ID NO: 157590 - DNA, 1080 bp, Artificial Sequence
  derived and/or modified sequence
atgattgctgcccaggccaagctcgtctaccatctgaataagtattacaatgagaagtgccaggcccgtaaggcagctattgccaaaactatccgggaggtatgcaaggtcgtgtccgacgtgctgaaggaagtcgaggtacaggagcccagattcatctcatcgttgaatgagatggataatcgttatgaagggttggaggtgatttcccccaccgaatttgaggtagtcctttaccttaaccagatgggtgttttcaattttgtggatgacggatccttaccgggttgtgcagtattaaagctctccgacggacggaagaggagcatgtctctgtgggtcgagttcattactgcttccgggtatttgtccgcgagaaagattcggtctcgctttcagaccctggttgcccaggccgtggataaatgtagttacagggatgttgtaaagatggttgctgacacaagcgaggtcaagttgagaattcgggaccggtatgttgtccagatcaccccagcattcaagtgtacaggcatatggcctcgctctgctgcacactggcccctgccccacataccatggcctgggccaaacagggtggctgaagtgaaagcggagggatttaatctcctgtctaaagaatgtcactctttagcaggtaagcagtcttctgctgagtcggacgcttgggtgctgcaatttgcggaagccgagaatcggcttcagatggggggttgtcgcaagaagtgcttatctattctgaaaaccctacgggaccggcacctggagttgcctggccagccactgaacaattatcatatgaaaaccctggtcagctacgaatgtgagaagcaccccagagaaagtgattgggacgaaagttgtcttggggaccggctgaacgggatcctcctccaactcatatcctgcctacaatgtcgcaggtgccctcactacttccttccaaatctggatctgtttcagggaaagccacatagcgcactggagaacgcagcaaaacagacatggcgcttggcccgagaaatcttgaccaaccctaagagtctcgagaaactgtag

SEQ ID NO: 157591 - DNA, 1080 bp, Artificial Sequence
  derived and/or modified sequence
atgatcgccgcccaggccaagctggtgtaccacctgaacaagtactacaacgagaagtgccaggccagaaaggccgccatcgccaagaccatcagagaggtgtgcaaggtggtgagcgacgtgctgaaggaggtggaggtgcaggagcccagattcatcagcagcctgaacgagatggacaacagatacgagggcctggaggtgatcagccccaccgagttcgaggtggtgctgtacctgaaccagatgggcgtgttcaacttcgtggacgacggcagcctgcccggctgcgccgtgctgaagctgagcgacggcagaaagagaagcatgagcctgtgggtggagttcatcaccgccagcggctacctgagcgccagaaagatcagaagcagattccagaccctggtggcccaggccgtggacaagtgcagctacagagacgtggtgaagatggtggccgacaccagcgaggtgaagctgagaatcagagacagatacgtggtgcagatcacccccgccttcaagtgcaccggcatctggcccagaagcgccgcccactggcccctgccccacatcccctggcccggccccaacagagtggccgaggtgaaggccgagggcttcaacctgctgagcaaggagtgccacagcctggccggcaagcagagcagcgccgagagcgacgcctgggtgctgcagttcgccgaggccgagaacagactgcagatgggcggctgcagaaagaagtgcctgagcatcctgaagaccctgagagacagacacctggagctgcccggccagcccctgaacaactaccacatgaagaccctggtgagctacgagtgcgagaagcaccccagagagagcgactgggacgagagctgcctgggcgacagactgaacggcatcctgctgcagctgatcagctgcctgcagtgcagaagatgcccccactacttcctgcccaacctggacctgttccagggcaagccccacagcgccctggagaacgccgccaagcagacctggagactggccagagagatcctgaccaaccccaagagcctggagaagctgtag

SEQ ID NO: 157592 - protein, 496 aa, Artificial Sequence
  derived and/or modified sequence
MFRSKRSGLVRRLWRSRVVPDREEGGSGGGGGGDEDGSLGSRAEPAPRAREGGGCGRSEVRPVAPRRPRDAVGQRGAQGAGRRRRAGGPPRPMSEPGAGAGSSLLDVAEPGGPGWLPESDCETVTCCLFSERDAAGAPRDASDPLAGAALEPAGGGRSREARSRLLLLEQELKTVTYSLLKRLKERSLDTLLEAVESRGGVPGGCVLVPRADLRLGGQPAPPQLLLGRLFRWPDLQHAVELKPLCGCHSFAAAADGPTVCCNPYHFSRLCGPESPPPPYSRLSPRDEYKPLDLSDSTLSYTETEATNSLITAPGEFSDASMSPDATKPSHWCSVAYWEHRTRVGRLYAVYDQAVSIFYDLPQGSGFCLGQLNLEQRSESVRRTRSKIGFGILLSKEPDGVWAYNRGEHPIFVNSPTLDAPGGRALVVRKVPPGYSIKVFDFERSGLQHAPEPDAADGPYDPNSVRISFAKGWGPCYSRQFITSCPCWLEILLNNPR

SEQ ID NO: 157593 - protein, 338 aa, Artificial Sequence
  derived and/or modified sequence
MFRSKRSGLVRRLWRSRVVPDREEGGSGGGGGGDEDGSLGSRAEPAPRAREGGGCGRSEVRPVAPRRPRDAVGQRGAQGAGRRRRAGGPPRPMSEPGAGAGSSLLDVAEPGGPGWLPESDCETVTCCLFSERDAAGAPRDASDPLAGAALEPAGGGRSREARSRLLLLEQELKTVTYSLLKRLKERSLDTLLEAVESRGGVPGGCVLVPRADLRLGGQPAPPQLLLGRLFRWPDLQHAVELKPLCGCHSFAAAADGPTVCCNPYHFSRLCGPESPPPPYSRLSPRDEYKPLDLSDSTLSYTETEATNSLITAPGEFSAADAGIGSRGNRGLESSVPCS

SEQ ID NO: 157594 - DNA, 2886 bp, Artificial Sequence
  derived and/or modified sequence
cgatcgagggagctgagccgagagaaagagccgccgggcgctgcctcgccagacctcgctgggaccccggggccaccgggaggcacttttgtggaggggggagggggggcgacctcggcagcctcggcgcacgaagcgtccgagggcagcgtggggcgggctgcgacctctgcatcggtggactgcatttttaattaaggattcccagcagctctttgggatttttacagcttccactcatgtgttgacacccgcgtccaggagaaactcgctccaagtgcatctagcgcctgggacctgagacggcgttggcctttcgtgcatgcaaatccagggatttaggttttgtttgggatttccttttctttctttccttttttttttctttttgcagggagtaagaagggagctgggggtatcaacaagcctgcctttcggatcctgcgggaaaagcccatgtagttaagcgctttggtttaaaaaaaaggcaaggtaaaggcagggctttccagacacatttaggggttcgcgcgagcgctttgtgctcatggaccagccgcacaacttttgaaggctcgccggcccatgtggggtctttctggcggcgcgccgcctgcagcccccctaaagcgcgggggctggagttgttgagcagccccgccgctgtggtccatgtagccgctggccgcgcgcggactgcggctcggcgtgcgcgtgttcccggccgtcccgcctcggcgagctccctcatgttgtcgccctgcggcgccccttcgacgacaggctgtgcgcggtctgcacggcgctccgcggcggagcttcatgtggggctgcgacccgcgcagccggcgcctcgctgagggaacggacccccggtaaccggagaccgcctcccccccacccctggcgccaaaggatatcgtatgttcaggtccaaacgctcggggctggtgcggcgactttggcgaagtcgtgtggtccccgaccgggaggaaggcggcagcggcggcggcggtggcggcgacgaggatgggagcttgggcagccgagctgagccggccccgcgggcaagagagggcggaggctgcggccgctccgaagtccgcccggtagccccgcggcggccccgggacgcagtgggacagcgaggcgcccagggcgcggggaggcgccggcgcgcagggggccccccgaggcccatgtcggagccaggggccggcgctgggagctccctgctggacgtggcggagccgggaggcccgggctggctgcccgagagtgactgcgagacggtgacctgctgtctcttttcggagcgggacgccgccggcgcgccccgggacgccagcgaccccctggccggggcggccctggagccggcgggcggcgggcggagtcgcgaagcgcgctcgcggctgctgctgctggagcaggaactcaaaaccgtcacgtactcgctgctgaagcggctcaaggagcgctcgctggacacgctgctggaggcggtggagtcccgcggcggcgtgccgggcggctgcgtgctggtgccgcgcgccgacctccgcctgggcggccagcccgcgccgccgcagctgctgctcggccgcctctttcgctggcccgacctgcagcacgccgtggagctgaagcccctgtgcggctgccacagcttcgccgccgccgccgacggccctaccgtgtgctgcaacccctaccacttcagccggctctgcgggcccgaatctccgccacctccctactctcggctgtctcctcgcgacgagtacaagccactggatctgtccgattccacattgtcttacactgaaacggaggctaccaactccctcatcactgctccgggtgaattctcagacgccagcatgtctccggacgccaccaagccgagccactggtgcagcgtggcgtactgggagcaccggacgcgcgtgggccgcctctatgcggtgtacgaccaggccgtcagcatcttctacgacctacctcagggcagcggcttctgcctgggccagctcaacctggagcagcgcagcgagtcggtgcggcgaacgcgcagcaagatcggcttcggcatcctgctcagcaaggagcccgacggcgtgtgggcctacaaccgcggcgagcaccccatcttcgtcaactccccgacgctggacgcgcccggcggccgcgccctggtcgtgcgcaaggtgccccccggctactccatcaaggtgttcgacttcgagcgctcgggcctgcagcacgcgcccgagcccgacgccgccgacggcccctacgaccccaacagcgtccgcatcagcttcgccaagggctgggggccctgctactcccggcagttcatcacctcctgcccctgctggctggagatcctcctcaacaaccccagatagtggcggccccggcgggaggggcgggtgggaggccgcggccaccgccacctgccggcctcgagaggggccgatgcccagagacacagcccccacggacaaaaccccccagatatcatctacctagatttaatataaagttttatatattatatggaaatatatattatacttgtaattatggagtcatttttacaatgtaattatttatgtatggtgcaatgtgtgtatatggacaaaacaagaaagacgcactttggcttataattctttcaatacagatatattttctttctcttcctccttcctcttccttactttttatatatatatataaagaaaatgatacagcagagctaggtggaaaagcctgggtttggtgtatggtttttgagatattaatgcccagacaaaaagctaataccagtcactcgataataaagtattcgcattatagttttttttaaaaaaaaaa

SEQ ID NO: 157595 - DNA, 1491 bp, Artificial Sequence
  derived and/or modified sequence
atgttcagatctaagcgctccggcctggttaggcgcttatggcgttctcgcgtcgtacccgaccgcgaagagggagggtcgggcggcggcggtggaggggatgaggacggctccctgggtagccgcgcggaacccgctcctcgagccagggagggaggaggatgtggtcggtctgaagttaggcctgttgcgcccaggagacccagagatgctgtaggccaaaggggcgcccagggtgccggccgacgaagacgtgcggggggcccccctaggccgatgagtgaacctggtgctggagctggcagttccctattggatgtcgccgagcctgggggtcctggttggctaccagagagtgattgcgaaaccgtaacctgttgtctgtttagtgaacgcgatgccgccggagcgccgcgggatgcttcagatcctctcgccggcgccgccctcgagccagctggaggaggccgatcgcgggaagctagatcccggttgctgctccttgagcaggaactaaagaccgtcacctatagcctccttaaaagactcaaagaaaggtcccttgatactctgctcgaagcagtggaaagccgggggggtgtgcccgggggctgcgttctcgttccccgggcggatctgcgacttggcggccagcccgctccgccacaacttttactcggacgtctgttcaggtggcctgaccttcagcacgcagtggagctgaagcccctgtgtggatgccacagttttgctgctgcggctgatggtcccactgtatgttgcaatccttatcacttctcgcgcctctgtggacccgaaagtccccctcctccttattctagattgagtccacgggatgagtataaaccactggacctctcagactctacattgtcttatacagaaaccgaggctaccaactcactcatcactgcgcctggcgaatttagcgatgctagtatgtctccggatgccaccaaaccctctcactggtgctcggtcgcttattgggaacatcggacgcgcgtgggccgtttgtatgccgtttatgaccaggccgtgtctattttttatgacttgccgcaggggtccggcttctgtctcggtcaactcaacttggaacagcgctctgagtcagtcagaaggacccgaagtaagattggctttggcattctcctcagtaaagagcccgacggcgtgtgggcctacaatcggggggagcatccgattttcgtgaattctccaacactcgacgcacctgggggtcgcgccttggttgtgcgcaaggtacctcccgggtattcgattaaggtttttgactttgagcggtctggtctgcagcatgcccctgagccggacgctgccgatggcccttacgatccaaattcagtaaggatcagcttcgcaaaaggatggggaccatgttacagtagacagttcataacctcctgcccttgctggttggaaattctgcttaacaatcctcgctag

SEQ ID NO: 157596 - DNA, 1017 bp, Artificial Sequence
  derived and/or modified sequence
atgtttcggagcaagcgctccggactggtccgtcgcctgtggaggtctcgggtggtgcctgatcgggaggagggcggatccggaggcggcggcggaggtgatgaggacggcagccttggaagtagagctgagcctgctccccgagcgcgggagggcggggggtgtggaaggtcagaggttaggccggtggcccctcggaggcctcgagacgcggtcgggcagcgaggagcacagggagctggccgacggaggagggcaggaggacccccccgccctatgtctgaaccaggagctggcgctggttcctccctcctcgacgtcgctgagccaggaggtcctggatggctcccggaaagtgattgcgaaaccgtgacttgctgcctgtttagcgaacgcgatgccgcaggcgctccgagagatgccagtgatcccctcgctggtgccgcgctcgaacctgccggcggcggtaggtcccgagaagcgaggagtaggctgctgctgttggagcaggaactgaagacggtgacatactcactcttgaaaaggctcaaagagcggagtctggacactcttttggaggctgttgagagtcgcggaggcgttcccgggggctgtgtccttgtaccccgcgctgatctcaggcttggtggccaaccagctcctcctcagctcctcctgggcagactgttcagatggcccgacctacagcacgccgttgagctaaaacctctatgcggatgccactcgttcgctgcggccgccgacggaccaacagtgtgttgtaacccctatcatttttcccggctttgcggaccagagtctcccccccccccgtactctcggctttctccccgggatgagtataaaccactggatctttctgactctacactatcctataccgaaaccgaagctaccaatagcctgatcacggctccaggcgaattttctgcagccgacgccggcatcggcagcagaggtaatcgcggacttgagagtagtgtgccatgcagctag

SEQ ID NO: 157597 - DNA, 1491 bp, Artificial Sequence
  derived and/or modified sequence
atgttccgcagcaagaggagcggcctggtgcggcggctgtggaggagccgggtggtgcctgaccgggaggagggcggcagcggcggcggcggcggcggagatgaagatggcagcctgggcagcagagctgagcccgccccccgggcccgggagggcggcggctgcggccgctctgaggtgcggcctgtggccccccggcggcccagagatgctgtgggccagagaggagcccagggcgccggcagaagaagaagagctgggggccccccccggcccatgtctgagcccggggccggggccggcagcagcctgctggatgtggccgagcccggcggccctggctggctgcctgagagtgactgtgaaacagtgacctgctgcctcttcagcgagagagatgctgctggggcccccagagatgccagtgaccccctggccggggccgccctggagcctgctgggggcggccgcagccgggaggcccggagccggctgctgctgctggagcaggagctgaagacagtgacctacagcctgctgaagaggctgaaggagaggagcctggacaccctgctggaggccgtggagagcagaggaggagtgcctgggggctgtgtgctggtgcccagggctgacctgcggctgggcggccagcctgccccaccccagctgctgctgggccgcctcttccgctggccagacctgcagcacgctgtggagctgaagcccctgtgtggctgccacagctttgctgctgctgctgatggccccaccgtgtgctgcaacccctaccacttcagccggctgtgtggccctgagagccccccaccaccctacagccggctgagccccagagatgagtacaagcccctggacctgagtgacagcaccctgagctacacagaaacagaggccaccaacagcctcatcacagcccctggagagttcagtgatgcctccatgagcccagatgccaccaagcccagccactggtgcagcgtggcctactgggagcacaggaccagggtgggccgcctgtatgctgtgtatgaccaggccgtgtccatcttctatgacctgccccagggcagcggcttctgcctgggccagctgaacctggagcagaggtctgagagcgtgcggaggaccaggagcaagattggatttggcatcctgctgagcaaggagccagatggagtgtgggcctacaacagaggagagcaccccatctttgtgaacagccccaccctggatgcccctgggggccgggccctggtggtgaggaaggtgcccccaggctacagcatcaaggtgtttgattttgagaggagcggcctgcagcacgcccctgagccagatgctgctgatggcccctatgaccccaacagcgtgcgcatcagctttgccaagggctggggcccctgctacagccggcagttcatcaccagctgcccctgctggctggagatcctgctgaacaaccccaggtag

SEQ ID NO: 157598 - DNA, 1017 bp, Artificial Sequence
  derived and/or modified sequence
atgttccgcagcaagaggagcggcctggtgcggcggctgtggaggagccgggtggtgcctgaccgggaggagggcggcagcggcggcggcggcggcggagatgaagatggcagcctgggcagcagagctgagcccgccccccgggcccgggagggcggcggctgcggccgctctgaggtgcggcctgtggccccccggcggcccagagatgctgtgggccagagaggagcccagggcgccggcagaagaagaagagctgggggccccccccggcccatgtctgagcccggggccggggccggcagcagcctgctggatgtggccgagcccggcggccctggctggctgcctgagagtgactgtgaaacagtgacctgctgcctcttcagcgagagagatgctgctggggcccccagagatgccagtgaccccctggccggggccgccctggagcctgctgggggcggccgcagccgggaggcccggagccggctgctgctgctggagcaggagctgaagacagtgacctacagcctgctgaagaggctgaaggagaggagcctggacaccctgctggaggccgtggagagcagaggaggagtgcctgggggctgtgtgctggtgcccagggctgacctgcggctgggcggccagcctgccccaccccagctgctgctgggccgcctcttccgctggccagacctgcagcacgctgtggagctgaagcccctgtgtggctgccacagctttgctgctgctgctgatggccccaccgtgtgctgcaacccctaccacttcagccggctgtgtggccctgagagccccccaccaccctacagccggctgagccccagagatgagtacaagcccctggacctgagtgacagcaccctgagctacacagaaacagaggccaccaacagcctcatcacagcccctggagagttctctgctgctgatgctggcatcggcagccggggcaacagaggcctggagagctctgtgccctgcagctag

SEQ ID NO: 157599 - DNA, 1491 bp, Artificial Sequence
  derived and/or modified sequence
atgttccggagcaagcggagcggcctggtgcggcggctgtggcggtctcgggtggtccctgatcgggaggaggggggaagcggcggcggcggcggcggcgatgaggacggctctctcgggagccgagcggaacccgcccccagagctcgcgagggcggggggtgtggacgctctgaagttaggccagtcgcccctcgccgaccaagagacgctgtcggccagcgaggtgcccagggtgcgggcaggagaaggcgggccggcggcccgcccaggcctatgtctgaacccggggctggggccggttctagtcttttggacgtcgctgagcctggcggcccagggtggctgcctgagtcagactgcgagaccgtcacatgctgcctcttttctgaaagagacgccgccggcgcacctcgggatgcaagtgacccgctcgctggagccgcactagagcctgctggcggcggaaggagcagagaggctcgcagcagacttttgttattggaacaggagctgaagactgtgacttatagcctcctgaaacgactgaaggagagatccctggacacccttcttgaggctgtggaaagcagggggggagtccctggcgggtgcgtactggtcccacgcgctgacctgagactgggcgggcagcccgccccaccacagttgctactgggccggctgttccgttggccagatctgcagcacgctgtggaacttaagcctctctgcggctgtcactctttcgccgctgccgcagatggaccaaccgtgtgctgtaatccatatcactttagtcggctgtgtggccctgaatccccgcctcccccgtactctcggctgtctccccgcgacgagtacaaacccctagatctgagtgactccacactgagctacactgagacagaagccacaaatagtctgatcaccgcgccaggagagttctctgacgcctcaatgtctcccgatgccacaaaaccttcgcattggtgctctgtcgcgtactgggaacatcgcacacgagtaggccggttatacgccgtctatgaccaagccgttagcatattttatgacctcccacaagggagtgggttttgtctgggccagcttaatctggagcaacgtagtgagagtgttcggcgcacacggtctaaaatcggattcggaattttgctgagcaaagagccggatggtgtctgggcttacaataggggcgagcacccaatctttgtcaactcgcctacccttgacgctcctgggggccgcgcattggtcgtccgcaaggtgcctcccggatatagtatcaaggtgttcgatttcgagagatcaggcctgcagcatgctcccgaacccgacgccgccgacggaccatacgaccccaattcagtgagaattagtttcgccaaaggatgggggccttgctattctaggcagtttatcacctcatgtccctgctggctcgagatcctgttaaataatccccgatag

SEQ ID NO: 157600 - DNA, 1017 bp, Artificial Sequence
  derived and/or modified sequence
atgttccggagcaagcggagcggcctggtgcggcggctgtggcggtctagagttgtccccgatagagaagaaggtgggtcgggcggtgggggaggcggcgatgaagacggatccctgggtagccgggctgaacctgcccccagggcccgcgagggggggggttgcggtagaagcgaagtcagacctgtggcacctaggagaccaagagatgccgtgggccagcgcggtgctcagggggccggtagacgccgcagggccggcggcccacctcggcctatgtccgaaccgggtgccggagctggcagcagtttgctagatgtggctgagccgggaggccctggatggctgcctgaatcggactgtgagacggtgacatgttgtctattctctgaacgtgatgccgccggggcacccagggatgcttcagacccattagctggagcagccctggagccagctgggggtggcagatcgagggaagcaaggtcgcgactgctgttactggagcaggagctgaaaaccgttacttactctttgttgaaaaggctaaaggagagaagtctcgataccctgctggaagcggtggagagccgaggtggcgtccccggcggttgcgttttagttccacgagccgacttgaggcttggagggcagcccgctcctccccagctcttgctgggcaggctatttcggtggcccgacttgcaacatgcagtggagcttaaacctctttgcggttgccacagtttcgccgcagccgctgatgggcccaccgtttgctgtaatccataccactttagtcgactctgcggtcccgagtctcccccccccccttatagccgcttatccccccgtgacgagtataaaccactggatttatcagactcaacgctgtcatacacggagacagaggccacgaactccctaatcaccgcacccggggagttctccgcagctgatgcagggattggaagtcgcggcaatagaggcctggagtcttcagtaccctgctcctag

SEQ ID NO: 157601 - DNA, 1491 bp, Artificial Sequence
  derived and/or modified sequence
atgttccgctctaagcgatccgggcttgtcaggcggttgtggcgaagtcgcgtagtgcctgatcgggaagagggaggcagcggaggaggtggaggcggtgatgaggacgggagcctgggttctcgggcagaacccgctcctcgggctcgagaaggtggaggatgtgggcgatctgaggttcggcctgtggcccctcggagaccccgagatgctgtgggccagcgaggcgcacagggagcgggaaggcgacggcgagccggtgggcctccacgcccaatgagcgagcctggcgctggggctgggtcatctctgcttgacgtagcagagcccggaggaccagggtggctgcctgagagtgattgcgaaacagttacttgttgtttgtttagtgagagggacgcggctggcgcaccaagggacgccagcgatcctttagcaggagcagcactagagcctgccggaggtgggaggagtcgcgaagccagaagccgcttgttgttgctggaacaggaactgaaaactgtgacctactcattattgaagagactaaaggaaagatcactggacacacttctcgaggctgttgagtccaggggcggtgtgcctggaggttgcgtcttggtccccagagcggatctcagattggggggacagccagcccctcctcagctgctgctcggacgactctttaggtggccagatcttcaacacgctgtggagctcaagccactgtgcggatgccactcgtttgccgctgcagcggacggacccaccgtgtgttgtaatccctaccacttcagcagactgtgtgggcctgaaagtccccctcctccgtattcaagactgagtccacgcgatgagtacaaacccctcgatttatctgattccaccttaagctacaccgagaccgaagctaccaacagtttgataactgccccaggcgaattctccgatgcttctatgtctccggatgccacgaaaccttctcactggtgtagtgttgcctactgggagcaccgaactagggtaggacgcctttatgctgtgtatgatcaggccgtgtctatattctacgatcttcctcagggatccggcttttgtctgggccaactaaacttggagcagcgatctgagtctgttcgtcgtactcgatcaaaaataggattcgggatactgctttcaaaagaacctgatggggtctgggcctataataggggggagcatcccattttcgtcaattcgcctactctcgatgcccctgggggacgagccttggtggtccggaaggtgcccccaggttactccataaaggtgttcgattttgaacgctctggactgcaacatgcccctgagccagatgccgcagatggaccttatgatcctaattcagtgaggatttctttcgccaaaggctgggggccttgttattcccgacagttcatcacctcttgtccttgttggctggaaattctgctgaataacccccgatag

SEQ ID NO: 157602 - DNA, 1017 bp, Artificial Sequence
  derived and/or modified sequence
atgttcaggagtaagcgaagtggcctggttcgacggctgtggagaagtcgggtggtgcccgaccgggaagagggcggatctgggggaggaggagggggtgacgaagatggcagcttagggtcccgcgctgaacccgcaccgagggctcgggaaggcggtggctgtggtcggtctgaagtgcggcctgttgcgcctagaaggccccgtgatgccgtggggcagagaggagctcagggagccggaagaaggcgcagggccggaggccctccaagaccaatgtctgagcctggcgcaggggctgggagtagtctgttggacgtggccgaaccgggagggcctggctggctcccggagtcggactgcgaaaccgttacctgttgtttatttagcgagcgggacgccgcaggcgctcctagggacgcttctgatcccttagcgggagccgcactagagcctgcgggagggggtcggtctagagaggccagatcccgcttattgctgctggagcaggagctcaagactgtgacctattcgctactcaagcgccttaaggaaagaagtttggatacccttttggaggcagtcgaaagtcggggaggtgtacccggtggatgcgtgttagttcctcgcgctgatctccgcctgggtggacagcctgcacctccacagttactgctgggaagactgtttcggtggccagacctgcagcacgcggtggaactgaagcctttgtgcggatgtcattcattcgcggctgcagccgacggcccaacagtgtgctgcaatccctatcacttcagtagactctgcggtcctgaatcaccccctcctccgtactctaggctcagccctcgcgatgagtataagcccctcgatcttagtgattctacactcagctacacagaaactgaggcgactaattcccttattaccgctcccggagaattctcagctgccgatgccggtatcggttcacggggtaaccggggacttgagtcctccgtcccatgtagctag

SEQ ID NO: 157603 - DNA, 2883 bp, Artificial Sequence
  derived and/or modified sequence
ggagcgatcgagggagctgagccgagagaaagagccgccgggcgctgcctcgccagacctcgctgggaccccggggccaccgggaggcacttttgtggaggggggagggggggcgacctcggcagcctcggcgcacgaagcgtccgagggcagcgtggggcgggctgcgacctctgcatcggtggactgcatttttaattaaggattcccagcagctctttgggatttttacagcttccactcatgtgttgacacccgcgtccaggagaaactcgctccaagtgcatctagcgcctgggacctgagacggcgttggcctttcgtgcatgcaaatccagggatttaggttttgtttgggatttccttttctttctttccttttttttttctttttgcagggagtaagaagggagctgggggtatcaacaagcctgcctttcggatcctgcgggaaaagcccatgtagttaagcgctttggtttaaaaaaaaggcaaggtaaaggcagggctttccagacacatttaggggttcgcgcgagcgctttgtgctcatggaccagccgcacaacttttgaaggctcgccggcccatgtggggtctttctggcggcgcgccgcctgcagcccccctaaagcgcgggggctggagttgttgagcagccccgccgctgtggtccatgtagccgctggccgcgcgcggactgcggctcggcgtgcgcgtgttcccggccgtcccgcctcggcgagctccctcatgttgtcgccctgcggcgccccttcgacgacaggctgtgcgcggtctgcacggcgctccgcggcggagcttcatgtggggctgcgacccgcgcagccggcgcctcgctgagggaacggacccccggtaaccggagaccgcctcccccccacccctggcgccaaaggatatcgtatgttcaggtccaaacgctcggggctggtgcggcgactttggcgaagtcgtgtggtccccgaccgggaggaaggcggcagcggcggcggcggtggcggcgacgaggatgggagcttgggcagccgagctgagccggccccgcgggcaagagagggcggaggctgcggccgctccgaagtccgcccggtagccccgcggcggccccgggacgcagtgggacagcgaggcgcccagggcgcggggaggcgccggcgcgcagggggccccccgaggcccatgtcggagccaggggccggcgctgggagctccctgctggacgtggcggagccgggaggcccgggctggctgcccgagagtgactgcgagacggtgacctgctgtctcttttcggagcgggacgccgccggcgcgccccgggacgccagcgaccccctggccggggcggccctggagccggcgggcggcgggcggagtcgcgaagcgcgctcgcggctgctgctgctggagcaggaactcaaaaccgtcacgtactcgctgctgaagcggctcaaggagcgctcgctggacacgctgctggaggcggtggagtcccgcggcggcgtgccgggcggctgcgtgctggtgccgcgcgccgacctccgcctgggcggccagcccgcgccgccgcagctgctgctcggccgcctctttcgctggcccgacctgcagcacgccgtggagctgaagcccctgtgcggctgccacagcttcgccgccgccgccgacggccctaccgtgtgctgcaacccctaccacttcagccggctctgcgggcccgaatctccgccacctccctactctcggctgtctcctcgcgacgagtacaagccactggatctgtccgattccacattgtcttacactgaaacggaggctaccaactccctcatcactgctccgggtgaattctcagacgccagcatgtctccggacgccaccaagccgagccactggtgcagcgtggcgtactgggagcaccggacgcgcgtgggccgcctctatgcggtgtacgaccaggccgtcagcatcttctacgacctacctcagggcagcggcttctgcctgggccagctcaacctggagcagcgcagcgagtcggtgcggcgaacgcgcagcaagatcggcttcggcatcctgctcagcaaggagcccgacggcgtgtgggcctacaaccgcggcgagcaccccatcttcgtcaactccccgacgctggacgcgcccggcggccgcgccctggtcgtgcgcaaggtgccccccggctactccatcaaggtgttcgacttcgagcgctcgggcctgcagcacgcgcccgagcccgacgccgccgacggcccctacgaccccaacagcgtccgcatcagcttcgccaagggctgggggccctgctactcccggcagttcatcacctcctgcccctgctggctggagatcctcctcaacaaccccagatagtggcggccccggcgggaggggcgggtgggaggccgcggccaccgccacctgccggcctcgagaggggccgatgcccagagacacagcccccacggacaaaaccccccagatatcatctacctagatttaatataaagttttatatattatatggaaatatatattatacttgtaattatggagtcatttttacaatgtaattatttatgtatggtgcaatgtgtgtatatggacaaaacaagaaagacgcactttggcttataattctttcaatacagatatattttctttctcttcctccttcctcttccttactttttatatatatatataaagaaaatgatacagcagagctaggtggaaaagcctgggtttggtgtatggtttttgagatattaatgcccagacaaaaagctaataccagtcactcgataataaagtattcgcattatagttttttttaaa

SEQ ID NO: 157604 - DNA, 1940 bp, Artificial Sequence
  derived and/or modified sequence
cgatcgagggagctgagccgagagaaagagccgccgggcgctgcctcgccagacctcgctgggaccccggggccaccgggaggcacttttgtggaggggggagggggggcgacctcggcagcctcggcgcacgaagcgtccgagggcagcgtggggcgggctgcgacctctgcatcggtggactgcatttttaattaaggattcccagcagctctttgggatttttacagcttccactcatgtgttgacacccgcgtccaggagaaactcgctccaagtgcatctagcgcctgggacctgagacggcgttggcctttcgtgcatgcaaatccagggatttaggttttgtttgggatttccttttctttctttccttttttttttctttttgcagggagtaagaagggagctgggggtatcaacaagcctgcctttcggatcctgcgggaaaagcccatgtagttaagcgctttggtttaaaaaaaaggcaaggtaaaggcagggctttccagacacatttaggggttcgcgcgagcgctttgtgctcatggaccagccgcacaacttttgaaggctcgccggcccatgtggggtctttctggcggcgcgccgcctgcagcccccctaaagcgcgggggctggagttgttgagcagccccgccgctgtggtccatgtagccgctggccgcgcgcggactgcggctcggcgtgcgcgtgttcccggccgtcccgcctcggcgagctccctcatgttgtcgccctgcggcgccccttcgacgacaggctgtgcgcggtctgcacggcgctccgcggcggagcttcatgtggggctgcgacccgcgcagccggcgcctcgctgagggaacggacccccggtaaccggagaccgcctcccccccacccctggcgccaaaggatatcgtatgttcaggtccaaacgctcggggctggtgcggcgactttggcgaagtcgtgtggtccccgaccgggaggaaggcggcagcggcggcggcggtggcggcgacgaggatgggagcttgggcagccgagctgagccggccccgcgggcaagagagggcggaggctgcggccgctccgaagtccgcccggtagccccgcggcggccccgggacgcagtgggacagcgaggcgcccagggcgcggggaggcgccggcgcgcagggggccccccgaggcccatgtcggagccaggggccggcgctgggagctccctgctggacgtggcggagccgggaggcccgggctggctgcccgagagtgactgcgagacggtgacctgctgtctcttttcggagcgggacgccgccggcgcgccccgggacgccagcgaccccctggccggggcggccctggagccggcgggcggcgggcggagtcgcgaagcgcgctcgcggctgctgctgctggagcaggaactcaaaaccgtcacgtactcgctgctgaagcggctcaaggagcgctcgctggacacgctgctggaggcggtggagtcccgcggcggcgtgccgggcggctgcgtgctggtgccgcgcgccgacctccgcctgggcggccagcccgcgccgccgcagctgctgctcggccgcctctttcgctggcccgacctgcagcacgccgtggagctgaagcccctgtgcggctgccacagcttcgccgccgccgccgacggccctaccgtgtgctgcaacccctaccacttcagccggctctgcgggcccgaatctccgccacctccctactctcggctgtctcctcgcgacgagtacaagccactggatctgtccgattccacattgtcttacactgaaacggaggctaccaactccctcatcactgctccgggtgaattctcagcagcagatgctgggataggaagccgagggaaccgtggtttggagtcctctgtcccctgcagttag

SEQ ID NO: 157605 - DNA, 1491 bp, Artificial Sequence
  derived and/or modified sequence
atgttcagaagcaagagaagcggcctggtgagaagactgtggagaagcagagtggtgcccgacagagaggagggcggcagcggcggcggcggcggcggcgacgaggacggcagcctgggcagcagagccgagcccgcccccagagccagagagggcggcggctgcggcagaagcgaggtgagacccgtggcccccagaagacccagagacgccgtgggccagagaggcgcccagggcgccggcagaagaagaagagccggcggcccccccagacccatgagcgagcccggcgccggcgccggcagcagcctgctggacgtggccgagcccggcggccccggctggctgcccgagagcgactgcgagaccgtgacctgctgcctgttcagcgagagagacgccgccggcgcccccagagacgccagcgaccccctggccggcgccgccctggagcccgccggcggcggcagaagcagagaggccagaagcagactgctgctgctggagcaggagctgaagaccgtgacctacagcctgctgaagagactgaaggagagaagcctggacaccctgctggaggccgtggagagcagaggcggcgtgcccggcggctgcgtgctggtgcccagagccgacctgagactgggcggccagcccgcccccccccagctgctgctgggcagactgttcagatggcccgacctgcagcacgccgtggagctgaagcccctgtgcggctgccacagcttcgccgccgccgccgacggccccaccgtgtgctgcaacccctaccacttcagcagactgtgcggccccgagagccccccccccccctacagcagactgagccccagagacgagtacaagcccctggacctgagcgacagcaccctgagctacaccgagaccgaggccaccaacagcctgatcaccgcccccggcgagttcagcgacgccagcatgagccccgacgccaccaagcccagccactggtgcagcgtggcctactgggagcacagaaccagagtgggcagactgtacgccgtgtacgaccaggccgtgagcatcttctacgacctgccccagggcagcggcttctgcctgggccagctgaacctggagcagagaagcgagagcgtgagaagaaccagaagcaagatcggcttcggcatcctgctgagcaaggagcccgacggcgtgtgggcctacaacagaggcgagcaccccatcttcgtgaacagccccaccctggacgcccccggcggcagagccctggtggtgagaaaggtgccccccggctacagcatcaaggtgttcgacttcgagagaagcggcctgcagcacgcccccgagcccgacgccgccgacggcccctacgaccccaacagcgtgagaatcagcttcgccaagggctggggcccctgctacagcagacagttcatcaccagctgcccctgctggctggagatcctgctgaacaaccccagatag

SEQ ID NO: 157606 - DNA, 1017 bp, Artificial Sequence
  derived and/or modified sequence
atgttcagaagcaagagaagcggcctggtgagaagactgtggagaagcagagtggtgcccgacagagaggagggcggcagcggcggcggcggcggcggcgacgaggacggcagcctgggcagcagagccgagcccgcccccagagccagagagggcggcggctgcggcagaagcgaggtgagacccgtggcccccagaagacccagagacgccgtgggccagagaggcgcccagggcgccggcagaagaagaagagccggcggcccccccagacccatgagcgagcccggcgccggcgccggcagcagcctgctggacgtggccgagcccggcggccccggctggctgcccgagagcgactgcgagaccgtgacctgctgcctgttcagcgagagagacgccgccggcgcccccagagacgccagcgaccccctggccggcgccgccctggagcccgccggcggcggcagaagcagagaggccagaagcagactgctgctgctggagcaggagctgaagaccgtgacctacagcctgctgaagagactgaaggagagaagcctggacaccctgctggaggccgtggagagcagaggcggcgtgcccggcggctgcgtgctggtgcccagagccgacctgagactgggcggccagcccgcccccccccagctgctgctgggcagactgttcagatggcccgacctgcagcacgccgtggagctgaagcccctgtgcggctgccacagcttcgccgccgccgccgacggccccaccgtgtgctgcaacccctaccacttcagcagactgtgcggccccgagagccccccccccccctacagcagactgagccccagagacgagtacaagcccctggacctgagcgacagcaccctgagctacaccgagaccgaggccaccaacagcctgatcaccgcccccggcgagttcagcgccgccgacgccggcatcggcagcagaggcaacagaggcctggagagcagcgtgccctgcagctag

SEQ ID NO: 157607 - protein, 499 aa, Artificial Sequence
  derived and/or modified sequence
MGRKKIQITRIMDERNRQVTFTKRKFGLMKKAYELSVLCDCEIALIIFNSSNKLFQYASTDMDKVLLKYTEYNEPHESRTNSDIVEALNKKEHRGCDSPDPDTSYVLTPHTEEKYKKINEEFDNMMRNHKIAPGLPPQNFSMSVTVPVTSPNALSYTNPGSSLVSPSLAASSTLTDSSMLSPPQTTLHRNVSPGAPQRPPSTGNAGGMLSTTDLTVPNGAGSSPVGNGFVNSRASPNLIGATGANSLGKVMPTKSPPPPGGGNLGMNSRKPDLRVVIPPSSKGMMPPLNTQRISSSQATQPLATPVVSVTTPSLPPQGLVYSAMPTAYNTDYSLTSADLSALQGFNSPGMLSLGQVSAWQQHHLGQAALSSLVAGGQLSQGSNLSINTNQNISIKSEPISPPRDRMTPSGFQQQQQQQQQQQPPPPPQPQPQPPQPQPRQEMGRSPVDSLSSSSSSYDGSDREDPRGDFHSPIVLGRPPNTEDRESPSVKRMRMDAWVT

SEQ ID NO: 157608 - DNA, 5569 bp, Artificial Sequence
  derived and/or modified sequence
agaacgagttccggtctggccgaggcttgtctcctaaaaatagccccggtgtggggatccgtgcgcggatgtcccggcgagtcccgggctgaaagaggcggctccgggcggcgcgaagcgctggtggcgggcccgggctgcggcgtgtgcgcgcccgccagctgctccggagatacggaattgcattttgtgaaaaaagaacaagaattttctgcaaggatcatatctaagtgcactttttgctgatacttcatttctaatcttgtagaaaatttcagctgtagcccttggactagaagctgaaataacagaagctgtgtacgatgcattagggtattgaagaaaattaacttttgaattaaatatttggaatataaggaaataaggaaagttgactgaaaatggggcggaagaaaatacaaatcacacgcataatggatgaaaggaaccgacaggtcacttttacaaagagaaagtttggattaatgaagaaagcctatgaacttagtgtgctctgtgactgtgaaatagcactcatcattttcaacagctctaacaaactgtttcaatatgctagcactgatatggacaaagttcttctcaagtatacagaatataatgaacctcatgaaagcagaaccaactcggatattgttgaggctctgaacaagaaggaacacagagggtgcgacagcccagaccctgatacttcatatgtgctaactccacatacagaagaaaaatataaaaaaattaatgaggaatttgataatatgatgcggaatcataaaatcgcacctggtctgccacctcagaacttttcaatgtctgtcacagttccagtgaccagccccaatgctttgtcctacactaacccagggagttcactggtgtccccatctttggcagccagctcaacgttaacagattcaagcatgctctctccacctcaaaccacattacatagaaatgtgtctcctggagctcctcagagaccaccaagtactggcaatgcaggtgggatgttgagcactacagacctcacagtgccaaatggagctggaagcagtccagtggggaatggatttgtaaactcaagagcttctccaaatttgattggagctactggtgcaaatagcttaggcaaagtcatgcctacaaagtctccccctccaccaggtggtggtaatcttggaatgaacagtaggaaaccagatcttcgagttgtcatccccccttcaagcaagggcatgatgcctccactaaatacccaaaggatcagtagttctcaagccactcaacctcttgctaccccagtcgtgtctgtgacaaccccaagcttgcctccgcaaggacttgtgtactcagcaatgccgactgcctacaacactgattattcactgaccagcgctgacctgtcagcccttcaaggcttcaactcgccaggaatgctgtcgctgggacaggtgtcggcctggcagcagcaccacctaggacaagcagccctcagctctcttgttgctggagggcagttatctcagggttccaatttatccattaataccaaccaaaacatcagcatcaagtccgaaccgatttcacctcctcgggatcgtatgaccccatcgggcttccagcagcagcagcagcagcagcagcagcagcagccgccgccaccaccgcagccccagccacaacccccgcagccccagccccgacaggaaatggggcgctcccctgtggacagtctgagcagctctagtagctcctatgatggcagtgatcgggaggatccacggggcgacttccattctccaattgtgcttggccgacccccaaacactgaggacagagaaagcccttctgtaaagcgaatgaggatggacgcgtgggtgacctaaggcttccaagctgatgtttgtacttttgtgttactgcagtgacctgccctacatatctaaatcggtaaataaggacatgagttaaatatatttatatgtacatacatatatatatccctttacatatatatgtatgtgggtgtgagtgtgtatgtgtgggtgtgtgttacatacacagaatcaggcacttacctgcaaactccttgtaggtctgcagatgtgtgtcccatggcagacaaagcaccctgtaggcacagacaagtctggcacttccttggactacttgtttcgtaaagataaccagtttttgcagagaaacgtgtacccatatataattctcccacactagcttgcagaaacctagagggccccctacttgttttatttaactgtgcagtgactgtagttacttaagagaaaatgctttgtagaacagagcagtagaaaagcaggaaccaagaaagcaatactgtacataaaatgtcatttatattttccaacctggcatgggtgtctgttgcaaaggggtgcatgggaaagggctgttgatattaaaaacaaacaaaacaaaaaagccccacacataactgttttgcacgtgcaaaaatgtattgggtcaagaagtgatctttagctaataaagaaagagaatagaaaacacgcatgagatattcagaaaatactagcctagaaatatagagcattaacaaagtaaaattaatatattaagttataattggaatatgtcagaagtttctttttacattcatatcttaaaaattaaagaaactgattttagctcatgtatattttatatgaaagaaaacacccttatgaattgatgactatatataaaattatattcactacttttgaacacattctgctatgaattatttatataagccaaagctatatgttgtaacttttttttagagaatagctttatcttggtttaactctttagttttattttaagaggggaaaacaaaaatatcttgcaagcagaaccttggaaaaaaaaagccatgaacacttattctaaatgtaaattaaaagttgagccaaactctttgtgtatatagcatcttaaatatattatcacctttgatgtaagtacctatgtattgtatggtcaccagattaaaaagtatatttttgtggattgccgccaatctggggggaaaaggcgaggtcctttattaagtattcactgtttaatatttactattttgttaaatatactgtactttggattttaattattagcccagttttttcagaggattgtataaaggggtttctcccctcactggtggtgaatgtgtgatgttacattgtaatctttgtgctgtatgggttgagcatcattatatattttgtatgtgtacataaatagcaaagtggcaaaaaaaattggtgttaagttcatcctgcataagtataaaatgtgttgtaacagattttgtaaggcattatttaaaacttgccttttgtgaggaaaaaatgtagtagaaaaagctgacctaatttaattaatattagagaaaatggcaaaatagtagatgagcacaaaggttttataagtggtaaatgattaggggaaaataatcatggggaaagggatcttttttccttgaccctctgaaaacagaacgatgcagctggttacaaaatcctaccgttatcagctcttctgcacattgcagtgatgctttggtatgcggggagaaacactcttagggtgctggtccttggcatgactcttgccattctaattggaattagtgccaccctcagcttggattttgaacaaggccttattctttcaggaagacaactaatggatgatagcaagttcatccacttactgggcttgtgccatgagcaaaattcaaagtcctgtatatctttcattgtagatttttaaatactccttttcctaaaaaactcaagggtttaaaaattgctattttatattttaaatgatattgagcagctacctacaatttctatgtacattttgttcccccccccccaccccccccccaaattacgttccttttgacattttcctcatctgctgtttgtgacaagtcatcagccagatttcctgactgacacataggtatgatcagtgcaggagagacctgcgcaccacaggctgcaaactggaggttctgttctcatggcagtttgggcagtaacttttgagagaggccaaaaaaaggaggatgacatgctgtctcctctcttcagtatagacattaggctcttattcagaaaggatttttctttaaaaatgtacttactttactgaactacttacaggcacatttcttcataaggccacacctaatccaaacaagacagtctcccaacactgaagttccaaaataatccttaccactttgtaaaccatttatagctttgaaagtgttaagtgattccttcgttattatttatgcatgttcatgaacttctgctgtacattggaataggagttaacacattcacatttactgtctattttcttgtgtgccttatgagatggcttttctgactgtatctcaatagtctttctttctatgcaggtttataatcagtacaactactgttttctaaaatactactactcaaggctcggagtttgtatttaaattacactgaccaagtaacaatgtattccatttcaggaactgaatatttgactgttaacctttttcccatacgtccagtgtggcatggagcatatggacttgacagacatctctcacccagacgcccacgtgtgaacacacccacatccacatctctgggtggaaaccagcctagagaggggacgacgctaatggtgttgctttagaaccgtcttttcttacccttttagactcgtgttttgtatgagacaccattgcaagaaaattttatccctccagaagtattttattactaaagaacaaaagcaaaaaaagcttaaattgcactggttaaagtacagtttccaacagctgtccttcctcagtactctaatggccactccaccgcgagtggaagtcactgttgtgtgtacacaggtggtcccaatcaaaactccatcttttgagcccaattatgtccattttgttatagactaaatcaggggtttgttctacaagaacaatacatgttttaccctttcctttaactagaaggataactagtaatgcatcaacataatttctgtattaaccatcatgcgcacaagaaatacatagtaaataaggaagctgaaaactcctggcattggatcttaagctagatgattagaatgtgaaaaagattttacaaatgtaaaacttctatttctctgtagaaactttcttcactttgctgtgcaagaagacactgctttgctatatttaaaatggcttttttaaaagagatttatgtatttggtaaatgtttgtagtcaacagttcacacaagaagctgtacacggtttgatcatgtaaaaccgtttggcggcacaagctggactttgttgccatccttgagatgaaccttttaagaaaaataagttaatctcaatttttccctgaatgtgttgtttttcttcattatacaataaatataatagtgaactttttatcaaatggtgaagacaatgctaaaaaaaaaaaaaaaaa

SEQ ID NO: 157609 - DNA, 1500 bp, Artificial Sequence
  derived and/or modified sequence
atgggtcgcaaaaagatacaaatcacacgaatcatggacgagagaaatcggcaggtgacttttacaaaacggaagttcggtctgatgaagaaagcatatgagcttagcgtgctatgtgactgtgaaatcgccttgattatctttaattccagcaacaagctgttccagtatgcaagtaccgacatggataaggtgctgctgaagtacaccgagtacaatgaaccacacgaaagtaggacgaatagcgatattgtggaagctctcaataagaaggaacataggggctgtgactcccccgatcccgatacttcttatgtccttacccctcataccgaagagaaatacaaaaaaatcaacgaagaatttgataacatgatgagaaatcacaagattgctccaggcttacctcctcagaattttagtatgtcagtcaccgtgcccgtgactagccctaatgccctatcttatacaaatcccggctcaagcctggttagcccctcattggccgcctcttcaactctgacggacagctccatgctgtccccacctcagacaaccctccatcgcaatgtttccccgggagcccctcaaaggccaccttctactggaaacgctggaggtatgctaagtacaactgacttaaccgtgccaaacggcgcaggctcctccccagtcgggaatggatttgtaaactcaagagcctcacccaatcttatcggggccactggtgcaaacagtctaggcaaggttatgcccaccaagtcgcctcctccacccgggggtggcaatctcggcatgaattcacgcaaacccgacctgagggttgtcataccaccatcttcgaaggggatgatgcctccactcaatacgcagagaatctctagttcccaagcgactcagcccctggcaaccccagttgtgagtgtaacaacaccctccttaccaccccaaggactggtctactcagcgatgcctaccgcgtacaacactgactattcactcaccagcgcagacctatccgcactgcaggggtttaactccccaggaatgctctctctgggccaggtgagcgcttggcagcaacaccacctgggacaggccgccttgtccagtctggtggcgggtggtcagttgagtcagggctctaacctgtctattaacactaaccaaaatatctctattaaaagcgagcccatcagccccccaagagatcgcatgactcctagtggctttcaacagcagcagcaacagcagcaacagcaacagcccccccccccacctcaaccacagccccagcctccacagcctcagccacggcaggaaatgggtcggagccctgtggactcattgagtagcagctccagttcatatgacggttccgacagagaggacccgcggggtgacttccactctccaatcgtcctcgggcgacctcccaacacagaggaccgcgagtcaccaagtgtgaaacggatgaggatggatgcgtgggtcacatag

SEQ ID NO: 157610 - DNA, 1500 bp, Artificial Sequence
  derived and/or modified sequence
atgggcaggaagaagatccagatcacccgcatcatggatgaaagaaaccggcaggtgaccttcaccaagaggaagtttggcctgatgaagaaggcctatgagctgtctgtgctgtgtgactgtgaaattgccctgatcatcttcaacagcagcaacaagctgttccagtatgccagcacagacatggacaaggtgctgctgaagtacacagagtacaatgagccccatgagagcaggaccaacagcgacatcgtggaggccctgaacaagaaggagcaccggggctgtgacagcccagaccctgacaccagctatgtgctgaccccccacacagaggagaagtacaagaagatcaatgaggagtttgacaacatgatgaggaaccacaagatcgcccctggcctgcccccccagaacttctccatgtctgtgacagtgcctgtgaccagccccaatgccctgagctacaccaaccctggcagcagcctggtgagccccagcctggccgccagcagcaccctgacagacagctccatgctgagccccccccagaccaccctgcacagaaatgtgtcccctggggccccccagaggcctcccagcactggaaatgccggcggcatgctgagcaccacagacctgactgtgcccaacggggccggcagcagccctgtgggcaatggatttgtgaacagccgggccagccccaacctgattggagccaccggggccaacagcctgggcaaggtgatgcccaccaagagccccccacctcctgggggcggcaacctgggcatgaacagcaggaagccagacctgcgggtggtgatcccccccagcagcaagggcatgatgccacccctgaacacccagaggatcagcagcagccaggccacccagcccctggccacccctgtggtgtctgtgaccacccccagcctgcccccccagggcctggtgtacagcgccatgcccacagcctacaacacagactacagcctgaccagcgctgacctgagcgccctgcagggcttcaacagccctggcatgctgagcctgggccaggtgtctgcctggcagcagcaccacctgggccaggccgccctgagcagcctggtggccggcggccagctgagccagggcagcaacctgagcatcaacaccaaccagaacatcagcatcaagtctgagcccatcagccccccccgggacaggatgaccccatctggcttccagcagcagcagcagcagcagcagcagcagcagcccccacctccaccccagccccagccccagcccccccagccccagccccggcaggagatgggccgcagccctgtggacagcctgagcagcagcagcagcagctatgatggcagtgaccgggaggaccccaggggggacttccacagccccatcgtgctgggccggccccccaacacagaggaccgggagagccccagcgtgaagaggatgaggatggatgcctgggtgacctag

SEQ ID NO: 157611 - DNA, 5824 bp, Artificial Sequence
  derived and/or modified sequence
atagtccgcccccacgtccttgtggaatagcgcccgcttccaagcaccgtgactctctttgccctacccttgtctttcccattccaattactctagaacccaccgagaggataattcagtcctgaaaagaaactgatggggagaagcgaggaagggaacccaggagggaggggaggcagggctgcggagggacaccgaggcggcggaggtagtgcgcacgcgcagcacagaacgagttccggtctggccgaggcttgtctcctaaaaatagccccggtgtggggatccgtgcgcggatgtcccggcgagtcccgggctgaaagaggcggctccgggcggcgcgaagcgctggtggcgggcccgggctgcggcgtgtgcgcgcccgccagctgctccggagatacggaattgcattttgtgaaaaaagaacaagaattttctgcaaggatcatatctaagtgcactttttgctgatacttcatttctaatcttgtagaaaatttcagctgtagcccttggactagaagctgaaataacagaagctgtgtacgatgcattagggtattgaagaaaattaacttttgaattaaatatttggaatataaggaaataaggaaagttgactgaaaatggggcggaagaaaatacaaatcacacgcataatggatgaaaggaaccgacaggtcacttttacaaagagaaagtttggattaatgaagaaagcctatgaacttagtgtgctctgtgactgtgaaatagcactcatcattttcaacagctctaacaaactgtttcaatatgctagcactgatatggacaaagttcttctcaagtatacagaatataatgaacctcatgaaagcagaaccaactcggatattgttgaggctctgaacaagaaggaacacagagggtgcgacagcccagaccctgatacttcatatgtgctaactccacatacagaagaaaaatataaaaaaattaatgaggaatttgataatatgatgcggaatcataaaatcgcacctggtctgccacctcagaacttttcaatgtctgtcacagttccagtgaccagccccaatgctttgtcctacactaacccagggagttcactggtgtccccatctttggcagccagctcaacgttaacagattcaagcatgctctctccacctcaaaccacattacatagaaatgtgtctcctggagctcctcagagaccaccaagtactggcaatgcaggtgggatgttgagcactacagacctcacagtgccaaatggagctggaagcagtccagtggggaatggatttgtaaactcaagagcttctccaaatttgattggagctactggtgcaaatagcttaggcaaagtcatgcctacaaagtctccccctccaccaggtggtggtaatcttggaatgaacagtaggaaaccagatcttcgagttgtcatccccccttcaagcaagggcatgatgcctccactaaatacccagaggatcagtagttctcaagccactcaacctcttgctaccccagtcgtgtctgtgacaaccccaagcttgcctccgcaaggacttgtgtactcagcaatgccgactgcctacaacactgattattcactgaccagcgctgacctgtcagcccttcaaggcttcaactcgccaggaatgctgtcgctgggacaggtgtcggcctggcagcagcaccacctaggacaagcagccctcagctctcttgttgctggagggcagttatctcagggttccaatttatccattaataccaaccaaaacatcagcatcaagtccgaaccgatttcacctcctcgggatcgtatgaccccatcgggcttccagcagcagcagcagcagcagcagcagcagcagccgccgccaccaccgcagccccagccacaacccccgcagccccagccccgacaggaaatggggcgctcccctgtggacagtctgagcagctctagtagctcctatgatggcagtgatcgggaggatccacggggcgacttccattctccaattgtgcttggccgacccccaaacactgaggacagagaaagcccttctgtaaagcgaatgaggatggacgcgtgggtgacctaaggcttccaagctgatgtttgtacttttgtgttactgcagtgacctgccctacatatctaaatcggtaaataaggacatgagttaaatatatttatatgtacatacatatatatatccctttacatatatatgtatgtgggtgtgagtgtgtatgtgtgggtgtgtgttacatacacagaatcaggcacttacctgcaaactccttgtaggtctgcagatgtgtgtcccatggcagacaaagcaccctgtaggcacagacaagtctggcacttccttggactacttgtttcgtaaagataaccagtttttgcagagaaacgtgtacccatatataattctcccacactagcttgcagaaacctagagggccccctacttgttttatttaactgtgcagtgactgtagttacttaagagaaaatgctttgtagaacagagcagtagaaaagcaggaaccaagaaagcaatactgtacataaaatgtcatttatattttccaacctggcatgggtgtctgttgcaaaggggtgcatgggaaagggctgttgatattaaaaacaaacaaaacaaaaaagccccacacataactgttttgcacgtgcaaaaatgtattgggtcaagaagtgatctttagctaataaagaaagagaatagaaaacacgcatgagatattcagaaaatactagcctagaaatatagagcattaacaaagtaaaattaatatattaagttataattggaatatgtcagaagtttctttttacattcatatcttaaaaattaaagaaactgattttagctcatgtatattttatatgaaagaaaacacccttatgaattgatgactatatataaaattatattcactacttttgaacacattctgctatgaattatttatataagccaaagctatatgttgtaacttttttttagagaatagctttatcttggtttaactctttagttttattttaagaggggaaaacaaaaatatcttgcaagcagaaccttggaaaaaaaaagccatgaacacttattctaaatgtaaattaaaagttgagccaaactctttgtgtatatagcatcttaaatatattatcacctttgatgtaagtacctatgtattgtatggtcaccagattaaaaagtatatttttgtggattgccgccaatctggggggaaaaggcgaggtcctttattaagtattcactgtttaatatttactattttgttaaatatactgtactttggattttaattattagcccagttttttcagaggattgtataaaggggtttctcccctcactggtggtgaatgtgtgatgttacattgtaatctttgtgctgtatgggttgagcatcattatatattttgtatgtgtacataaatagcaaagtggcaaaaaaaattggtgttaagttcatcctgcataagtataaaatgtgttgtaacagattttgtaaggcattatttaaaacttgccttttgtgaggaaaaaatgtagtagaaaaagctgacctaatttaattaatattagagaaaatggcaaaatagtagatgagcacaaaggttttataagtggtaaatgattaggggaaaataatcatggggaaagggatcttttttccttgaccctctgaaaacagaacgatgcagctggttacaaaatcctaccgttatcagctcttctgcacattgcagtgatgctttggtatgcggggagaaacactcttagggtgctggtccttggcatgactcttgccattctaattggaattagtgccaccctcagcttggattttgaacaaggccttattctttcaggaagacaactaatggatgatagcaagttcatccacttactgggcttgtgccatgagcaaaattcaaagtcctgtatatctttcattgtagatttttaaatactccttttcctaaaaaactcaagggtttaaaaattgctattttatattttaaatgatattgagcagctacctacaatttctatgtacattttgttcccccccccccaccccccccccaaattacgttccttttgacattttcctcatctgctgtttgtgacaagtcatcagccagatttcctgactgacacataggtatgatcagtgcaggagagacctgcgcaccacaggctgcaaactggaggttctgttctcatggcagtttgggcagtaacttttgagagaggccaaaaaaaggaggatgacatgctgtctcctctcttcagtatagacattaggctcttattcagaaaggatttttctttaaaaatgtacttactttactgaactacttacaggcacatttcttcataaggccacacctaatccaaacaagacagtctcccaacactgaagttccaaaataatccttaccactttgtaaaccatttatagctttgaaagtgttaagtgattccttcgttattatttatgcatgttcatgaacttctgctgtacattggaataggagttaacacattcacatttactgtctattttcttgtgtgccttatgagatggcttttctgactgtatctcaatagtctttctttctatgcaggtttataatcagtacaactactgttttctaaaatactactactcaaggctcggagtttgtatttaaattacactgaccaagtaacaatgtattccatttcaggaactgaatatttgactgttaacctttttcccatacgtccagtgtggcatggagcatatggacttgacagacatctctcacccagacgcccacgtgtgaacacacccacatccacatctctgggtggaaaccagcctagagaggggacgacgctaatggtgttgctttagaaccgtcttttcttacccttttagactcgtgttttgtatgagacaccattgcaagaaaattttatccctccagaagtattttattactaaagaacaaaagcaaaaaaagcttaaattgcactggttaaagtacagtttccaacagctgtccttcctcagtactctaatggccactccaccgcgagtggaagtcactgttgtgtgtacacaggtggtcccaatcaaaactccatcttttgagcccaattatgtccattttgttatagactaaatcaggggtttgttctacaagaacaatacatgttttaccctttcctttaactagaaggataactagtaatgcatcaacataatttctgtattaaccatcatgcgcacaagaaatacatagtaaataaggaagctgaaaactcctggcattggatcttaagctagatgattagaatgtgaaaaagattttacaaatgtaaaacttctatttctctgtagaaactttcttcactttgctgtgcaagaagacactgctttgctatatttaaaatggcttttttaaaagagatttatgtatttggtaaatgtttgtagtcaacagttcacacaagaagctgtacacggtttgatcatgtaaaaccgtttggcggcacaagctggactttgttgccatccttgagatgaaccttttaagaaaaataagttaatctcaatttttccctgaatgtgttgtttttcttcattatacaataaatataatagtgaactttttatcaaatggtgaagacaatgctaaaggttgttgtaaactgtttgtctcccgcactcactccagtaa

SEQ ID NO: 157612 - DNA, 1500 bp, Artificial Sequence
  derived and/or modified sequence
atgggccggaagaagatccagatcacccggatcatggacgagcggaacaggcaggtaacttttacgaaaagaaagttcggcctgatgaagaaggcttatgaattgtccgtactgtgcgactgcgaaatagccttaatcatttttaactcttcaaacaaactgttccagtatgcgtctaccgatatggacaaggtgctgctgaagtatacagagtacaacgagccccacgagagccgcaccaattccgacatcgtggaggctttaaataaaaaagaacataggggatgcgacagtcctgaccctgacacctcttatgttctgactccccacacagaggagaaatacaaaaaaattaatgaggaattcgacaacatgatgcgcaatcacaagattgccccaggtctaccaccccagaatttcagcatgtcggtgacagtgcctgtgacgagccccaatgcattgagttacacaaaccccggctcttctctggtgagcccttctctagcagcctccagcacacttaccgacagtagcatgctgtcgcctccacagaccaccctgcaccgcaacgtctcccccggcgctcctcagcgtccaccatcaactggcaatgcgggggggatgctcagcacgaccgacctcacagtacccaatggagccggtagtagccccgtcggtaatgggttcgttaactcacgggcgagccctaacctgatcggggctactggcgctaactcactcggtaaagtgatgcctaccaagtctccaccccctcccggaggaggcaatctgggaatgaactcgagaaaacctgatctgcgggtggtgatcccacccagtagtaaggggatgatgccgcctctgaacactcaacggatctcttccagccaggctacacagcccctggccactccggttgtatctgtgacaactccctctttacccccccagggactggtctattctgcaatgcctacagcctataataccgactactctttgacaagtgctgacctgtcagctctgcaaggattcaactcccccggtatgctgtctctcgggcaggtctctgcgtggcaacaacaccatctggggcaggcggccctctccagtttagtggctggaggacaactgtcacagggctccaatttaagcatcaacacgaaccaaaacatatccataaagtctgagcccatttcaccaccaagagaccgtatgacaccttccggcttccagcagcagcagcagcaacagcagcagcagcaacctcctcctccaccacagcctcagccccagcccccacagccccagcccaggcaggaaatgggcaggagccccgtggatagcttatcctcttcttcctcatcctatgacggaagtgaccgggaagaccctcgcggtgattttcactcaccaatcgtgctgggccgaccacctaacactgaggatcgggagagcccatctgttaaacgcatgcgaatggatgcctgggtgacctag

SEQ ID NO: 157613 - DNA, 1500 bp, Artificial Sequence
  derived and/or modified sequence
atggggaggaagaaaattcagatcacccggattatggatgagcgcaatcggcaagtaacttttaccaagcggaaatttggcctgatgaaaaaggcgtatgaactcagcgtgttgtgtgactgcgaaatcgcccttatcatatttaactcatcaaacaaactctttcagtatgcatctaccgatatggataaggtgcttctgaagtacaccgaatacaacgaacctcacgagtctagaactaattccgacatcgtggaagctctcaacaagaaggaacaccgcggatgcgattctcctgatcccgacacatcctacgtgcttacaccccacaccgaagagaagtataaaaaaatcaacgaggagtttgataacatgatgagaaaccataaaatcgcacccggtttgcccccacagaacttctcaatgagtgtgactgtgccagttacttcaccgaacgccctcagttataccaacccaggtagctccctcgtgagcccaagcctcgctgcaagtagcactctgacagactccagtatgctgtcaccaccccagactaccctgcaccgcaatgtgagtcctggtgctcctcagcgccctccatccaccggaaatgccggtggtatgttatctaccaccgatttgacagtccctaacggagccggttcttccccagtcggaaatggattcgtaaactcaagggcctcccccaacctgatcggcgctaccggcgcaaatagtctcgggaaggtgatgccaacaaagtcaccaccaccccctgggggtgggaacttgggtatgaacagtcgcaaacccgatctgcgagtcgtgataccccctagctctaaaggcatgatgccgcctcttaacactcagaggataagttcatcacaggccacacagcccttagcaacacctgtggtgagtgtgacaaccccttctctgcccccacaagggctggtctacagcgctatgccgacggcgtataacaccgattacagcttgacctccgccgatttgtctgccctgcagggattcaacagtccaggaatgttaagtctcggccaggtgtcagcctggcagcagcatcacctggggcaagcagctctgtcctcactagtcgccggaggacagctgtcccagggaagcaacctgagcatcaatacaaatcagaacatctcaattaaatccgagcccatttcacccccacgggatcggatgaccccatcaggattccagcaacagcaacagcagcagcagcagcagcagcctcctccaccccctcagccacagccccagccaccccagccgcagcctaggcaagagatgggcagatccccagtcgactcattaagttcaagctcatcatcatacgacgggagcgacagggaggaccccaggggggacttccactccccaattgttctgggcaggccccctaacactgaggatcgtgagagcccttctgttaagaggatgagaatggatgcttgggttacctag

SEQ ID NO: 157614 - DNA, 1500 bp, Artificial Sequence
  derived and/or modified sequence
atgggcagaaagaagatccagatcaccagaatcatggacgagagaaacagacaggtgaccttcaccaagagaaagttcggcctgatgaagaaggcctacgagctgagcgtgctgtgcgactgcgagatcgccctgatcatcttcaacagcagcaacaagctgttccagtacgccagcaccgacatggacaaggtgctgctgaagtacaccgagtacaacgagccccacgagagcagaaccaacagcgacatcgtggaggccctgaacaagaaggagcacagaggctgcgacagccccgaccccgacaccagctacgtgctgaccccccacaccgaggagaagtacaagaagatcaacgaggagttcgacaacatgatgagaaaccacaagatcgcccccggcctgcccccccagaacttcagcatgagcgtgaccgtgcccgtgaccagccccaacgccctgagctacaccaaccccggcagcagcctggtgagccccagcctggccgccagcagcaccctgaccgacagcagcatgctgagccccccccagaccaccctgcacagaaacgtgagccccggcgccccccagagaccccccagcaccggcaacgccggcggcatgctgagcaccaccgacctgaccgtgcccaacggcgccggcagcagccccgtgggcaacggcttcgtgaacagcagagccagccccaacctgatcggcgccaccggcgccaacagcctgggcaaggtgatgcccaccaagagcccccccccccccggcggcggcaacctgggcatgaacagcagaaagcccgacctgagagtggtgatcccccccagcagcaagggcatgatgccccccctgaacacccagagaatcagcagcagccaggccacccagcccctggccacccccgtggtgagcgtgaccacccccagcctgcccccccagggcctggtgtacagcgccatgcccaccgcctacaacaccgactacagcctgaccagcgccgacctgagcgccctgcagggcttcaacagccccggcatgctgagcctgggccaggtgagcgcctggcagcagcaccacctgggccaggccgccctgagcagcctggtggccggcggccagctgagccagggcagcaacctgagcatcaacaccaaccagaacatcagcatcaagagcgagcccatcagcccccccagagacagaatgacccccagcggcttccagcagcagcagcagcagcagcagcagcagcagccccccccccccccccagccccagccccagcccccccagccccagcccagacaggagatgggcagaagccccgtggacagcctgagcagcagcagcagcagctacgacggcagcgacagagaggaccccagaggcgacttccacagccccatcgtgctgggcagaccccccaacaccgaggacagagagagccccagcgtgaagagaatgagaatggacgcctgggtgacctag

SEQ ID NO: 157615 - protein, 746 aa, Artificial Sequence
  derived and/or modified sequence
MAWIRSTCILFFTLLFAHIAAVPIKYLPEENVHDADFGEQKDISEINLAAGLDLFQGDILLQKSRNGLRDPNTRWTFPIPYILADNLGLNAKGAILYAFEMFRLKSCVDFKPYEGESSYIIFQQFDGCWSEVGDQHVGQNISIGQGCAYKAIIEHEILHALGFYHEQSRTDRDDYVNIWWDQILSGYQHNFDTYDDSLITDLNTPYDYESLMHYQPFSFNKNASVPTITAKIPEFNSIIGQRLDFSAIDLERLNRMYNCTTTHTLLDHCTFEKANICGMIQGTRDDTDWAHQDSAQAGEVDHTLLGQCTGAGYFMQFSTSSGSAEEAALLESRILYPKRKQQCLQFFYKMTGSPSDRLVVWVRRDDSTGNVRKLVKVQTFQGDDDHNWKIAHVVLKEEQKFRYLFQGTKGDPQNSTGGIYLDDITLTETPCPTGVWTVRNFSQVLENTSKGDKLQSPRFYNSEGYGFGVTLYPNSRESSGYLRLAFHVCSGENDAILEWPVENRQVIITILDQEPDVRNRMSSSMVFTTSKSHTSPAINDTVIWDRPSRVGTYHTDCNCFRSIDLGWSGFISHQMLKRRSFLKNDDLIIFVDFEDITHLSQTEVPTKGKRLSPQGLILQGQEQQVSEEGSGKAMLEEALPVSLSQGQPSRQKRSVENTGPLEDHNWPQYFRDPCDPNPCQNDGICVNVKGMASCRCISGHAFFYTGERCQAVQVHGSVLGMVIGGTAGVIFLTFSIIAILSQRPRK

SEQ ID NO: 157616 - DNA, 2241 bp, Artificial Sequence
  derived and/or modified sequence
atggcatggatacggtccacgtgcatcctgttctttacacttcttttcgctcacatcgcagccgtgccaattaagtaccttcccgaggaaaacgtgcatgacgcagactttggagaacagaaagatataagtgagataaatttagctgcaggcctggatctgttccagggtgatatcttattgcagaagtctcgtaacggtcttcgcgaccccaacacccgatggacattccccataccttatatcctcgctgataatcttgggcttaacgcaaagggagccatcctgtatgcgttcgagatgttccgattgaagagctgcgtagactttaagccctacgagggcgaatcttcctacatcatattccagcagttcgacggctgttggtccgaggtcggagaccagcacgtggggcagaacatctctattggacagggatgcgcttataaagccatcattgagcacgaaattctgcatgccctggggttttaccatgaacagagtagaactgaccgggacgattacgttaatatctggtgggaccagattctgtccgggtatcaacacaactttgacacctacgacgatagcctaataaccgatctgaacacaccctatgattatgaatctctaatgcactatcagcctttcagcttcaataaaaacgcttccgtgccaacaataacggccaagattcccgaattcaattcaattataggccaaagactggacttctccgcaattgatctcgagaggcttaacaggatgtacaactgcaccacgacccacaccctcttggaccattgcacatttgagaaagctaacatttgcgggatgattcaagggactcgcgacgacaccgattgggcccatcaggactccgcccaggccggcgaagtcgaccacacactgctgggccagtgtaccggagctggttatttcatgcagttttcaacaagctcagggtcagcagaggaagccgcgctcctcgagagccgaattctctatccaaaaaggaaacagcagtgtctgcaatttttctataaaatgaccggatctccttctgatcgattagttgtctgggttcgcagagatgatagcaccggtaacgtcagaaagctcgtgaaggtgcagacatttcagggagatgatgaccacaactggaagatcgctcacgttgttttgaaggaggagcaaaagttccggtatcttttccagggaactaaaggcgacccacagaattcgacaggcggaatctatttggatgatatcaccctgactgagacgccttgtcctactggggtctggaccgtcagaaacttctctcaggtactggaaaatactagtaagggggacaagctgcagtctccacggttttacaattccgagggatatggcttcggggtgaccttgtatccaaacagcagagagagctcggggtacctgcgcttagcattccatgtatgcagtggcgagaacgatgcaattttagaatggcctgtagagaatcggcaagtgataattacaattctcgatcaggagccagacgttagaaataggatgtctagctctatggtatttaccacgtccaagagccacacgtccccagctatcaacgacacagtgatttgggatagacccagccgggtcggcacgtaccatacagactgcaattgttttcgatctatcgatctggggtggtctgggttcatctctcatcaaatgctaaagcggagaagtttcttgaaaaacgacgacctgattatattcgtggatttcgaggacatcacacacctgtcccagaccgaggtgcctacgaagggcaaaagactctcgccgcagggactgattcttcaggggcaggagcagcaagttagcgaggaaggttccgggaaagctatgttggaagaagcgcttccagtgagtctgtcccaggggcaaccgtcacggcagaaacggtccgtcgaaaacacagggccacttgaagaccacaactggccccagtatttcagggacccatgtgaccctaatccttgccaaaacgatggcatttgcgtgaatgtcaagggaatggctagttgccgttgtatcagtgggcatgcgtttttttataccggagagagatgccaagctgtccaagtacatggttctgtactgggcatggttataggcggcaccgccggtgtgattttcttgacttttagtataattgccattttgtctcagcgccctcgcaaatag

SEQ ID NO: 157617 - DNA, 2241 bp, Artificial Sequence
  derived and/or modified sequence
atggcctggatccgcagcacctgcatcctcttcttcaccctgctgtttgcccacatcgctgctgtgcccatcaagtacctgcctgaggagaatgtgcatgatgctgactttggagagcagaaggacatcagcgagatcaacctggccgccggcctggacctcttccagggcgacatcctgctgcagaagagcagaaatggcctgcgggaccccaacacccgctggaccttccccatcccctacatcctggccgacaacctgggcctgaatgccaagggggccatcctgtatgcctttgagatgttccggctgaagagctgtgtggacttcaagccctatgaaggagagagcagctacatcatcttccagcagtttgatggctgctggagcgaggtgggggaccagcacgtgggccagaacatcagcatcggccagggctgtgcctacaaggccatcattgaacatgagatcctgcacgccctgggcttctaccacgagcagagcaggacagacagagatgattatgtgaacatctggtgggaccagatcctgagcggctaccagcacaactttgacacctatgatgacagcctcatcacagacctgaacaccccctatgactatgagagcctgatgcactaccagcccttctccttcaacaagaatgcctctgtgcccaccatcacagccaagatccctgagttcaacagcatcatcggccagaggctggacttcagcgccatcgacctggagcggctgaacaggatgtacaactgcaccaccacccacaccctgctggaccactgcacctttgagaaggccaacatctgtggcatgatccagggcaccagagatgacacagactgggcccaccaggacagcgcccaggccggggaggtggaccacaccctgctgggccagtgcacaggagctggctacttcatgcagttcagcaccagcagcggcagcgctgaggaggccgccctgctggagagccgcatcctgtaccccaagaggaagcagcagtgcctgcagttcttctacaagatgacaggcagccccagcgaccggctggtggtgtgggtgagaagagatgacagcactggaaatgtgaggaagctggtgaaggtgcagaccttccagggagatgatgaccacaactggaagatcgcccacgtggtgctgaaggaggagcagaagttccgctacctgttccagggcaccaagggggacccccagaacagcactggaggcatctacctggatgacatcaccctgacagagaccccctgccccactggagtgtggacagtgaggaacttcagccaggtgctggagaacaccagcaagggggacaagctgcagagcccccgcttctacaacagcgagggctacggctttggagtgaccctgtaccccaacagccgggagagcagcggctacctgcggctggccttccacgtgtgcagcggggagaatgatgccatcctggagtggcctgtggagaaccggcaggtgatcatcaccatcctggaccaggagccagatgtgaggaacaggatgagcagctccatggtgttcaccaccagcaagagccacaccagccctgccatcaatgacaccgtcatctgggaccggcccagccgggtgggcacctaccacacagactgcaactgcttccgcagcattgacctgggctggagcggcttcatcagccaccagatgctgaagaggaggagcttcctgaagaatgatgacctgatcatctttgtggactttgaggacatcacccacctgagccagacagaggtgcccaccaagggcaagaggctgagcccccagggcctcatcctgcagggccaggagcagcaggtgtctgaggagggcagcggcaaggccatgctggaggaggccctgcctgtgtccctgagccagggccagcccagccggcagaagaggtctgtggagaacacaggccccctggaggaccacaactggccccagtacttccgggacccctgtgaccccaacccctgccagaatgatggcatctgtgtgaatgtgaagggcatggccagctgccgctgcatcagcggccacgccttcttctacacaggagagcgctgccaggccgtgcaggtgcacggctctgtgctgggcatggtgattggaggaacagctggggtcatcttcctgaccttcagcatcatcgccatcctgagccagaggcccaggaagtag

SEQ ID NO: 157618 - DNA, 2241 bp, Artificial Sequence
  derived and/or modified sequence
atggcctggatccggagcacctgcatcctgttcttcaccctgctgtttgcacacatcgccgcagtacctatcaagtatctgcctgaggaaaacgtccatgatgctgatttcggggaacagaaagatatttccgaaataaacttagctgcagggctcgacttattccagggggacatcctgttgcaaaaatcacggaatggcttaagggacccgaataccaggtggacatttcccatcccgtacatacttgcggataacctggggctgaatgccaagggcgccatcctctacgcctttgaaatgttccggctgaagtcgtgtgtagacttcaaaccttacgagggagaaagttcatatatcatattccagcagtttgatggctgttggagcgaggtgggtgaccagcacgttggacagaatatttccattgggcagggctgcgcatataaagccatcatcgagcacgaaattctgcacgccctaggattttaccatgagcaatccaggactgacagggatgactacgtcaatatttggtgggaccagatcctatctggttatcagcataatttcgatacctacgatgattcactcatcactgatctgaacacaccctacgattacgagtcactgatgcattaccaaccattttcattcaataagaacgcatctgtgcccacaattacagcaaagatccccgagtttaactccataatcggtcaacggctggatttttccgcaattgatctggagcggcttaatagaatgtataattgcacaacaactcacactctgctggaccattgcacatttgaaaaggccaatatctgcggcatgatacaaggcactagagatgataccgactgggcccaccaggattccgcacaggcaggcgaggttgaccacactctgttgggacagtgtacgggggccggttattttatgcagtttagcaccagttcagggagtgccgaggaggcagctcttctggagtcgcggatcctctaccctaaaaggaagcagcagtgcctgcaattcttctacaaaatgaccggctctcctagcgaccgtcttgtggtctgggttagacgcgacgattcaactggcaacgttaggaaactggtcaaggtccagacgttccagggagacgacgaccacaactggaaaatcgcgcacgtggtattgaaagaggaacagaagtttcggtacctgttccagggaacgaagggcgatccgcaaaattccaccggcggtatttacctggacgacattacgctcaccgagaccccttgccctaccggcgtatggactgtgagaaatttctcccaggtgttggaaaatacctcaaaaggcgataagctgcaaagccctagattctacaacagcgaggggtacggttttggcgtgaccctgtaccccaatagccgagaatcatctggatatctcaggctcgcatttcatgtgtgtagcggggaaaatgacgccatcttggagtggccggtagaaaataggcaggtgatcatcactatcctggaccaagaacccgatgtaagaaataggatgtctagttcaatggtgttcaccacctcaaagtctcacacctctcctgctatcaacgatacagtcatctgggacaggccgagcagagtcggcacttaccacaccgattgtaattgttttcgctcaattgacctcggttggagcggctttatttctcatcaaatgctcaagcgccgctccttcctcaagaatgacgatttgataatttttgtagattttgaagatattacacatctctcacagaccgaagtacccactaagggaaagagactgtcaccacagggcctgattctgcagggacaggagcagcaagtttctgaggagggctcagggaaggctatgctggaggaggcccttcctgtctcgctctcacagggccagccttcgcggcagaagcgtagcgtagagaacaccgggcctttggaagatcacaattggccgcaatattttcgagacccatgcgacccaaacccgtgccagaatgacggcatatgcgtgaacgtaaagggcatggcgagctgtaggtgtatctctgggcatgccttcttctatactggagaacgctgccaggccgtgcaggtgcacggatccgtgctgggaatggtgatcggcggaaccgctggagtgatattcctgacgttcagcataattgccatcctatcacagagaccaagaaaatag

SEQ ID NO: 157619 - DNA, 2241 bp, Artificial Sequence
  derived and/or modified sequence
atggcttggatacgtagtacctgcattctcttcttcactctgctgtttgcccacatcgccgctgtccctataaagtatctgccagaagagaatgtgcatgacgctgactttggcgagcagaaggacatctcggaaatcaacctcgccgctggccttgatctcttccaaggggatatccttctgcagaaatctcggaacggcctgcgcgatccaaatacccggtggactttcccaatcccctatatcttggctgataatctgggactcaacgctaagggggcaatcttatacgccttcgaaatgttccggcttaagtcttgtgttgattttaagccttatgagggcgagagctcttacatcatcttccaacaatttgacggatgttggtccgaggtgggcgaccagcacgtcggccagaacatctccattgggcaggggtgtgcgtacaaggcaataatcgagcacgagattttgcatgcactcggcttttaccacgagcaatcaaggacggaccgcgacgattacgtcaacatctggtgggaccagatcctaagtggatatcagcataattttgacacctacgatgacagccttattacagacttgaatacgccttatgactacgaatctctcatgcactaccaaccctttagcttcaataagaacgcgtcagtcccgaccatcactgcgaaaatcccagagttcaacagcataattggacagcgactcgacttctccgcaatcgatctggagagactcaaccgaatgtacaactgtactaccacgcatactttgctcgatcactgcacatttgaaaaagctaacatttgcggaatgatccagggtactcgggacgacactgactgggcacatcaggatagcgcacaggccggtgaagtggaccacactctactcgggcagtgcaccggggctggatacttcatgcagttcagtacctcgtcaggtagcgcagaggaagccgctctgttggagagccgcatcctgtatcccaagaggaaacagcaatgtttgcagttcttctacaagatgacaggcagtccgagcgaccggttggtcgtgtgggtcagacgagacgattctactggcaacgtcaggaaacttgtaaaagtccagacatttcagggagacgatgaccataattggaagatcgcccacgtagttttgaaagaggaacaaaaattcagatacctgttccaggggacgaaaggggacccacagaacagtaccggaggtatttaccttgatgacattacgcttacagaaacgccatgtcccactggagtgtggactgtacgtaacttttcccaggttttggagaacacgtccaaaggcgataagctccaatctccaaggttttacaactcagagggatacggcttcggcgtgacactttatcctaattccagggaatcaagtggatatctgagactggcgttccatgtttgtagcggtgagaacgatgccatcctcgaatggcccgtggaaaacaggcaggtcataataacgattttagatcaggagccagacgtgcgaaaccgtatgagttcttccatggttttcacaacatctaagtcacatacttccccggcaatcaatgacactgtcatttgggatagaccatcccgggtcggaacttaccatactgactgtaattgcttccggtccattgacctggggtggagcgggtttattagccatcagatgttaaagcgacgatccttcctcaagaatgacgatctgatcatattcgttgattttgaggacattacccacctttcccagactgaagttcccacgaaaggcaagaggctttctcctcagggcctgatcctgcagggccaagagcagcaggtcagcgaagagggttcaggtaaggcaatgctggaagaagcattacccgtcagcttatcgcaaggacagccttcacgacaaaagagaagtgttgaaaacacaggcccattggaagatcacaactggcctcagtattttcgcgatccttgtgacccgaacccctgtcagaacgacggaatctgcgttaacgtgaaggggatggcttcatgtagatgcatctcagggcatgcattcttctacacaggcgagagatgccaggctgtacaggtacacggaagcgtcctaggaatggtgattggcggaacagcgggagtaattttcctgacattttccatcattgcaattttgagtcagcggccacggaagtag

SEQ ID NO: 157620 - DNA, 2241 bp, Artificial Sequence
  derived and/or modified sequence
atggcctggatcagaagcacctgcatcctgttcttcaccctgctgttcgcccacatcgccgccgtgcccatcaagtacctgcccgaggagaacgtgcacgacgccgacttcggcgagcagaaggacatcagcgagatcaacctggccgccggcctggacctgttccagggcgacatcctgctgcagaagagcagaaacggcctgagagaccccaacaccagatggaccttccccatcccctacatcctggccgacaacctgggcctgaacgccaagggcgccatcctgtacgccttcgagatgttcagactgaagagctgcgtggacttcaagccctacgagggcgagagcagctacatcatcttccagcagttcgacggctgctggagcgaggtgggcgaccagcacgtgggccagaacatcagcatcggccagggctgcgcctacaaggccatcatcgagcacgagatcctgcacgccctgggcttctaccacgagcagagcagaaccgacagagacgactacgtgaacatctggtgggaccagatcctgagcggctaccagcacaacttcgacacctacgacgacagcctgatcaccgacctgaacaccccctacgactacgagagcctgatgcactaccagcccttcagcttcaacaagaacgccagcgtgcccaccatcaccgccaagatccccgagttcaacagcatcatcggccagagactggacttcagcgccatcgacctggagagactgaacagaatgtacaactgcaccaccacccacaccctgctggaccactgcaccttcgagaaggccaacatctgcggcatgatccagggcaccagagacgacaccgactgggcccaccaggacagcgcccaggccggcgaggtggaccacaccctgctgggccagtgcaccggcgccggctacttcatgcagttcagcaccagcagcggcagcgccgaggaggccgccctgctggagagcagaatcctgtaccccaagagaaagcagcagtgcctgcagttcttctacaagatgaccggcagccccagcgacagactggtggtgtgggtgagaagagacgacagcaccggcaacgtgagaaagctggtgaaggtgcagaccttccagggcgacgacgaccacaactggaagatcgcccacgtggtgctgaaggaggagcagaagttcagatacctgttccagggcaccaagggcgacccccagaacagcaccggcggcatctacctggacgacatcaccctgaccgagaccccctgccccaccggcgtgtggaccgtgagaaacttcagccaggtgctggagaacaccagcaagggcgacaagctgcagagccccagattctacaacagcgagggctacggcttcggcgtgaccctgtaccccaacagcagagagagcagcggctacctgagactggccttccacgtgtgcagcggcgagaacgacgccatcctggagtggcccgtggagaacagacaggtgatcatcaccatcctggaccaggagcccgacgtgagaaacagaatgagcagcagcatggtgttcaccaccagcaagagccacaccagccccgccatcaacgacaccgtgatctgggacagacccagcagagtgggcacctaccacaccgactgcaactgcttcagaagcatcgacctgggctggagcggcttcatcagccaccagatgctgaagagaagaagcttcctgaagaacgacgacctgatcatcttcgtggacttcgaggacatcacccacctgagccagaccgaggtgcccaccaagggcaagagactgagcccccagggcctgatcctgcagggccaggagcagcaggtgagcgaggagggcagcggcaaggccatgctggaggaggccctgcccgtgagcctgagccagggccagcccagcagacagaagagaagcgtggagaacaccggccccctggaggaccacaactggccccagtacttcagagacccctgcgaccccaacccctgccagaacgacggcatctgcgtgaacgtgaagggcatggccagctgcagatgcatcagcggccacgccttcttctacaccggcgagagatgccaggccgtgcaggtgcacggcagcgtgctgggcatggtgatcggcggcaccgccggcgtgatcttcctgaccttcagcatcatcgccatcctgagccagagacccagaaagtag

SEQ ID NO: 157621 - DNA, 2892 bp, Artificial Sequence
  derived and/or modified sequence
cttgcagcaatggcttggattagatccacttgcattctcttttttaccttgctttttgcccacatagcagctgtaccgattaagtatcttcctgaagaaaatgtacatgatgcagattttggtgaacagaaggatatttcagaaatcaatttagctgcaggcttggacctctttcaaggggacatcctcttgcagaaatccagaaatggcctgagagacccaaacaccaggtggacgttccccattccttacatcttggctgataatttggggctgaatgctaaaggagccattctgtatgcctttgagatgttccgtctcaagtcctgtgtggatttcaagccctatgaaggagagagctcatatatcatatttcaacagtttgatgggtgctggtctgaggttggtgaccaacatgtgggacagaacatttccattggccaaggatgtgcctataaggccatcatagaacacgagatcctgcatgctttgggattttaccacgagcagtcaaggacggaccgggatgattatgtgaacatctggtgggaccaaattctttcaggttaccagcacaactttgacacctatgatgatagcttaatcacagacctcaatacaccctatgattatgagtctttgatgcactaccagcctttctcatttaacaagaatgcaagtgttcccaccatcacagccaagatccctgagtttaactccattatcggacagcgcctggatttcagtgccattgatttagagaggctgaaccgaatgtacaattgcaccacaactcacactcttttggaccactgtacttttgagaaggcaaacatctgtggaatgattcagggcaccagagatgacactgactgggcccatcaggacagtgctcaggctggagaagtggatcacaccttgttgggacaatgcacaggtgccggctacttcatgcagttcagcaccagctcggggtccgcggaagaggcagccctactggagtctcggattctttacccaaagaggaagcagcagtgcctgcaatttttctataaaatgacgggaagtccttcagacagactcgttgtctgggtcaggagggatgacagcacaggcaatgttcgcaagttggtgaaggtgcagacttttcaaggagatgatgaccacaattggaaaattgcccatgtggtgctcaaagaggaacagaagtttcgctaccttttccagggcacaaaaggcgaccctcagaactcaactgggggaatttacctagatgacatcactctgacagaaaccccctgccccacaggggtctggacagtccggaatttctcccaagtccttgagaacaccagcaaaggggacaagcttcagagccctcgattctacaattcggagggatatggttttggggtaactttatacccaaatagcagagaaagctctggttacttgagacttgcttttcatgtgtgcagtggggagaacgatgctatcctggagtggccggtagaaaacagacaggtgataattaccatccttgaccaggagcctgatgtccggaacaggatgtcctcaagcatggtgttcactacctcgaagtcgcacacatctccagcgataaatgacactgtcatctgggacaggccgtccagggtgggaacctatcatacggactgtaattgttttagaagcatcgacttgggctggagtggtttcatttcccaccaaatgctgaaaaggaggagtttcctgaaaaatgatgacctcatcatatttgtggactttgaagatatcacccacctcagccagactgaagttcccactaaaggcaaaagactgagcccccaaggcctcattctccaaggccaggagcagcaggtctccgaagaaggttcgggaaaggccatgttagaggaagccctacctgtcagcctgagccaggggcagcccagccgacagaagcggtcggtggagaacacaggccccctggaggaccataactggccacagtacttcagagacccatgtgacccaaacccttgccaaaatgacggcatctgtgtgaacgtgaaggggatggcgagctgcaggtgcatctctggacatgctttcttctacacgggggagcgctgtcaggccgtgcaggtgcacggcagtgtcctgggcatggtgatcggaggcacggctggcgtgatcttcttgaccttctccatcatcgccatcctttcccaaaggccaaggaagtgacctgcctgctggcattggccagaccacagcagcacctcctccatgcaggccttaactttcccatggtcaatgcagtttttatcagccttgctttggataggacctccaaggactaaggcctccagccccatgtgtgacccttgtcatctctctgccccacataattctgttactttgctatgtgctcctaatgtatctagtgtgtcctgtgacaacactcatcacacttcattgtaaatcacttgttttattgactgtctttcctatagactgtaagctccatgagggcaggcacatgttgttctcattgaccgtgctggccccagtgcctagatgcatggctggcacattgttggcactcaacaatggttgaatgaataaaacaataaatgaatgaataactaagatatagaaactctcatttatattgcagattgaatatatatgatgaaattcttatgttgaatatgttagaatcaaatactcatttttcattagatacagtagtgtcatcactcttttaagatcttgttaaagatttcaaataaaggtacttctgggcagccaggctgcacagcatttgctttcctctgagattctaagagaaggcctttaataaatttaataaatattgagttagca

SEQ ID NO: 157622 - protein, 535 aa, Artificial Sequence
  derived and/or modified sequence
MAALLAAAAVRARILQVSSKVKSSPTWYSASSFSSSVPTVKLFIGGKFVESKSDKWIDIHNPATNEVIGRVPQATKAEMDAAIASCKRAFPAWADTSVLSRQQVLLRYQQLIKENLKEIAKLITLEQGKTLADAEGDVFRGLQVVEHACSVTSLMMGETMPSITKDMDLYSYRLPLGVCAGIAPFNFPAMIPLWMFPMAMVCGNTFLMKPSERVPGATMLLAKLLQDSGAPDGTLNIIHGQHEAVNFICDHPDIKAISFVGSNKAGEYIFERGSRHGKRVQANMGAKNHGVVMPDANKENTLNQLVGAAFGAAGQRCMALSTAVLVGEAKKWLPELVEHAKNLRVNAGDQPGADLGPLITPQAKERVCNLIDSGTKEGASILLDGRKIKVKGYENGNFVGPTIISNVKPNMTCYKEEIFGPVLVVLETETLDEAIQIVNNNPYGNGTAIFTTNGATARKYAHLVDVGQVGVNVPIPVPLPMFSFTGSRSSFRGDTNFYGKQGIQFYTQLKTITSQWKEEDATLSSPAVVMPTMGR

SEQ ID NO: 157623 - DNA, 1608 bp, Artificial Sequence
  derived and/or modified sequence
atggccgctctcctcgcagctgcagcagtcagagcacgaattctccaggtatctagtaaagtgaaaagttctcccacttggtactccgcctcctctttcagctctagtgttcccaccgtgaagttgtttattggaggcaaattcgtagagagcaagtccgacaagtggatcgacatccacaatcccgctacgaatgaagttattggccgcgtgccacaggcgacaaaggctgaaatggatgccgccattgcttcttgcaaacgcgctttccccgcctgggccgatacgtccgtactcagtcggcagcaggttctgctccggtaccagcagctcattaaagaaaacctgaaggagattgcaaagctgattactctggagcaaggtaaaacactggcagacgctgagggagacgtgtttagggggctacaggtggtagaacatgcctgctcagtgacgtcactgatgatgggcgaaaccatgcctagtattactaaagatatggacctctatagctataggctgccactaggagtgtgtgccggcatcgcgccgtttaattttccggcaatgattcccctttggatgttccctatggctatggtctgcgggaacaccttcctgatgaagccctcagagcgcgtgcccggtgccactatgcttctcgccaagctgcttcaagattctggtgcgccagatggcacactgaatatcatccatggacagcacgaagccgtaaactttatttgcgaccacccagacattaaggccatttcttttgtgggctctaacaaggcaggagaatatatctttgaaaggggaagcagacacggcaaaagggtacaggcgaatatgggagccaagaaccacggggttgtgatgccagatgctaataaagaaaatactctgaatcagctcgtcggggctgccttcggagcagcagggcagcgctgcatggctctctctaccgcagtgttagtaggcgaggccaaaaagtggcttccggaactagtagaacatgcaaaaaatctccgcgtcaatgctggagatcaacccggcgccgacctcggcccgcttatcacaccacaggctaaggaacgagtatgcaaccttatcgacagcgggacgaaagagggggcctctatcctgctcgatggcaggaagattaaggtgaaggggtatgagaacggtaatttcgttggccctacaatcatttctaacgtaaagcccaatatgacctgttacaaagaggagatttttgggcctgtgctggtcgtgcttgagaccgaaacactggacgaagcaatccaaatcgtgaataacaacccttacggcaatggcaccgccatattcacgaccaacggcgctaccgctcgtaagtatgcccatcttgtcgacgtgggacaggtgggcgtcaacgtaccaatccccgtgccacttccaatgtttagttttaccggcagccggagctcgtttcggggggacacaaacttttacggcaagcaggggatccaattctacacccaactgaagacaatcacgagccagtggaaggaggaagatgccactctctcatctcccgcagtggttatgccgacaatgggcagatag
